(19) United States
(12) Patent Application Publication
(10) Pub. No.: US 2009/0181380 A1
(43) Pub. Date: Jul. 16, 2009

(54) GENEMAP OF THE HUMAN GENES ASSOCIATED WITH CROHN'S DISEASE

(76) Inventors: Abdelmajid Belouchi, Ville St.-Laurent (CA); John Verner Raelson, Hodson (CA); Walter Edward Bradley, Montreal (CA); Bruno Paquin, Chateangay (CA); Helene Fournier, Montreal (CA); Quynh Nguyen-Huu, Longveuil (CA); Pascal Croteau, Laval (CA); Rene Allard, Montreal (CA); Sandie Briand, Montreal (CA); Paul Van Eerdewegh, Carlisle, MA (US); Randall David Little, Laval (CA); Jonathan Segal, Efrat (IL); Tim Keith, Bedford, MA (US)

Correspondence Address: Ralph A. Dowell of DOWELL & DOWELL P.C., 2111 Eisenhower Ave, Suite 406, Alexandria, VA, 22314, US

(21) Appl. No.: 12/158,262

(22) PCT Filed: Dec. 19, 2006
(86) PCT No.: PCT/US06/48246

§ 371 Date: Nov. 20, 2008

Related U.S. Application Data
(60) Provisional application No. 60/751,420, filed on Dec. 19, 2005.

(51) Int. Cl. C12Q 1/68; G06F 19/00; G01N 33/53

(52) U.S. Cl. 435/6; 703/11; 436/501; 702/19

(57) ABSTRACT

The present invention relates to the selection of a set of polymorphism makers for use in genome wide association studies based on linkage disequilibrium mapping. In particular, the invention relates to the fields of pharmacogenomics, diagnostics, patient therapy and the use of genetic haplotype information to predict an individual's susceptibility to IBD (ex: Chrohn's disease) and/or their response to a particular drug or drugs.

### FIELD OF THE INVENTION

[0001] The invention relates to the field of genomics and genetics, including genome analysis and the study of DNA variations. In particular, the invention relates to the fields of pharmacogenomics, diagnostics, patient therapy and the use of genetic haplotype information to predict an individual's susceptibility to inflammatory bowel disease (IBD), e.g. Crohn's disease and/or their response to a particular drug or drugs, so that drugs tailored to genetic differences of population groups may be developed and/or administered to the appropriate population.

[0002] The invention also relates to a GeneMap for IBD (e.g. Crohn's disease), which links variations in DNA (including both genic and non-genic regions) to an individual's susceptibility to IBD and/or response to a particular drug or drugs. The invention further relates to the genes disclosed in the GeneMap (see Tables 2-4), which is related to methods and reagents for detection of an individual's increased or decreased risk for Crohn's disease by identifying at least one polymorphism in one or a combination of the genes from the GeneMap. Also related are the candidate regions identified in Table 1, which are associated with IBD. In addition, the invention further relates to nucleotide sequences of those genes including genomic DNA sequences, cDNA sequences, single nucleotide polymorphisms (SNPs), other types of polymorphisms (insertions, deletions, microsatellites), alleles and haplotypes (see Sequence Listing and Tables 5-36).

[0003] The invention further relates to isolated nucleic acids comprising these nucleotide sequences and isolated polypeptides or peptides encoded thereby. Also related are expression vectors and host cells comprising the disclosed nucleic acids or fragments thereof, as well as antibodies that bind to the encoded polypeptides or peptides.

[0004] The present invention further relates to ligands that modulate the activity of the disclosed genes or gene products. In addition, the invention relates to diagnostics and therapeutics for IBD (in particular UC and Crohn's disease), utilizing the disclosed nucleic acids, polymorphisms, chromosomal regions, gene maps, polypeptides or peptides, antibodies and/or ligands and small molecules that activate or repress relevant signaling events.

### BACKGROUND OF THE INVENTION

[0005] Inflammatory bowel disease (IBD) is a collective term used to describe two intestinal disorders whose etiology is not completely understood: ex: Crohn's disease (CD) and ulcerative colitis (UC). The course and prognosis of IBD, which occurs worldwide and afflicts several million people, varies widely. Onset of IBD is predominant in young adulthood. Symptoms of IBD include abdominal cramps and pain, diarrhea, weight loss and intestinal bleeding. Anemia and weight loss are also common signs of IBD. Between 10% and 15% of people with IBD require surgery over a ten-year period. Patients with IBD are also at increased risk for the development of intestinal cancer. These diseases are accompanied by a high frequency of psychological symptoms, including anxiety and depression.

[0006] There are common features in many of the later stages of IBD. Inflammation at the disease site/target organ is typically present, caused by the release of inflammatory (also termed “proinflammatory”) cytokines by T cells and by other cells that contribute to the activation steps and effector pathways of immune/inflammatory processes. The current consensus opinion regarding the pathogenesis of IBD centers on the role of genetically determined dysregulation in the host immune response toward the resident bacterial flora.

[0007] UC involves the rectum and spreads proximally to contiguous portions or to the entire colon. Disease activity is usually intermittent, with relapses and periods of quiescence. The sigmoidoscopic or colonoscopic picture is characteristic. In mild disease, the colonic mucosa appears hyperemic and granular. In more severe disease, tiny punctuate ulcers are present and the mucosa is characteristically friable and may bleed spontaneously. Histologically, the inflammatory cell infiltrate in active disease usually includes neutrophils, often invading crypts as well as being associated with epithelial damage and crypt distortion. An increased number of lymphocytes in the lamina propria and basal plasmacytosis are usually present. Between 500,000 and 700,000 patients suffer from UC in the United States. Extra-colonic manifestations of UC include arthritis, uveitis, aphthous stomatitis, pyoderma gangrenosum, and erythema nodosum. Initial therapy for patients with mild to moderate disease is usually an aminosalicylate. In controlled trials, disease improvement by various criteria occurred in up to 30% of subjects in the placebo groups; thus, no specific treatment may be an option for patients with very mild disease. In patients with active UC who do not respond to standard 5-ASA treatment and in those with more severe disease, oral corticosteroids have been the mainstay of acute symptomatic therapy. However, corticosteroids are not effective in long-term maintenance of remission in patients with UC given that their use is associated with significant toxicity over time. Although the pathogenesis of UC is not fully understood, there is increasing evidence that UC may be an autoimmune disorder, with B cells playing a role in disease pathophysiology. B cells, as well as T cells, are present in basal lymphoid aggregates, a histopathologic feature considered indicative of UC and seen in histologic sections from patients with active UC. Whereas mucosal inflammation in UC is thought to be driven by activated T cells, these patients have a T-helper-2 (Th2) cytokine expression pattern profile. As. Th2 cytokines classically drive B-cell immune responses and antibody production, a central role for B cell may be postulated in UC.

[0008] Crohn's disease is an Inflammatory Bowel Disease (IBD) in which inflammation extends beyond the inner gut lining and penetrates deeper layers of the intestinal wall of any part of the digestive system (esophagus, stomach, small intestine, large intestine, and/or anus). Crohn's disease is a chronic, lifelong disease which can cause painful, often life altering symptoms including diarrhea, cramping and rectal bleeding. Crohn's disease occurs most frequently in the industrialized world and the typical age of onset falls into two distinct ranges, 15 to 30 years of age and 60 to 80 years of age. The highest mortality is during the first years of disease, and in cases where the disease symptoms are long lasting, an increased risk of colon cancer is observed. Crohn's disease presently accounts for approximately two thirds of IBD-related physician visits and hospitalizations, and 50 to 80% of Crohn's disease patients eventually require surgical treatment. Development of Crohn's disease is influenced by environmental and host specific factors, together with “exogenous biological factors” such as constituents of the intestinal flora (the naturally occurring bacteria found in the intestine). It is believed that in genetically predisposed individuals, exogenous factors such as infectious agents, and host-specific characteristics such as intestinal barrier function and/or blood supply, combine with specific environmental factors to cause a chronic state of improperly regulated immune system function. In this hypothetical model, microorganisms trigger an immune response in the intestine, and in susceptible individuals, this immune response is not turned off when the microorganism is cleared from the body. The chronically “turned on” immune response causes damage to the intestine resulting in the symptoms of Crohn's disease.

[0009] Current treatments for Crohn's disease are primarily aimed at reducing symptoms by suppressing inflammation and do not address the root cause of the disease. Despite a preponderance of evidence showing inheritance of a risk for Crohn's disease through epidemiological studies and genome wide linkage analyses, the genes affecting Crohn's disease have yet to be discovered (Hugot J P, and Thomas G., 1998). There is a need in the art for identifying specific genes related to Crohn's disease to enable the development of therapeutics that address the causes of the disease rather than relieving its symptoms. The failure in past studies to identify causative genes in complex diseases, such as Crohn's disease, has been due to the lack of appropriate methods to detect a sufficient number of variations in genomic DNA samples (markers), the insufficient quantity of necessary markers available, and the number of needed individuals to enable such a study.

[0010] Unfortunately, new therapies for IBD are few, and both diagnosis and treatment have been hampered by a lack of detailed knowledge of the etiology. Despite the progress noted above, there remains a need in the art for new and improved methods for treating this debilitating group of diseases, and the present inventors have made a significant step forward with the invention disclosed herein. The invention includes a method for treating IBD and inflammatory diseases in a subject, comprising administering to a subject in need of such treatment an effective amount of a pharmaceutical composition that comprises (a) an compound that inhibits inflammation; and (b) a pharmaceutically acceptable carrier, thereby treating the disease.

[0011] The DNA sequences between two human genomes are 99.9% identical. The variations in DNA sequence between individuals can be, as an example, deletions of small or large stretches of DNA, insertions of stretches of DNA, variations in the number of repetitive DNA elements, and changes in single base positions in the genome called “single nucleotide polymorphisms” (SNPs). Human DNA sequence variation accounts for a large fraction of observed differences between individuals, including susceptibility to disease.

[0012] Many common diseases, like IBD, are complex genetic traits and are believed to involve several disease-genes rather than single genes, as is observed for rare diseases. This makes detection of any particular gene substantially more difficult than in a rare disease, where a single gene mutation that segregates according to a Mendelian inheritance pattern is the causative mutation. Any one of the multiple interacting gene mutations involved in the etiology of a complex disease will impart a lower relative risk for the disease than will the single gene mutation involved in a simple genetic disease. Low relative risk alleles are more difficult to detect and, as a result, the success of positional cloning using linkage mapping that was achieved for simple genetic disease genes has not been repeated for complex diseases.

[0013] Several approaches have been proposed to discover and characterize multiple genes in complex genetic traits. These gene discovery methods can be subdivided into hypothesis-free disorder association studies and hypothesis-driven candidate gene or region studies. The candidate gene approach relies on the analysis of a gene in patients who have a disorder in which the gene is thought to play a role. This approach is limited in utility because it only provides for the investigation of genes with known functions. Although variant sequences of candidate genes may be identified using this approach, it is inherently limited by the fact that variant sequences in other genes that contribute to the phenotype will be necessarily missed when the technique is employed. Genome-wide scans (GWS) have been shown to be efficient in identifying disease genes, such as Crohn's disease susceptibility genes (NOD2/CARD15 and OCTN). In contrast to the candidate gene approach, a GWS searches throughout the genome without any a priori hypothesis and consequently can identify genes that are not obvious candidates for the disease as well as genes that are relevant candidates for the disease it can also identify chromosomal regions that are structurally important where mutations can influence gene function of specific genes.

[0014] Family-based linkage mapping methods were initially used for disorder locus identification. This technique locates genes based on the relatively limited number of genetic recombination events within the families used in the study, and results in large chromosomal regions containing hundreds of genes, any one of which could be the disorder-causing gene. Population-based, or linkage disequilibrium (LD) mapping is based on the premise that regions adjacent to a gene of interest are co-transmitted through the generations along with the gene. As a result, LD extends over shorter genetic regions than does linkage (Hewett et al., 2002), and can facilitate detection of genes with lower relative risk than family linkage mapping approaches. LD-based mapping also defines much smaller candidate regions, which may contain only a few genes, making the identification of the actual disorder gene much easier.

[0015] It has been estimated that a GWS that uses a general population and case/control association (LD) analysis would require approximately 700,000 SNP markers (Carlson et al., 2003). The cost of a GWS at this marker density for a sufficient sample size for statistical power is economically prohibitive. The use of a special founder population (genetic isolate), such as the French Canadian population of Quebec, is one solution to the problem with LD analysis. The French Canadian population in Quebec (Quebec Founder Population—QFP) provides one of the best resources in the world for gene discovery based on its high levels of genetic sharing and genetic homogeneity. By combining DNA collected from the QFP, high throughput genotyping capabilities and proprietary algorithms for genetic analysis, a comprehensive genome-wide association study was facilitated. The present invention relates specifically to a set of IBD (E.g., Crohn's disease)-causing genes (GeneMap) and targets, which present attractive points of therapeutic intervention.

[0016] In view of the foregoing, identifying susceptibility genes associated with IBD (e.g. Crohn's disease) and their respective biochemical pathways will facilitate the identification of diagnostic markers as well as novel targets for improved therapeutics. It will also improve the quality of life for those afflicted by this disease and will reduce the economic costs of these afflictions at the individual and societal level. The identification of those genetic markers would provide the basis for novel genetic tests and eliminate or reduce the therapeutic methods currently used. The identification of those genetic markers will also provide the development of effective therapeutic intervention for the battery of laboratory, radiological, and endoscopic evaluations typically required to diagnose IBD. The present invention satisfies this need and provides related advantages as well.

### DESCRIPTION OF THE FILES CONTAINED ON THE CD-R

[0017] The contents of the submission on compact discs submitted herewith are incorporated herein by reference in their entirety: A compact disc copy of the Sequence Listing (COPY 1) (filename: GENI 011 01WO SeqList.txt, date recorded: Dec. 19, 2006, file size 39,614,000 bytes); a duplicate compact disc copy of the Sequence Listing (COPY 2) (filename: GENI 011 01WO SeqList.txt, date recorded: Dec. 19, 2006, file size 39,614,000 bytes); a duplicate compact disc copy of the Sequence Listing (COPY 3) (filename: GENI 011 01WO SeqList.txt, date recorded: Dec. 19, 2006, file size 39,614,000 bytes); a computer readable format copy of the Sequence Listing (CRF COPY) (filename: GENI 011 01WO SeqList.txt, date recorded: Dec. 19, 2006, file size 39,614,000 bytes).

### DEFINITIONS

[0018] Throughout the description of the present invention, several terms are used that are specific to the science of this field. For the sake of clarity and to avoid any misunderstanding, these definitions are provided to aid in the understanding of the specification and claims:

[0019] Allele: One of a pair, or series, of forms of a gene or non-genic region that occur at a given locus in a chromosome. Alleles are symbolized with the same basic symbol (e.g., B for dominant and b for recessive; B1, B2, Bn for n additive alleles at a locus). In a normal diploid cell there are two alleles of any one gene (one from each parent), which occupy the same relative position (locus) on homologous chromosomes. Within a population there may be more than two alleles of a gene. See multiple alleles. SNPs also have alleles, i.e., the two (or more) nucleotides that characterize the SNP.

[0020] Amplification of nucleic acids: refers to methods such as polymerase chain reaction (PCR), ligation amplification (or ligase chain reaction, LCR) and amplification methods based on the use of Q-beta replicase. These methods are well known in the art and are described, for example, in U.S. Pat. Nos. 4,683,195 and 4,683,202. Reagents and hardware for conducting PCR are commercially available. Primers useful for amplifying sequences from the disorder region are preferably complementary to, and preferably hybridize specifically to, sequences in the disorder region or in regions that flank a target region therein. Genes from Tables 2-4 generated by amplification may be sequenced directly. Alternatively, the amplified sequence(s) may be cloned prior to sequence analysis.

[0021] Antigenic component: is a moiety that binds to its specific antibody with sufficiently high affinity to form a detectable antigen-antibody complex.

[0022] Antibodies: refer to polyclonal and/or monoclonal antibodies and fragments thereof, and immunologic binding equivalents thereof, that can bind to proteins and fragments thereof or to nucleic acid sequences from the disorder region, particularly from the disorder gene products or a portion thereof. The term antibody is used both to refer to a homogeneous molecular entity, or a mixture such as a serum product made up of a plurality of different molecular entities. Proteins may be prepared synthetically in a protein synthesizer and coupled to a carrier molecule and injected over several months into rabbits. Rabbit sera are tested for immunoreactivity to the protein or fragment. Monoclonal antibodies may be made by injecting mice with the proteins, or fragments thereof. Monoclonal antibodies can be screened by ELISA and tested for specific immunoreactivity with protein or fragments thereof (Harlow et al. 1988, Antibodies: A Laboratory Manual, Cold Spring Harbor Laboratory, Cold Spring Harbor, N.Y.). These antibodies will be useful in developing assays as well as therapeutics.

[0023] Associated allele: refers to an allele at a polymorphic locus that is associated with a particular phenotype of interest, e.g., a predisposition to a disorder or a particular drug response.

[0024] cDNA: refers to complementary or copy DNA produced from an RNA template by the action of RNA-dependent DNA polymerase (reverse transcriptase). Thus, a cDNA clone means a duplex DNA sequence complementary to an RNA molecule of interest, included in a cloning vector or PCR amplified. This term includes genes from which the intervening sequences have been removed.

[0025] cDNA library: refers to a collection of recombinant DNA molecules containing cDNA inserts that together comprise essentially all of the expressed genes of an organism or tissue. A cDNA library can be prepared by methods known to one skilled in the art (see, e.g., Cowell and Austin, 1997, “DNA Library Protocols,” Methods in Molecular Biology). Generally, RNA is first isolated from the cells of the desired organism, and the RNA is used to prepare cDNA molecules.

[0026] Cloning: refers to the use of recombinant DNA techniques to insert a particular gene or other DNA sequence into a vector molecule. In order to successfully clone a desired gene, it is necessary to use methods for generating DNA fragments, for joining the fragments to vector molecules, for introducing the composite DNA molecule into a host cell in which it can replicate, and for selecting the clone having the target gene from amongst the recipient host cells.

[0027] Cloning vector: refers to a plasmid or phage DNA or other DNA molecule that is able to replicate in a host cell. The cloning vector is typically characterized by one or more endonuclease recognition sites at which such DNA sequences may be cleaved in a determinable fashion without loss of an essential biological function of the DNA, and which may contain a selectable marker suitable for use in the identification of cells containing the vector.

[0028] Coding sequence or a protein-coding sequence: is a polynucleotide sequence capable of being transcribed into mRNA and/or capable of being translated into a polypeptide or peptide. The boundaries of the coding sequence are typically determined by a translation start codon at the 5′-terminus and a translation stop codon at the 3′-terminus.

[0029] Complement of a nucleic acid sequence: refers to the antisense sequence that participates in Watson-Crick base-pairing with the original sequence.

[0030] Disorder region: refers to the portions of the human chromosomes displayed in Table 1 bounded by the markers from Tables 2-36.

[0031] Disorder-associated nucleic acid or polypeptide sequence: refers to a nucleic acid sequence that maps to region of Table 1 or the polypeptides encoded therein (Tables 2-4, nucleic acids, and polypeptides). For nucleic acids, this encompasses sequences that are identical or complementary to the gene sequences from Tables 2-4, as well as sequence-conservative, function-conservative, and non-conservative variants thereof. For polypeptides, this encompasses sequences that are identical to the polypeptide, as well as function-conservative and non-conservative variants thereof. Included are the alleles of naturally-occurring polymorphisms causative of IBD such as, but not limited to, alleles that cause altered expression of genes of Tables 2-4 and alleles that cause altered protein levels or stability (e.g., decreased levels, increased levels, expression in an inappropriate tissue type, increased stability, and decreased stability).

[0032] Expression vector: refers to a vehicle or plasmid that is capable of expressing a gene that has been cloned into it, after transformation or integration in a host cell. The cloned gene is usually placed under the control of (i.e., operably linked to) a regulatory sequence.

[0033] Function-conservative variants: are those in which a change in one or more nucleotides in a given codon position results in a polypeptide sequence in which a given amino acid residue in the polypeptide has been replaced by a conservative amino acid substitution. Function-conservative variants also include analogs of a given polypeptide and any polypeptides that have the ability to elicit antibodies specific to a designated polypeptide.

[0034] Founder population: Also called a population isolate, this is a large number of people who have mostly descended, in genetic isolation from other populations, from a much smaller number of people who lived many generations ago.

[0035] Gene: Refers to a DNA sequence that encodes through its template or messenger RNA a sequence of amino acids characteristic of a specific peptide, polypeptide, or protein. The term “gene” also refers to a DNA sequence that encodes an RNA product. The term gene as used herein with reference to genomic DNA includes intervening, non-coding regions, as well as regulatory regions, and can include 5′ and 3′ ends. A gene sequence is wild-type if such sequence is usually found in individuals unaffected by the disorder or condition of interest. However, environmental factors and other genes can also play an important role in the ultimate determination of the disorder. In the context of complex disorders involving multiple genes (oligogenic disorder), the wild type, or normal sequence can also be associated with a measurable risk or susceptibility, receiving its reference status based on its frequency in the general population.

[0036] GeneMaps: are defined as groups of gene(s) that are directly or indirectly involved in at least one phenotype of a disorder (some non-limiting example of GeneMaps comprises various combinations of genes from Tables 2-4). As such, GeneMaps enable the development of synergistic diagnostic products, creating “theranostics”.

[0037] Genotype: Set of alleles at a specified locus or loci.

[0038] Haplotype: The allelic pattern of a group of (usually contiguous) DNA markers or other polymorphic loci along an individual chromosome or double helical DNA segment. Haplotypes identify individual chromosomes or chromosome segments. The presence of shared haplotype patterns among a group of individuals implies that the locus defined by the haplotype has been inherited, identical by descent, from a common ancestor. Detection of identical by descent haplotypes is the basis of linkage disequilibrium (LD) mapping. Haplotypes are broken down through the generations by recombination and mutation. In some instances, a specific allele or haplotype may be associated with susceptibility to a disorder or condition of interest, e.g., Crohn's disease. In other instances, an allele or haplotype may be associated with a decrease in susceptibility to a disorder or condition of interest, i.e., a protective sequence.

[0039] Host: includes prokaryotes and eukaryotes. The term includes an organism or cell that is the recipient of an expression vector (e.g., autonomously replicating or integrating vector).

[0040] Hybridizable: nucleic acids are hybridizable to each other when at least one strand of the nucleic acid can anneal to another nucleic acid strand under defined stringency conditions. In some embodiments, hybridization requires that the two nucleic acids contain at least 10 substantially complementary nucleotides; depending on the stringency of hybridization, however, mismatches may be tolerated. The appropriate stringency for hybridizing nucleic acids depends on the length of the nucleic acids and the degree of complementarity, and can be determined in accordance with the methods described herein.

[0041] Identity by descent: Identity among DNA sequences for different individuals that is due to the fact that they have all been inherited from a common ancestor. LD mapping identifies Identity by descent haplotypes as the likely location of disorder genes shared by a group of patients.

[0042] Identity: as known in the art, is a relationship between two or more polypeptide sequences or two or more polynucleotide sequences, as determined by comparing the sequences. In the art, identity also means the degree of sequence relatedness between polypeptide or polynucleotide sequences, as the case may be, as determined by the match between strings of such sequences. Identity and similarity can be readily calculated by known methods, including but not limited to those described in A. M. Lesk (ed), 1988, Computational Molecular Biology, Oxford University Press, NY; D. W. Smith (ed), 1993, Biocomputing. Informatics and Genome Projects, Academic Press, NY; A. M. Griffin and H. G. Griffin, H. G (eds), 1994, Computer Analysis of Sequence Data, Part 1, Humana Press, NJ; G. von Heinje, 1987, Sequence Analysis in Molecular Biology, Academic Press; and M. Gribskov and J. Devereux (eds), 1991, Sequence Analysis Primer, M Stockton Press, NY; H. Carillo and D. Lipman, 1988, SIAM J. Applied Math., 48:1073.

[0043] Immunogenic component: is a moiety that is capable of eliciting a humoral and/or cellular immune response in a host animal.

[0044] Isolated nucleic acids: are nucleic acids separated away from other components (e.g., DNA, RNA, and protein) with which they are associated (e.g., as obtained from cells, chemical synthesis systems, or phage or nucleic acid libraries). Isolated nucleic acids are at least 60% free, preferably 75% free, and most preferably 90% free from other associated components. In accordance with the present invention, isolated nucleic acids can be obtained by methods described herein, or other established methods, including isolation from natural sources (e.g., cells, tissues, or organs), chemical synthesis, recombinant methods, combinations of recombinant and chemical methods, and library screening methods.

[0045] Isolated polypeptides or peptides: are those that are separated from other components (e.g., DNA, RNA, and other polypeptides or peptides) with which they are associated (e.g., as obtained from cells, translation systems, or chemical synthesis systems). In a preferred embodiment, isolated polypeptides or peptides are at least 10% pure; more preferably, 80% or 90% pure. Isolated polypeptides and peptides include those obtained by methods described herein, or other established methods, including isolation from natural sources (e.g., cells, tissues, or organs), chemical synthesis, recombinant methods, or combinations of recombinant and chemical methods. Proteins or polypeptides referred to herein as recombinant are proteins or polypeptides produced by the expression of recombinant nucleic acids. A portion as used herein with regard to a protein or polypeptide, refers to fragments of that protein or polypeptide. The fragments can range in size from 5 amino acid residues to all but one residue of the entire protein sequence. Thus, a portion or fragment can be at least 5, 5-50, 50-100, 100-200, 200-400, 400-800, or more consecutive amino acid residues of a protein or polypeptide.

[0046] Linkage disequilibrium (LD): the situation in which the alleles for two or more loci do not occur together in individuals sampled from a population at frequencies predicted by the product of their individual allele frequencies. In other words, markers that are in LD do not follow Mendel's second law of independent random segregation. LD can be caused by any of several demographic or population artifacts as well as by the presence of genetic linkage between markers. However, when these artifacts are controlled and eliminated as sources of LD, then LD results directly from the fact that the loci involved are located close to each other on the same chromosome so that specific combinations of alleles for different markers (haplotypes) are inherited together. Markers that are in high LD can be assumed to be located near each other and a marker or haplotype that is in high LD with a genetic trait can be assumed to be located near the gene that affects that trait. The physical proximity of markers can be measured in family studies where it is called linkage or in population studies where it is called linkage disequilibrium.

[0047] LD mapping: population based gene mapping, which locates disorder genes by identifying regions of the genome where haplotypes or marker variation patterns are shared statistically more frequently among disorder patients compared to healthy controls. This method is based upon the assumption that many of the patients will have inherited an allele associated with the disorder from a common ancestor (IBD), and that this allele will be in LD with the disorder gene.

[0048] Locus: a specific position along a chromosome or DNA sequence. Depending upon context, a locus could be a gene, a marker, a chromosomal band or a specific sequence of one or more nucleotides.

[0049] Minor allele frequency (MAF): the population frequency of one of the alleles for a given polymorphism, which is equal or less than 50%. The sum of the MAF and the Major allele frequency equals one.

[0050] Markers: an identifiable DNA sequence that is variable (polymorphic) for different individuals within a population. These sequences facilitate the study of inheritance of a trait or a gene. Such markers are used in mapping the order of genes along chromosomes and in following the inheritance of particular genes; genes closely linked to the marker or in LD with the marker will generally be inherited with it. Two types of markers are commonly used in genetic analysis, microsatellites and SNPs.

[0051] Microsatellite: DNA of eukaryotic cells comprising a repetitive, short sequence of DNA that is present as tandem repeats and in highly variable copy number, flanked by sequences unique to that locus.

[0052] Mutant sequence: if it differs from one or more wild-type sequences. For example, a nucleic acid from a gene listed in Tables 2-4 containing a particular allele of a single nucleotide polymorphism may be a mutant sequence. In some cases, the individual carrying this allele has increased susceptibility toward the disorder or condition of interest. In other cases, the mutant sequence might also refer to an allele that decreases the susceptibility toward a disorder or condition of interest and thus acts in a protective manner. The term mutation may also be used to describe a specific allele of a polymorphic locus.

[0053] Non-conservative variants: are those in which a change in one or more nucleotides in a given codon position results in a polypeptide sequence in which a given amino acid residue in a polypeptide has been replaced by a non-conservative amino acid substitution. Non-conservative variants also include polypeptides comprising non-conservative amino acid substitutions.

[0054] Nucleic acid or polynucleotide: purine- and pyrimidine-containing polymers of any length, either polyribonucleotides or polydeoxyribonucleotide or mixed polyribo polydeoxyribonucleotides. This includes single- and double-stranded molecules, i.e., DNA-DNA, DNA-RNA and RNA-RNA hybrids, as well as protein nucleic acids (PNA) formed by conjugating bases to an amino acid backbone. This also includes nucleic acids containing modified bases.

[0055] Nucleotide: a nucleotide, the unit of a DNA molecule, is composed of a base, a 2′-deoxyribose and phosphate ester(s) attached at the 5′ carbon of the deoxyribose. For its incorporation in DNA, the nucleotide needs to possess three phosphate esters but it is converted into a monoester in the process.

[0056] Operably linked: means that the promoter controls the initiation of expression of the gene. A promoter is operably linked to a sequence of proximal DNA if upon introduction into a host cell the promoter determines the transcription of the proximal DNA sequence(s) into one or more species of RNA. A promoter is operably linked to a DNA sequence if the promoter is capable of initiating transcription of that DNA sequence.

[0057] Ortholog: denotes a gene or polypeptide obtained from one species that has homology to an analogous gene or polypeptide from a different species.

[0058] Paralog: denotes a gene or polypeptide obtained from a given species that has homology to a distinct gene or polypeptide from that same species.

[0059] Phenotype: any visible, detectable or otherwise measurable property of an organism such as symptoms of, or susceptibility to, a disorder.

[0060] Polymorphism: occurrence of two or more alternative genomic sequences or alleles between or among different genomes or individuals at a single locus. A polymorphic site thus refers specifically to the locus at which the variation occurs. In some cases, an individual carrying a particular allele of a polymorphism has an increased or decreased susceptibility toward a disorder or condition of interest.

[0061] Portion and fragment: are synonymous. A portion as used with regard to a nucleic acid or polynucleotide refers to fragments of that nucleic acid or polynucleotide. The fragments can range in size from 8 nucleotides to all but one nucleotide of the entire gene sequence. Preferably, the fragments are at least about 8 to about 10 nucleotides in length; at least about 12 nucleotides in length; at least about 15 to about 20 nucleotides in length; at least about 25 nucleotides in length; or at least about 35 to about 55 nucleotides in length.

[0062] Probe or primer: refers to a nucleic acid or oligonucleotide that forms a hybrid structure with a sequence in a target region of a nucleic acid due to complementarity of the probe or primer sequence to at least one portion of the target region sequence.

[0063] Protein and polypeptide: are synonymous. Peptides are defined as fragments or portions of polypeptides, preferably fragments or portions having at least one functional activity (e.g., proteolysis, adhesion, fusion, antigenic, or intracellular activity) as the complete polypeptide sequence.

[0064] Recombinant nucleic acids: nucleic acids which have been produced by recombinant DNA methodology, including those nucleic acids that are generated by procedures which rely upon a method of artificial replication, such as the polymerase chain reaction (PCR) and/or cloning into a vector using restriction enzymes. Portions of recombinant nucleic acids which code for polypeptides can be identified and isolated by, for example, the method of M. Jasin et al., U.S. Pat. No. 4,952,501.

[0065] Regulatory sequence: refers to a nucleic acid sequence that controls or regulates expression of structural genes when operably linked to those genes. These include, for example, the lac systems, the trp system, major operator and promoter regions of the phage lambda, the control region of fd coat protein and other sequences known to control the expression of genes in prokaryotic or eukaryotic cells. Regulatory sequences will vary depending on whether the vector is designed to express the operably linked gene in a prokaryotic or eukaryotic host, and may contain transcriptional elements such as enhancer elements, termination sequences, tissue-specificity elements and/or translational initiation and termination sites.

[0066] Sample: as used herein refers to a biological sample, such as, for example, tissue or fluid isolated from an individual or animal (including, without limitation, plasma, serum, cerebrospinal fluid, lymph, tears, nails, hair, saliva, milk, pus, and tissue exudates and secretions) or from in vitro cell culture-constituents, as well as samples obtained from, for example, a laboratory procedure.

[0067] Single nucleotide polymorphism (SNP): variation of a single nucleotide. This includes the replacement of one nucleotide by another and deletion or insertion of a single nucleotide. Typically, SNPs are biallelic markers although tri- and tetra-allelic markers also exist. For example, SNP A\C may comprise allele C or allele A (Tables 5-36). Thus, a nucleic acid molecule comprising SNP A\C may include a C or A at the polymorphic position. For clarity purposes, an ambiguity code is used in Tables 5-36 and the sequence listing, to represent the variations. For a combination of SNPs, the term “haplotype” is used, e.g. the genotype of the SNPs in a single DNA strand that are linked to one another. In certain embodiments, the term “haplotype” is used to describe a combination of SNP alleles, e.g., the alleles of the SNPs found together on a single DNA molecule. In specific embodiments, the SNPs in a haplotype are in linkage disequilibrium with one another.

[0068] Sequence-conservative: variants are those in which a change of one or more nucleotides in a given codon position results in no alteration in the amino acid encoded at that position (i.e., silent mutation).

[0069] Substantially homologous: a nucleic acid or fragment thereof is substantially homologous to another if, when optimally aligned (with appropriate nucleotide insertions and/or deletions) with the other nucleic acid (or its complementary strand), there is nucleotide sequence identity in at least 60% of the nucleotide bases, usually at least 70%, more usually at least 80%, preferably at least 90%, and more preferably at least 95-98% of the nucleotide bases. Alternatively, substantial homology exists when a nucleic acid or fragment thereof will hybridize, under selective hybridization conditions, to another nucleic acid (or a complementary strand thereof). Selectivity of hybridization exists when hybridization which is substantially more selective than total lack of specificity occurs. Typically, selective hybridization will occur when there is at least about 55% sequence identity over a stretch of at least about nine or more nucleotides, preferably at least about 65%, more preferably at least about 75%, and most preferably at least about 90% (M. Kanehisa, 1984, NucL Acids Res. 11:203-213). The length of homology comparison, as described, may be over longer stretches, and in certain embodiments will often be over a stretch of at least 14 nucleotides, usually at least 20 nucleotides, more usually at least 24 nucleotides, typically at least 28 nucleotides, more typically at least 32 nucleotides, and preferably at least 36 or more nucleotides.

[0070] Wild-type gene from Tables 2-4: refers to the reference sequence. The wild-type gene sequences from Tables 2-36 used to identify the variants (polymorphisms, alleles, and haplotypes) described in detail herein.

[0071] Technical and scientific terms used herein have the meanings commonly understood by one of ordinary skill in the art to which the present invention pertains, unless otherwise defined. Reference is made herein to various methodologies known to those of skill in the art. Publications and other materials setting forth such known methodologies to which reference is made are incorporated herein by reference in their entireties as though set forth in full. Standard reference works setting forth the general principles of recombinant DNA technology include J. Sambrook et al., 1989, Molecular Cloning: A Laboratory Manual, 2d Ed., Cold Spring Harbor Laboratory Press, Cold Spring Harbor, N.Y.; P. B. Kaufman et al., (eds), 1995, Handbook of Molecular and Cellular Methods in Biology and Medicine, CRC Press, Boca Raton; M. J. McPherson (ed), 1991, Directed Mutagenesis: A Practical Approach, IRL Press, Oxford; J. Jones, 1992, Amino Acid and Peptide Synthesis, Oxford Science Publications, Oxford; B. M. Austen and O. M. R. Westwood, 1991, Protein Targeting and Secretion, IRL Press, Oxford; D. N Glover (ed), 1985, DNA Cloning, Volumes I and 11; M. J. Gait (ed), 1984, Oligonucleotide Synthesis; B. D. Hames and S. J. Higgins (eds), 1984, Nucleic Acid Hybridization; Quirke and Taylor (eds), 1991, PCR-A Practical Approach; Harries and Higgins (eds), 1984, Transcription and Translation; R. I. Freshney (ed), 1986, Animal Cell Culture; Immobilized Cells and Enzymes, 1986, IRL Press; Perbal, 1984, A Practical Guide to Molecular Cloning, J. H. Miller and M. P. Calos (eds), 1987, Gene Transfer Vectors for Mammalian Cells, Cold Spring Harbor Laboratory Press; M. J. Bishop (ed), 1998, Guide to Human Genome Computing, 2d Ed., Academic Press, San Diego, Calif.; L. F. Peruski and A. H. Peruski, 1997, The Internet and the New Biology. Tools for Genomic and Molecular Research, American Society for Microbiology, Washington, D.C. Standard reference works setting forth the general principles of immunology include S. Sell, 1996, Immunology, Immunopathology & Immunity, 5th Ed., Appleton & Lange, Publ., Stamford, Conn.; D. Male et al., 1996, Advanced Immunology, 3d Ed., Times Mirror Int'l Publishers Ltd., Publ., London; D. P. Stites and A. L Terr, 1991, Basic and Clinical Immunology, 7th Ed., Appleton & Lange, Publ., Norwalk, Conn.; and A. K. Abbas et al., 1991, Cellular and Molecular Immunology, W. B. Saunders Co., Publ., Philadelphia, Pa. Any suitable materials and/or methods known to those of skill can be utilized in carrying out the present invention; however, preferred materials and/or methods are described. Materials, reagents, and the like to which reference is made in the following description and examples are generally obtainable from commercial sources, and specific vendors are cited herein.

### DETAILED DESCRIPTION OF THE INVENTION

[0072] Inflammatory Bowel Disease (IBD) is characterized by excessive and chronic inflammation at various sites in the gastrointestinal tract. IBD describes two clinical conditions called Crohn's disease (CD) and ulcerative colitis (UC). CD and UC share many clinical and pathological characteristics but they also have some markedly different features. There is strong scientific support suggesting that the main pathological processes in these two diseases are distinct. This patent application will focus primarily on IBD (ex: UC and CD), but is not limited to IBD and encompasses inflammatory diseases in general for therapeutic targets, since IBD and inflammatory diseases can share common therapeutic targets.

### Previously Identified Genes and Loci

[0073] Genetic studies have previously indicated the presence of several loci predisposing to Inflammatory Bowel Diseases. Nine IBD loci have been identified: IBD1 (CARD15/NOD2, Caspase recruitment domain family, member 15 (NOD2 protein)), IBD2 (Inflammatory bowel disease-2), IBD3 (Inflammatory bowel disease-3), IBD4 (Inflammatory bowel disease-4), IBD5 (Inflammatory bowel disease-5), IBD6 (Inflammatory bowel disease-6), IBD7 (Inflammatory bowel disease-7), IBD8 (Inflammatory bowel disease-8), and IBD9 (Inflammatory bowel disease 9).

[0074] Several loci have been identified and replicated to date; they are located on chromosomes 16q12, 12q13.2-q24.1, 6p21, 14q11-q12, 5q31-q33, 19p13, 1p36, 16p, and 3p26 respectively (Wild and Rioux 2004; Duerr et al., 2002). Results from linkage studies have suggested that CD and UC share some loci but do not share others, such as locus 16q12 which is unique to CD (The IBD International Genetics Consortium 2001). Most of the genes determining susceptibility in each of these chromosomal regions remain to be identified. The most widely replicated loci are on chromosomes 16 (caused by mutations in the NOD2/CARD15 gene), 12, 6, 14 and 5 (OCTN2 genes at IBD5 locus), which predispose to early-onset Crohn's disease. Thus, there is a continuing need in the medical arts for genetic markers of IBD and guidance for the use of such markers.

[0075] Several years ago, two different groups reported the association of CARD15 (NOD2) variants with CD (Hugot 2001; Ogura 2001). CARD15 is located at the IBD1 locus. The gene codes for an intracellular receptor involved in the innate immune detection of bacterial products. This detection induces the activation of the NF-kB pathway which is of particular importance in immune and inflammatory responses (Philpott and Viala 2004). Three major mutations represent 82% of the total CARD15 mutations: R702W, G908R, and 1007fsinsC. However they do not explain over 20% of the genetic predisposition to the disease, and altogether, they are carried by 30-50% of CD patients and 15-20% of healthy controls in Caucasian populations. These values are much lower in Japanese or Africans (reviewed in Girardin 2003).

[0076] Recently, the OCTN1 and OCTN2 genes at IBD5 locus have been associated with CD (Peltekova 2004). Variants in these genes are in strong linkage disequilibrium and create a two-allele risk haplotype enriched in patients with CD. Both proteins are trans-membrane sodium-dependent carnitine transporters and sodium-independent organic cation transporters. The variants may cause disease by impairing OCTN activity or expression, reducing carnitine transport in a cell-type and disease-specific manner (Peltekova 2004). The IBD5 locus contains multiple candidate genes including the genes for organic cation transporters (OCTN2/SLC22A4 and SLC22A5), the gene for a LIN4-domain-containing protein (RILIPDLIM3), the gene for the oc2 subunit of proline hydroxylase (P4HA2) and a gene of unknown function (NCBI UniGene identifier Hs.70932). Because of extensive linkage disequilibrium (LD) in this region, it has not been possible to further refine the SNP map and unambiguously identify a single susceptibility gene. With respect to OCTN2, the basal transcription is downregulated by the C allele of G-207C, and this allele disrupts the ability of SLC22A5 to be upregulated in response to heat shock or arachidonic acid as a result of impaired HSF I binding and subsequent transcriptional activation.

[0077] The mechanism by which these organic cation transporters contribute to the pathology of Crohn's disease may relate to the in vivo metabolic importance of carnitine. Carnitine facilitates transport of long chain fatty acids across the mitochondrial inner membrane for subsequent P-oxidation, and is also important in the maintenance of cellular CoenzymeA levels. Carnitine uptake into lymphocytes, along with a corresponding decrease in plasma levels, is a physiological response to inflammation. Symptoms of the related condition Ulcerative Colitis may be due to an energy deficiency in colonic epithelium secondary to poor mitochondrial function due to decreased long-chain fatty acid transport to the mitochondria (Roediger W E 1980). The haplotype of mutations in Crohn's disease patients provided previously might affect cellular metabolic energy levels in inflamed tissue by combining impaired OCTN1 transporter function with downregulation and inability to respond to heat or inflammatory stress by the OCTN2 gene. Heat shock proteins and arachidonic acids are involved in response to a variety of cellular stresses, including sepsis, metabolic stress and ischaemia. The heat shock response modulates inflammation through modulation of NF-kB activation. OCTN2 is a heat stress inducible protein. Thus, the OCTN2 gene is normally upregulated in response to inflammation through binding of HSF I protein to its promoter. This in turn mobilizes carnitine and bolsters metabolism in the inflamed tissue. Impaired OCTN1 carnitine transporter activity and lowered OCTN2 expression level results in reduced metabolism and either triggers or worsens cellular stress in areas of inflammation. The two OCTN transporters may therefore function in the inflammatory pathology of Crohn's disease. Additionally, OCTN1 is a polyspecific cation transporter, and might have a role in the uptake of drugs used to treat CD from the gut. As described above, OCTN2 is a transporter protein with the ability to transport carnitine in a sodium dependent manner. Missense mutations and nonsense mutations in the organic cation transporter OCTN2 had previously been identified in patients with primary Systemic Carnitine Deficiency (SCD), an autosomal recessive disorder characterized by progressive cardiomyopathy, skeletal myopathy, hypoglycemia and hyperammonemia.

[0078] Genes encoding proteins involved in the immune system, epithelial functions, and host response to micro-organisms represent good potential candidates for IBD and have been examined in numerous case-control studies. However, many of the published associations of genetic variants with IBD have not been replicated in follow-up studies.

[0079] The genetic variants that have been identified so far in IBD explain only a fraction of the genetic predisposition to this disorder. It is clear that multiple components contribute to disease risk, each component having a modest effect on disease susceptibility. Thus the development of GeneMaps for IBD may lead to a better understanding of pathogenesis and to the identification of new pathways involved in the disease, ultimately leading to better treatments for the patients. GeneMaps may also lead to molecular diagnostic tools that will identify subjects at risk for CD or for serious complications of the disease.

### Genome Wide Association Study to Construct a GeneMap for IBD (Ex: Crohn's Disease)

[0080] The present invention is based on the discovery of genes associated with IBD and inflammatory diseases in general. In the preferred embodiment, disease-associated loci (candidate regions; Table 1) are identified by the statistically significant differences in allele or haplotype frequencies between the cases and the controls. For the purpose of the present invention, 654 candidate regions (Table 1) are identified.

[0081] The invention provides a method for the discovery of genes associated with IBD (E.g. Crohn's disease) and the construction of a GeneMap for Crohn's disease in a human population, comprising the following steps (see Example section herein):

### Step 1: Recruit Patients (Cases) and Controls

[0082] In the preferred embodiment, 500 patients diagnosed for Crohn's disease along with two family members are recruited from the Quebec Founder Population (QFP). The preferred trios recruited are parent-parent-child (PPC) trios. Trios can also be recruited as parent-child-child (PCC) trios. In another preferred embodiment, more or less than 500 trios are recruited. In another embodiment, independent case and control samples are recruited.

[0083] In another embodiment, the present invention is performed as a whole or partially with DNA samples from individuals of another founder population than the Quebec population or from the general population.

### Step 2: DNA Extraction and Quantitation

[0084] Any sample comprising cells or nucleic acids from patients or controls may be used. Preferred samples are those easily obtained from the patient or control. Such samples include, but are not limited to blood, peripheral lymphocytes, buccal swabs, epithelial cell swabs, nails, hair, bronchoalveolar lavage fluid, sputum, or other body fluid or tissue obtained from an individual.

[0085] In one embodiment, DNA is extracted from such samples in the quantity and quality necessary to perform the invention using conventional DNA extraction and quantitation techniques. The present invention is not linked to any DNA extraction or quantitation platform in particular.

### Step 3: Genotype the Recruited Individuals

[0086] In one embodiment, assay-specific and/or locus-specific and/or allele-specific oligonucleotides for every SNP marker of the present invention (Tables 5-36) are organized onto one or more arrays. The genotype at each SNP locus is revealed by hybridizing short PCR fragments comprising each SNP locus onto these arrays. The arrays permit a high-throughput genome wide association study using DNA samples from individuals of the Quebec founder population. Such assay-specific and/or locus-specific and/or allele-specific oligonucleotides necessary for scoring each SNP of the present invention are preferably organized onto a solid support. Such supports can be arrayed on wafers, glass slides, beads or any other type of solid support.

[0087] In another embodiment, the assay-specific and/or locus-specific and/or allele-specific oligonucleotides are not organized onto a solid support but are still used as a whole, in panels or one by one. The present invention is therefore not linked to any genotyping platform in particular.

[0088] In another embodiment, one or more portions of the SNP maps (publicly available maps, proprietary maps from Perlegen Sciences, Inc. (Mountain View, Calif., USA), and our own proprietary QLDM map) are used to screen the whole genome, a subset of chromosomes, a chromosome, a subset of genomic regions or a single genomic region.

[0089] The 1,500 individuals composing the 500 trios are preferably individually genotyped with at least 80,000 markers, generating at least a few million genotypes; more preferably, at least a hundred million.

Step 4: Exclude the Markers that Did not Pass the Quality Control of the Assay.

[0090] Preferably, the quality controls consist of, but are not limited to, the following criteria: eliminate SNPs that had a high rate of Mendelian errors (cut-off at 1% Mendelian error rate), that deviate from the Hardy-Weinberg equilibrium, that are non-polymorphic in the Quebec founder population or have too many missing data (cut-off at 1% missing values or higher), or simply because they are non-polymorphic in the Quebec founder population (cut-off at 1%<10% minor allele frequency (MAF)).

### Step 5: Perform the Genetic Analysis on the Results Obtained Using Haplotype Information as Well as Single-Marker Association.

[0091] In the preferred embodiment, genetic analysis is performed on all the genotypes from step 3.

[0092] In another embodiment, genetic analysis is performed on a total of 248,535 SNPs.

[0093] In one embodiment, the genetic analysis consists of, but is not limited to features corresponding to Phase information and haplotype structures. Phase information and haplotype structures are preferably deduced from trio genotypes using Phasefinder. Since chromosomal assignment (phase) cannot be estimated when all trio members are heterozygous, an Expectation-Maximization (EM) algorithm may be used to resolve chromosomal assignment ambiguities after Phasefinder.

[0094] In yet another embodiment, the PL-EM algorithm (Partition-Ligation E M; Niu et al., Am. J. Hum. Genet. 70:157 (2002)) can be used to estimate haplotypes from the “genotype” data as a measured estimate of the reference allele frequency of a SNP in 15-marker windows that advance in increments of one marker across the data set. The results from such algorithms are converted into 15-marker haplotype files. Subsequently, the individual 15-marker block files are assembled into one continuous block of haplotypes for the entire chromosome. These extended haplotypes can then be used for further analysis. Such haplotype assembly algorithms take the consensus estimate of the allele call at each marker over all separate estimations (most markers are estimated 15 different times as the 15 marker blocks pass over their position).

[0095] In the preferred embodiment, the haplotypes for both the controls and the patients are derived in this manner. The preferred control of a trio structure is the spouse if the patient is one of the parents or the non-transmitted chromosomes (chromosomes found in parents but not in affected child) if the patient is the child.

[0096] In another embodiment, the haplotype frequencies among patients are compared to those among the controls using LDSTATS, a program that assesses the association of haplotypes with the disease. Such program defines haplotypes using multi-marker windows that advance across the marker map in one-marker increments. Such windows can be 1, 3, 5, 7 or 9 markers wide, and all these window sizes are tested concurrently. Larger multi-marker haplotype windows can also be used. At each position the frequency of haplotypes in cases is compared to the frequency of haplotypes in controls. Such allele frequency differences for single marker windows can be tested using Pearson's Chi-square with any degree of freedom. Multi-allelic haplotype association can be tested using Smith's normalization of the square root of Pearson's Chi-square. Such significance of association can be reported in two ways:

[0097] The significance of association within any one haplotype window is plotted against the marker that is central to that window.

[0098] P-values of association for each specific marker are calculated as a pooled P-value across all haplotype windows in which they occur. The pooled P-value is calculated using an expected value and variance calculated using a permutation test that considers covariance between individual windows. Such pooled P-values can yield narrower regions of gene location than the window data (see Example 3 for details on analysis methods, such as LDSTATS v2.0 and v4.0).

[0099] In another embodiment, conditional haplotype analyses can be performed on subsets of the original set of cases and controls using the program LDSTATS. The selection of a subset of cases and their matched controls can be based on the carrier status of cases at a gene or locus of interest. Various conditional haplotypes can be derived, such as protective haplotypes and risk haplotypes.

### Step 6: Fine Mapping

[0100] In this step, the candidate regions that were identified by step 4 are further mapped for the purpose of refinement and validation.

[0101] In the preferred embodiment, this fine mapping is performed with a density of genetic markers higher than in the genome wide scan (step 3) using any genotyping platform available in the art. Such fine mapping can be, but is not limited to, typing the allele via an allele-specific elongation assay that is then ligated to a locus-specific oligonucleotide. Such assays can be performed directly on the genomic DNA at a highly multiplex level and the products can be amplified using universal oligonucleotides. For each candidate region, the density of genetic markers can be, but is not limited to, a set of SNP markers with an average inter-marker distance of 1-4 Kb distributed over about 400 Kb to 1 Mb, roughly centered at the highest point of the GWS association. The preferred samples are those obtained from Crohn's disease PPC trios including the ones used for the GWS. Other preferred samples are trios or case control samples from another population, such as a General population.

[0102] In the preferred embodiment, the genetic analysis of the results obtained using haplotype information as well as single-marker association (as performed as in step 5, described herein) is performed as described herein (step 5 and Example section). The candidate regions that are validated and confirmed after this analysis proceed to a gene mining step described in Example 5, herein, to characterize their marker and genetic content.

### Step 7: SNP and DNA Polymorphism Discovery

[0103] In the preferred embodiment, all the candidate genes and regions identified in step 6 are sequenced for polymorphism identification.

[0104] In another embodiment, the entire region, including all introns, is sequenced to identify all polymorphisms.

[0105] In yet another embodiment, the candidate genes are prioritized for sequencing, and only functional gene elements (promoters, conserved noncoding sequences, exons and splice sites) are sequenced.

[0106] In yet another embodiment, previously identified polymorphisms in the candidate regions can also be used. For example, SNPs from dbSNP, Perlegen Sciences, Inc., or others can also be used rather than resequencing the candidate regions to identify polymorphisms.

[0107] The discovery of SNPs and DNA polymorphisms generally comprises a step consisting of determining the major haplotypes in the region to be sequenced. The preferred samples are selected according to which haplotypes contribute to the association signal observed in the region to be sequenced. The purpose is to select a set of samples that covers all the major haplotypes in the given region. Each major haplotype is preferably analyzed in at least a few individuals.

[0108] Any analytical procedure may be used to detect the presence or absence of variant nucleotides at one or more polymorphic positions of the invention. In general, the detection of allelic variation requires a mutation discrimination technique, optionally an amplification reaction and optionally a signal generation system. Any means of mutation detection or discrimination may be used. For instance, DNA sequencing, scanning methods, hybridization, extension based methods, incorporation based methods, restriction enzyme-based methods and ligation-based methods may be used in the methods of the invention.

[0109] Sequencing methods include, but are not limited to, direct sequencing, and sequencing by hybridization. Scanning methods include, but are not limited to, protein truncation test (PTT), single-strand conformation polymorphism analysis (SSCP), denaturing gradient gel electrophoresis (DGGE), temperature gradient gel electrophoresis (TGGE), cleavage, heteroduplex analysis, chemical mismatch cleavage (CMC), and enzymatic mismatch cleavage. Hybridization-based methods of detection include, but are not limited to, solid phase hybridization such as dot blots, multiple allele specific diagnostic assay (MASDA), reverse dot blots, and oligonucleotide arrays (DNA Chips). Solution phase hybridization amplification methods may also be used, such as Taqman. Extension based methods include, but are not limited to, amplification refraction mutation systems (ARMS), amplification refractory mutation systems (ALEX), and competitive oligonucleotide priming systems (COPS). Incorporation based methods include, but are not limited to, mini-sequencing and arrayed primer extension (APEX). Restriction enzyme-based detection systems include, but are not limited to, restriction site generating PCR. Lastly, ligation based detection methods include, but are not limited to, oligonucleotide ligation assays (OLA). Signal generation or detection systems that may be used in the methods of the invention include, but are not limited to, fluorescence methods such as fluorescence resonance energy transfer (FRET), fluorescence quenching, fluorescence polarization as well as other chemiluminescence, electrochemiluminescence, Raman, radioactivity, colometric methods, hybridization protection assays and mass spectrometry methods. Further amplification methods include, but are not limited to self sustained replication (SSR), nucleic acid sequence based amplification (NASBA), ligase chain reaction (LCR), strand displacement amplification (SDA) and branched DNA (B-DNA).

### Step 8: Ultrafine Mapping

[0110] This step further maps the candidate regions and genes confirmed in the previous step to identify and validate the responsible polymorphisms associated with Crohn's disease in the human population.

[0111] In a preferred embodiment, the discovered SNPs and polymorphisms of step 7 are ultrafine mapped at a higher density of markers than the fine mapping described herein using the same technology described in step 6.

### Step 9: GeneMap Construction

[0112] The confirmed variations in DNA (including both genic and non-genic regions) are used to build a GeneMap for IBD (ex: Crohn's disease). The gene content of this GeneMap is described in more detail below. Such GeneMap can be used for other methods of the invention comprising the diagnostic methods described herein, the susceptibility to Crohn's disease, the response to a particular drug, the efficacy of a particular drug, the screening methods described herein and the treatment methods described herein.

[0113] As is evident to one of ordinary skill in the art, all of the above steps or the steps do not need to be performed, or performed in a given order to practice or use the SNPs, genomic regions, genes, proteins, etc. in the methods of the invention.

Genes from the GeneMap

[0114] In one embodiment the GeneMap consists of genes and targets, in a variety of combinations, identified from the candidate regions listed in Table 1. In another embodiment, all genes from Tables 2-4 are present in the GeneMap. In another preferred embodiment, the GeneMap consists of a selection of genes from Tables 2-4. The genes of the invention (Tables 2-4) are arranged by candidate regions and by their chromosomal location. Such order is for the purpose of clarity and does not reflect any other criteria of selection in the association of the genes with IBD (ex: Crohn's disease).

[0115] In the preferred embodiment, genes identified in the WGAS and subsequent fine mapping studies for IBD (ex: Crohn's disease) are evaluated using the Ingenuity Pathway Analysis application (IPA, Ingenuity systems) in order to identify direct biological interactions between these genes, and also to identify molecular regulators acting on those genes (indirect interactions) that could be also involved in IBD (ex: Crohn's disease). The purpose of this effort is to decipher the molecules involved in contributing to IBD (ex: Crohn's disease). These gene interaction networks are very valuable tools in the sense that they facilitate extension of the map of gene products that could represent potential drug targets for IBD (ex: Crohn's disease).

### Nucleic Acid Sequences

[0116] The nucleic acid sequences of the present invention may be derived from a variety of sources including DNA, cDNA, synthetic DNA, synthetic RNA, derivatives, mimetics or combinations thereof. Such sequences may comprise genomic DNA, which may or may not include naturally occurring introns, genic regions, nongenic regions, and regulatory regions. Moreover, such genomic DNA may be obtained in association with promoter regions or poly (A) sequences. The sequences, genomic DNA, or cDNA may be obtained in any of several ways. Genomic DNA can be extracted and purified from suitable cells by means well known in the art. Alternatively, mRNA can be isolated from a cell and used to produce cDNA by reverse transcription or other means. The nucleic acids described herein are used in certain embodiments of the methods of the present invention for production of RNA, proteins or polypeptides, through incorporation into cells, tissues, or organisms. In one embodiment, DNA containing all or part of the coding sequence for the genes described in Tables 2-4, or the SNP markers described in Tables 5-36, is incorporated into a vector for expression of the encoded polypeptide in suitable host cells. The invention also comprises the use of the nucleotide sequence of the nucleic acids of this invention to identify DNA probes for the genes described in Tables 2-4 or the SNP markers described in Tables 5-36, PCR primers to amplify the genes described in Tables 2-4 or the SNP markers described in Tables 5-36, nucleotide polymorphisms in the genes described in Tables 2-4, and regulatory elements of the genes described in Tables 2-4. The nucleic acids of the present invention find use as primers and templates for the recombinant production of IBD-associated peptides or polypeptides, for chromosome and gene mapping, to provide antisense sequences, for tissue distribution studies, to locate and obtain full length genes, to identify and obtain homologous sequences (wild-type and mutants), and in diagnostic applications.

### Antisense Oligonucleotides

[0117] In a particular embodiment of the invention, an antisense nucleic acid or oligonucleotide is wholly or partially complementary to, and can hybridize with, a target nucleic acid (either DNA or RNA) having the sequence of SEQ ID NO:1, NO:3 or any SEQ ID from any Tables of the invention. For example, an antisense nucleic acid or oligonucleotide comprising 16 nucleotides can be sufficient to inhibit expression of at least one gene from Tables 2-4. Alternatively, an antisense nucleic acid or oligonucleotide can be complementary to 5′ or 3′ untranslated regions, or can overlap the translation initiation codon (5′ untranslated and translated regions) of at least one gene from Tables 2-4, or its functional equivalent. In another embodiment, the antisense nucleic acid is wholly or partially complementary to, and can hybridize with, a target nucleic acid that encodes a polypeptide from a gene described in Tables 2-4.

[0118] In addition, oligonucleotides can be constructed which will bind to duplex nucleic acid (i.e., DNA:DNA or DNA:RNA), to form a stable triple helix containing or triplex nucleic acid. Such triplex oligonucleotides can inhibit transcription and/or expression of a gene from Tables 2-4, or its functional equivalent (M. D. Frank-Kamenetskii et al., 1995). Triplex oligonucleotides are constructed using the basepairing rules of triple helix formation and the nucleotide sequence of the genes described in Tables 2-4.

[0119] The present invention encompasses methods of using oligonucleotides in antisense inhibition of the function of the genes from Tables 2-4. In the context of this invention, the term “oligonucleotide” refers to naturally-occurring species or synthetic species formed from naturally-occurring subunits or their close homologs. The term may also refer to moieties that function similarly to oligonucleotides, but have non-naturally-occurring portions. Thus, oligonucleotides may have altered sugar moieties or inter-sugar linkages.

[0120] Exemplary among these are phosphorothioate and other sulfur containing species, which are known in the art. In preferred embodiments, at least one of the phosphodiester bonds of the oligonucleotide has been substituted with a structure that functions to enhance the ability of the compositions to penetrate into the region of cells where the RNA whose activity is to be modulated is located. It is preferred that such substitutions comprise phosphorothioate bonds, methyl phosphonate bonds, or short chain alkyl or cycloalkyl structures. In accordance with other preferred embodiments, the phosphodiester bonds are substituted with structures which are, at once, substantially non-ionic and non-chiral, or with structures which are chiral and enantiomerically specific. Persons of ordinary skill in the art will be able to select other linkages for use in the practice of the invention. Oligonucleotides may also include species that include at least some modified base forms. Thus, purines and pyrimidines other than those normally found in nature may be so employed. Similarly, modifications on the furanosyl portions of the nucleotide subunits may also be effected, as long as the essential tenets of this invention are adhered to. Examples of such modifications are 2′-O-alkyl- and 2′-halogen-substituted nucleotides. Some non-limiting examples of modifications at the 2′ position of sugar moieties which are useful in the present invention include OH, SH, SCH3, F, OCH3, OCN, O(CH2), NH2 and O(CH2)n CH3, where n is from 1 to about 10. Such oligonucleotides are functionally interchangeable with natural oligonucleotides or synthesized oligonucleotides, which have one or more differences from the natural structure. All such analogs are comprehended by this invention so long as they function effectively to hybridize with at least one gene from Tables 2-4 DNA or RNA to inhibit the function thereof.

[0121] The oligonucleotides in accordance with this invention preferably comprise from about 3 to about 50 subunits. It is more preferred that such oligonucleotides and analogs comprise from about 8 to about 25 subunits and still more preferred to have from about 12 to about 20 subunits. As defined herein, a “subunit” is a base and sugar combination suitably bound to adjacent subunits through phosphodiester or other bonds. Antisense nucleic acids or oligonucleotides can be produced by standard techniques (see, e.g., Shewmaker et al., U.S. Pat. No. 6,107,065). The oligonucleotides used in accordance with this invention may be conveniently and routinely made through the well-known technique of solid phase synthesis. Any other means for such synthesis may also be employed; however, the actual synthesis of the oligonucleotides is well within the abilities of the practitioner. It is also well known to prepare other oligonucleotides such as phosphorothioates and alkylated derivatives.

[0122] The oligonucleotides of this invention are designed to be hybridizable with RNA (e.g., mRNA) or DNA from genes described in Tables 2-4. For example, an oligonucleotide (e.g., DNA oligonucleotide) that hybridizes to mRNA from a gene described in Tables 2-4 can be used to target the mRNA for RnaseH digestion. Alternatively an oligonucleotide that can hybridize to the translation initiation site of the mRNA of a gene described in Tables 2-4 can be used to prevent translation of the mRNA. In another approach, oligonucleotides that bind to the double-stranded DNA of a gene from Tables 2-4 can be administered. Such oligonucleotides can form a triplex construct and inhibit the transcription of the DNA encoding polypeptides of the genes described in Tables 2-4. Triple helix pairing prevents the double helix from opening sufficiently to allow the binding of polymerases, transcription factors, or regulatory molecules. Recent therapeutic advances using triplex DNA have been described (see, e.g., J. E. Gee et al., 1994, Molecular and Immunologic Approaches, Futura Publishing Co., Mt. Kisco, N.Y.).

[0123] As non-limiting examples, antisense oligonucleotides may be targeted to hybridize to the following regions: mRNA cap region; translation initiation site; translational termination site; transcription initiation site; transcription termination site; polyadenylation signal; 3′ untranslated region; 5′ untranslated region; 5′ coding region; mid coding region; and 3′ coding region. Preferably, the complementary oligonucleotide is designed to hybridize to the most unique 5′ sequence of a gene described in Tables 2-4, including any of about 15-35 nucleotides spanning the 5′ coding sequence. In accordance with the present invention, the antisense oligonucleotide can be synthesized, formulated as a pharmaceutical composition, and administered to a subject. The synthesis and utilization of antisense and triplex oligonucleotides have been previously described (e.g., Simon et al., 1999; Barre et al., 2000; Elez et al., 2000; Sauter et al., 2000).

[0124] Alternatively, expression vectors derived from retroviruses, adenovirus, herpes or vaccinia viruses or from various bacterial plasmids may be used for delivery of nucleotide sequences to the targeted organ, tissue or cell population. Methods which are well known to those skilled in the art can be used to construct recombinant vectors which will express nucleic acid sequence that is complementary to the nucleic acid sequence encoding a polypeptide from the genes described in Tables 2-4. These techniques are described both in Sambrook et al., 1989 and in Ausubel et al., 1992. For example, expression of at least one gene from Tables 2-4 can be inhibited by transforming a cell or tissue with an expression vector that expresses high levels of untranslatable sense or antisense sequences. Even in the absence of integration into the DNA, such vectors may continue to transcribe RNA molecules until they are disabled by endogenous nucleases. Transient expression may last for a month or more with a nonreplicating vector, and even longer if appropriate replication elements are included in the vector system. Various assays may be used to test the ability of gene-specific antisense oligonucleotides to inhibit the expression of at least one gene from Tables 2-4. For example, mRNA levels of the genes described in Tables 2-4 can be assessed by Northern blot analysis (Sambrook et al., 1989; Ausubel et al., 1992; J. C. Alwine et al. 1977; I. M. Bird, 1998), quantitative or semi-quantitative RT-PCR analysis (see, e.g., W. M. Freeman et al., 1999; Ren et al., 1998; J. M. Cale et al., 1998), or in situ hybridization (reviewed by A. K. Raap, 1998). Alternatively, antisense oligonucleotides may be assessed by measuring levels of the polypeptide from the genes described in Tables 2-4, e.g., by western blot analysis, indirect immunofluorescence and immunoprecipitation techniques (see, e.g., J. M. Walker, 1998, Protein Protocols on CD-ROM, Humana Press, Totowa, N.J.). Any other means for such detection may also be employed, and is well within the abilities of the practitioner.

### Mapping Technologies

[0125] The present invention includes various methods, which employ mapping technologies to map SNPs and polymorphisms. For purpose of clarity, this section comprises, but is not limited to, the description of mapping technologies that can be utilized to achieve the embodiments described herein. Mapping technologies may be based on amplification methods, restriction enzyme cleavage methods, hybridization methods, sequencing methods, and cleavage methods using agents.

[0126] Amplification methods include: self sustained sequence replication (Guatelli et al., 1990), transcriptional amplification system (Kwoh et al., 1989), Q-Beta Replicase (Lizardi et al., 1988), isothermal amplification (e.g. Dean et al., 2002; and Hafner et al., 2001), or any other nucleic acid amplification method, followed by the detection of the amplified molecules using techniques well known to those of ordinary skill in the art. These detection schemes are especially useful for the detection of nucleic acid molecules if such molecules are present in very low number.

[0127] Restriction enzyme cleavage methods include: isolating sample and control DNA, amplification (optional), digestion with one or more restriction endonucleases, determination of fragment length sizes by gel electrophoresis and comparing samples and controls. Differences in fragment length sizes between sample and control DNA indicates mutations in the sample DNA. Moreover, sequence specific ribozymes (see, e.g., U.S. Pat. No. 5,498,531) or DNAzyme (e.g. U.S. Pat. No. 5,807,718) can be used to score for the presence of specific mutations by development or loss of a ribozyme or DNAzyme cleavage site.

[0128] Hybridization methods include any measurement of the hybridization or gene expression levels, of sample nucleic acids to probes corresponding to about 2, 3, 4, 5, 6, 7, 8, 9, 10, 15, 20, 25, 30, 50, 75, 100, 200, 500, 1000 or more genes, or ranges of these numbers, such as about 2-10, about 10-20, about 20-50, about 50-100, about 100-200, about 200-500 or about 500-1000 genes of Tables 2-4.

[0129] SNPs and SNP maps of the invention can be identified or generated by hybridizing sample nucleic acids, e.g., DNA or RNA, to high density arrays or bead arrays containing oligonucleotide probes corresponding to the polymorphisms of Tables 5-36 (see the Affymetrix arrays and Illumina bead sets at www.affymetrix.com and www.illumina.com and see Cronin et al., 1996; or Kozal et al., 1996).

[0130] Methods of forming high density arrays of oligonucleotides with a minimal number of synthetic steps are known. The oligonucleotide analogue array can be synthesized on a single or on multiple solid substrates by a variety of methods, including, but not limited to, light-directed chemical coupling, and mechanically directed coupling (see Pirrung, U.S. Pat. No. 5,143,854).

[0131] In brief, the light-directed combinatorial synthesis of oligonucleotide arrays on a glass surface proceeds using automated phosphoramidite chemistry and chip masking techniques. In one specific implementation, a glass surface is derivatized with a silane reagent containing a functional group, e.g., a hydroxyl or amine group blocked by a photolabile protecting group. Photolysis through a photolithographic mask is used selectively to expose functional groups which are then ready to react with incoming 5′ photoprotected nucleoside phosphoramidites. The phosphoramidites react only with those sites which are illuminated (and thus exposed by removal of the photolabile blocking group). Thus, the phosphoramidites only add to those areas selectively exposed from the preceding step. These steps are repeated until the desired array of sequences have been synthesized on the solid surface. Combinatorial synthesis of different oligonucleotide analogues at different locations on the array is determined by the pattern of illumination during synthesis and the order of addition of coupling reagents.

[0132] In addition to the foregoing, additional methods which can be used to generate an array of oligonucleotides on a single substrate are described in PCT Publication Nos. WO 93/09668 and WO 01/23614. High density nucleic acid arrays can also be fabricated by depositing pre-made or natural nucleic acids in predetermined positions. Synthesized or natural nucleic acids are deposited on specific locations of a substrate by light directed targeting and oligonucleotide directed targeting. Another embodiment uses a dispenser that moves from region to region to deposit nucleic acids in specific spots.

[0133] Nucleic acid hybridization simply involves contacting a probe and target nucleic acid under conditions where the probe and its complementary target can form stable hybrid duplexes through complementary base pairing. See WO 99/32660. The nucleic acids that do not form hybrid duplexes are then washed away leaving the hybridized nucleic acids to be detected, typically through detection of an attached detectable label. It is generally recognized that nucleic acids are denatured by increasing the temperature or decreasing the salt concentration of the buffer containing the nucleic acids. Under low stringency conditions (e.g., low temperature and/or high salt) hybrid duplexes (e.g., DNA:DNA, RNA:RNA, or RNA:DNA) will form even where the annealed sequences are not perfectly complementary. Thus, specificity of hybridization is reduced at lower stringency. Conversely, at higher stringency (e.g., higher temperature or lower salt) successful hybridization tolerates fewer mismatches. One of skill in the art will appreciate that hybridization conditions may be selected to provide any degree of stringency.

[0134] In a preferred embodiment, hybridization is performed at low stringency, in this case in 6×SSPET at 37° C. (0.005% Triton X-100), to ensure hybridization and then subsequent washes are performed at higher stringency (e.g., 1×SSPET at 37° C.) to eliminate mismatched hybrid duplexes. Successive washes may be performed at increasingly higher stringency (e.g., down to as low as 0.25×SSPET at 37° C. to 50° C.) until a desired level of hybridization specificity is obtained. Stringency can also be increased by addition of agents such as formamide. Hybridization specificity may be evaluated by comparison of hybridization to the test probes with hybridization to the various controls that can be present (e.g., expression level control, normalization control, mismatch controls, etc.).

[0135] In general, there is a tradeoff between hybridization specificity (stringency) and signal intensity. Thus, in a preferred embodiment, the wash is performed at the highest stringency that produces consistent results and that provides a signal intensity greater than approximately 10% of the background intensity. Thus, in a preferred embodiment, the hybridized array may be washed at successively higher stringency solutions and read between each wash. Analysis of the data sets thus produced will reveal a wash stringency above which the hybridization pattern is not appreciably altered and which provides adequate signal for the particular oligonucleotide probes of interest.

[0136] Probes based on the sequences of the genes described above may be prepared by any commonly available method. Oligonucleotide probes for screening or assaying a tissue or cell sample are preferably of sufficient length to specifically hybridize only to appropriate, complementary genes or transcripts. Typically the oligonucleotide probes will be at least about 10, 12, 14, 16, 18, 20 or 25 nucleotides in length. In some cases, longer probes of at least 30, 40, or 50 nucleotides will be desirable.

[0137] As used herein, oligonucleotide sequences that are complementary to one or more of the genes or gene fragments described in Tables 2-4 refer to oligonucleotides that are capable of hybridizing under stringent conditions to at least part of the nucleotide sequences of said genes. Such hybridizable oligonucleotides will typically exhibit at least about 75% sequence identity at the nucleotide level to said genes, preferably about 80% or 85% sequence identity or more preferably about 90% or 95% or more sequence identity to said genes (see GeneChip® Expression Analysis Manual, Affymetrix, Rev. 3, which is herein incorporated by reference in its entirety).

[0138] The phrase “hybridizing specifically to” or “specifically hybridizes” refers to the binding, duplexing, or hybridizing of a molecule substantially to or only to a particular nucleotide sequence or sequences under stringent conditions when that sequence is present in a complex mixture (e.g., total cellular) DNA or RNA.

[0139] As used herein a “probe” is defined as a nucleic acid, capable of binding to a target nucleic acid of complementary sequence through one or more types of chemical bonds, usually through complementary base pairing, usually through hydrogen bond formation. As used herein, a probe may include natural (i.e., A, G, U, C, or T) or modified bases (7-deazaguanosine, inosine, etc.). In addition, the bases in probes may be joined by a linkage other than a phosphodiester bond, so long as it does not interfere with hybridization. Thus, probes may be peptide nucleic acids in which the constituent bases are joined by peptide bonds rather than phosphodiester linkages.

[0140] A variety of sequencing reactions known in the art can be used to directly sequence nucleic acids for the presence or the absence of one or more polymorphisms of Tables 5-36. Examples of sequencing reactions include those based on techniques developed by Maxam and Gilbert (1977) or Sanger (1977). It is also contemplated that any of a variety of automated sequencing procedures can be utilized, including sequencing by mass spectrometry (see, e.g. PCT International Publication No. WO 94/16101; Cohen et al., 1996; and Griffin et al., 1993), real-time pyrophosphate sequencing method (Ronaghi et al., 1998; and Permutt et al., 2001) and sequencing by hybridization (see e.g. Drmanac et al., 2002).

[0141] Other methods of detecting polymorphisms include methods in which protection from cleavage agents is used to detect mismatched bases in RNA/RNA, DNA/DNA or RNA/DNA heteroduplexes (Myers et al., 1985). In general, the technique of “mismatch cleavage” starts by providing heteroduplexes formed by hybridizing (labeled) RNA or DNA containing a wild-type sequence with potentially mutant RNA or DNA obtained from a sample. The double-stranded duplexes are treated with an agent who cleaves single-stranded regions of the duplex such as which will exist due to basepair mismatches between the control and sample strands. For instance, RNA/DNA duplexes can be treated with RNase and DNA/DNA hybrids treated with S1 nuclease to enzymatically digest the mismatched regions. In other embodiments, either DNA/DNA or RNA/DNA duplexes can be treated with hydroxylamine or osmium tetroxide and with piperidine in order to digest mismatched regions. After digestion of the mismatched regions, the resulting material is then separated by size on denaturing polyacrylamide gels to determine the site of a mutation or SNP (see, for example, Cotton et al., 1988; and Saleeba et al., 1992). In a preferred embodiment, the control DNA or RNA can be labeled for detection.

[0142] In still another embodiment, the mismatch cleavage reaction employs one or more proteins that recognize mismatched base pairs in double-stranded DNA (so called “DNA mismatch repair” enzymes) in defined systems for detecting and mapping polymorphisms. For example, the mutY enzyme of E. coli cleaves A at G/A mismatches (Hsu et al., 1994). Other examples include, but are not limited to, the MutHLS enzyme complex of E. coli (Smith and Modrich Proc. 1996) and Cel 1 from the celery (Kulinski et al., 2000) both cleave the DNA at various mismatches. According to an exemplary embodiment, a probe based on a polymorphic site corresponding to a polymorphism of Tables 5-6 is hybridized to a cDNA or other DNA product from a test cell or cells. The duplex is treated with a DNA mismatch repair enzyme, and the cleavage products, if any, can be detected from electrophoresis protocols or the like. See, for example, U.S. Pat. No. 5,459,039. Alternatively, the screen can be performed in vivo following the insertion of the heteroduplexes in an appropriate vector. The whole procedure is known to those ordinary skilled in the art and is referred to as mismatch repair detection (see e.g. Fakhrai-Rad et al., 2004).

[0143] In other embodiments, alterations in electrophoretic mobility can be used to identify polymorphisms in a sample. For example, single strand conformation polymorphism (SSCP) analysis can be used to detect differences in electrophoretic mobility between mutant and wild type nucleic acids (Orita et al., 1989; Cotton et al., 1993; and Hayashi 1992). Single-stranded DNA fragments of case and control nucleic acids will be denatured and allowed to renature. The secondary structure of single-stranded nucleic acids varies according to sequence. The resulting alteration in electrophoretic mobility enables the detection of even a single base change. The DNA fragments may be labeled or detected with labeled probes. The sensitivity of the assay may be enhanced by using RNA (rather than DNA), in which the secondary structure is more sensitive to a change in sequence. In a preferred embodiment, the method utilizes heteroduplex analysis to separate double stranded heteroduplex molecules on the basis of changes in electrophoretic mobility (Kee et al., 1991).

[0144] In yet another embodiment, the movement of mutant or wild-type fragments in a polyacrylamide gel containing a gradient of denaturant is assayed using denaturing gradient gel electrophoresis (DGGE) (Myers et al., 1985). When DGGE is used as the method of analysis, DNA will be modified to insure that it does not completely denature, for example by adding a GC clamp of approximately 40 bp of high-melting GC-rich DNA by PCR. In a further embodiment, a temperature gradient is used in place of a denaturing gradient to identify differences in the mobility of control and sample DNA (Rosenbaum et al., 1987). In another embodiment, the mutant fragment is detected using denaturing HPLC (see e.g. Hoogendoorn et al., 2000).

[0145] Examples of other techniques for detecting polymorphisms include, but are not limited to, selective oligonucleotide hybridization, selective amplification, selective primer extension, selective ligation, single-base extension, selective termination of extension or invasive cleavage assay. For example, oligonucleotide primers may be prepared in which the polymorphism is placed centrally and then hybridized to target DNA under conditions which permit hybridization only if a perfect match is found (Saiki et al., 1986; Saiki et al., 1989). Such oligonucleotides are hybridized to PCR amplified target DNA or a number of different mutations when the oligonucleotides are attached to the hybridizing membrane and hybridized with labeled target DNA. Alternatively, the amplification, the allele-specific hybridization and the detection can be done in a single assay following the principle of the 5′ nuclease assay (e.g. see Livak et al., 1995). For example, the associated allele, a particular allele of a polymorphic locus, or the like is amplified by PCR in the presence of both allele-specific oligonucleotides, each specific for one or the other allele. Each probe has a different fluorescent dye at the 5′ end and a quencher at the 3′ end. During PCR, if one or the other or both allele-specific oligonucleotides are hybridized to the template, the Taq polymerase via its 5′ exonuclease activity will release the corresponding dyes. The latter will thus reveal the genotype of the amplified product.

[0146] Hybridization assays may also be carried out with a temperature gradient following the principle of dynamic allele-specific hybridization or like e.g. Jobs et al., (2003); and Bourgeois and Labuda, (2004). For example, the hybridization is done using one of the two allele-specific oligonucleotides labeled with a fluorescent dye, and an intercalating quencher under a gradually increasing temperature. At low temperature, the probe is hybridized to both the mismatched and full-matched template. The probe melts at a lower temperature when hybridized to the template with a mismatch. The release of the probe is captured by an emission of the fluorescent dye, away from the quencher. The probe melts at a higher temperature when hybridized to the template with no mismatch. The temperature-dependent fluorescence signals therefore indicate the absence or presence of an associated allele, a particular allele of a polymorphic locus, or the like (e.g. Jobs et al., 2003). Alternatively, the hybridization is done under a gradually decreasing temperature. In this case, both allele-specific oligonucleotides are hybridized to the template competitively. At high temperature none of the two probes are hybridized. Once the optimal temperature of the full-matched probe is reached, it hybridizes and leaves no target for the mismatched probe (e.g. Bourgeois and Labuda, 2004). In the latter case, if the allele-specific probes are differently labeled, then they are hybridized to a single PCR-amplified target. If the probes are labeled with the same dye, then the probe cocktail is hybridized twice to identical templates with only one labeled probe, different in the two cocktails, in the presence of the unlabeled competitive probe.

[0147] Alternatively, allele specific amplification technology that depends on selective PCR amplification may be used in conjunction with the present invention. Oligonucleotides used as primers for specific amplification may carry the associated allele, a particular allele of a polymorphic locus, or the like, also referred to as “mutation” of interest in the center of the molecule, so that amplification depends on differential hybridization (Gibbs et al., 1989) or at the extreme 3′ end of one primer where, under appropriate conditions, mismatch can prevent, or reduce polymerase extension (Prossner, 1993). In addition it may be desirable to introduce a novel restriction site in the region of the mutation to create cleavage-based detection (Gasparini et al., 1992). It is anticipated that in certain embodiments, amplification may also be performed using Taq ligase for amplification (Barany, 1991). In such cases, ligation will occur only if there is a perfect match at the 3′ end of the 5′ sequence making it possible to detect the presence of a known associated allele, a particular allele of a polymorphic locus, or the like at a specific site by looking for the presence or absence of amplification. The products of such an oligonucleotide ligation assay can also be detected by means of gel electrophoresis. Furthermore, the oligonucleotides may contain universal tags used in PCR amplification and zip code tags that are different for each allele. The zip code tags are used to isolate a specific, labeled oligonucleotide that may contain a mobility modifier (e.g. Grossman et al., 1994).

[0148] In yet another alternative, allele-specific elongation followed by ligation will form a template for PCR amplification. In such cases, elongation will occur only if there is a perfect match at the 3′ end of the allele-specific oligonucleotide using a DNA polymerase. This reaction is performed directly on the genomic DNA and the extension/ligation products are amplified by PCR. To this end, the oligonucleotides contain universal tags allowing amplification at a high multiplex level and a zip code for SNP identification. The PCR tags are designed in such a way that the two alleles of a SNP are amplified by different forward primers, each having a different dye. The zip code tags are the same for both alleles of a given SNPs and they are used for hybridization of the PCR-amplified products to oligonucleotides bound to a solid support, chip, bead array or like. For an example of the procedure, see Fan et al. (Cold Spring Harbor Symposia on Quantitative Biology, Vol. LXVIII, pp. 69-78 2003).

[0149] Another alternative includes the single-base extension/ligation assay using a molecular inversion probe, consisting of a single, long oligonucleotide (see e.g. Hardenbol et al., 2003). In such an embodiment, the oligonucleotide hybridizes on both side of the SNP locus directly on the genomic DNA, leaving a one-base gap at the SNP locus. The gap-filling, one-base extension/ligation is performed in four tubes, each having a different dNTP. Following this reaction, the oligonucleotide is circularized whereas unreactive, linear oligonucleotides are degraded using an exonuclease such as exonuclease I of E. coli. The circular oligonucleotides are then linearized and the products are amplified and labeled using universal tags on the oligonucleotides. The original oligonucleotide also contains a SNP-specific zip code allowing hybridization to oligonucleotides bound to a solid support, chip, and bead array or like. This reaction can be performed at a high multiplexed level.

[0150] In another alternative, the associated allele, a particular allele of a polymorphic locus, or the like is scored by single-base extension (see e.g. U.S. Pat. No. 5,888,819). The template is first amplified by PCR. The extension oligonucleotide is then hybridized next to the SNP locus and the extension reaction is performed using a thermostable polymerase such as ThermoSequenase (GE Healthcare) in the presence of labeled ddNTPs. This reaction can therefore be cycled several times. The identity of the labeled ddNTP incorporated will reveal the genotype at the SNP locus. The labeled products can be detected by means of gel electrophoresis, fluorescence polarization (e.g. Chen et al., 1999) or by hybridization to oligonucleotides bound to a solid support, chip, and bead array or like. In the latter case, the extension oligonucleotide will contain a SNP-specific zip code tag.

[0151] In yet another alternative, a SNP is scored by selective termination of extension. The template is first amplified by PCR and the extension oligonucleotide hybridizes in the vicinity of the SNP locus, close to but not necessarily adjacent to it. The extension reaction is carried out using a thermostable polymerase such as ThermoSequenase (GE Healthcare) in the presence of a mix of dNTPs and at least one ddNTP. The latter has to terminate the extension at one of the allele of the interrogated SNP, but not both such that the two alleles will generate extension products of different sizes. The extension product can then be detected by means of gel electrophoresis, in which case the extension products need to be labeled, or by mass spectrometry (see e.g. Storm et al., 2003).

[0152] In another alternative, SNPs are detected using an invasive cleavage assay (see U.S. Pat. No. 6,090,543). There are five oligonucleotides per SNP to interrogate but these are used in a two step-reaction. During the primary reaction, three of the designed oligonucleotides are first hybridized directly to the genomic DNA. One of them is locus-specific and hybridizes up to the SNP locus (the pairing of the 3′ base at the SNP locus is not necessary). There are two allele-specific oligonucleotides that hybridize in tandem to the locus-specific probe but also contain a 5′ flap that is specific for each allele of the SNP. Depending upon hybridization of the allele-specific oligonucleotides at the base of the SNP locus, this creates a structure that is recognized by a cleavase enzyme (U.S. Pat. No. 6,090,606) and the allele-specific flap is released. During the secondary reaction, the flap fragments hybridize to a specific cassette to recreate the same structure as above except that the cleavage will release a small DNA fragment labeled with a fluorescent dye that can be detected using regular fluorescence detector. In the cassette, the emission of the dye is inhibited by a quencher.

Methods to Identify Agents that Modulate the Expression of a Nucleic Acid Encoding a Gene Involved in IBD (Ex: Crohn's Disease).

[0153] The present invention provides methods for identifying agents that modulate the expression of a nucleic acid encoding a gene from Tables 2-4. Such methods may utilize any available means of monitoring for changes in the expression level of the nucleic acids of the invention. As used herein, an agent is said to modulate the expression of a nucleic acid of the invention if it is capable of up- or down-regulating expression of the nucleic acid in a cell. Such cells can be obtained from any parts of the body such as the GI track, colon, esophagus, stomach, rectum, jujenum, ileum, mucosa, submucosa, cecum, rectum, scalp, blood, dermis, epidermis, skin cells, cutaneous surfaces, intertrigious areas, genitalia, vessels and endothelium. Some non-limiting examples of cells that can be used are: muscle cells, nervous cells, blood and vessels cells, dermis, epidermis and other skin cells, T cell, mast cell, CD4+ lymphocyte, monocyte, macrophage, synovial cell, glial cell, villous intestinal cell, neutrophilic granulocyte, eosinophilic granulocyte, keratinocyte, lamina propria lymphocyte, intraepithelial lymphocyte, epithelial cells and lymphocytes.

[0154] In one assay format, the expression of a nucleic acid encoding a gene of the invention (see Tables 2-4) in a cell or tissue sample is monitored directly by hybridization to the nucleic acids of the invention. Cell lines or tissues are exposed to the agent to be tested under appropriate conditions and time and total RNA or mRNA is isolated by standard procedures such as those disclosed in Sambrook et al., (1989) Molecular Cloning: A Laboratory Manual, Cold Spring Harbor Laboratory Press).

[0155] Probes to detect differences in RNA expression levels between cells exposed to the agent and control cells may be prepared as described above. Hybridization conditions are modified using known methods, such as those described by Sambrook et al., and Ausubel et al., as required for each probe. Hybridization of total cellular RNA or RNA enriched for polyA RNA can be accomplished in any available format. For instance, total cellular RNA or RNA enriched for polyA RNA can be affixed to a solid support and the solid support exposed to at least one probe comprising at least one, or part of one of the sequences of the invention under conditions in which the probe will specifically hybridize. Alternatively, nucleic acid fragments comprising at least one, or part of one of the sequences of the invention can be affixed to a solid support, such as a silicon chip or a porous glass wafer. The chip or wafer can then be exposed to total cellular RNA or polyA RNA from a sample under conditions in which the affixed sequences will specifically hybridize to the RNA. By examining for the ability of a given probe to specifically hybridize to an RNA sample from an untreated cell population and from a cell population exposed to the agent, agents which up or down regulate expression are identified.

Methods to Identify Agents that Modulate the Activity of a Protein Encoded by a Gene Involved in IBD (Ex: Crohn's Disease).

[0156] The present invention provides methods for identifying agents that modulate at least one activity of the proteins described in Tables 2-4. Such methods may utilize any means of monitoring or detecting the desired activity. As used herein, an agent is said to modulate the expression of a protein of the invention if it is capable of up- or down-regulating expression of the protein in a cell. Such cells can be obtained from any parts of the body such as the GI track, colon, esophagus, stomach, rectum, jujenum, ileum, mucosa, submucosa, cecum, rectum, scalp, blood, dermis, epidermis, skin cells, cutaneous surfaces, intertrigious areas, genitalia, vessels and endothelium. Some non-limiting examples of cells that can be used are: muscle cells, nervous cells, blood and vessels cells, dermis, epidermis and other skin cells, T cell, mast cell, CD4+ lymphocyte, monocyte, macrophage, synovial cell, glial cell, villous intestinal cell, neutrophilic granulocyte, eosinophilic granulocyte, keratinocyte, lamina propria lymphocyte, intraepithelial lymphocyte, epithelial cells and lymphocytes.

[0157] In one format, the specific activity of a protein of the invention, normalized to a standard unit, may be assayed in a cell population that has been exposed to the agent to be tested and compared to an unexposed control cell population may be assayed. Cell lines or populations are exposed to the agent to be tested under appropriate conditions and times. Cellular lysates may be prepared from the exposed cell line or population and a control, unexposed cell line or population. The cellular lysates are then analyzed with the probe.

[0158] Antibody probes can be prepared by immunizing suitable mammalian hosts utilizing appropriate immunization protocols using the proteins of the invention or antigen-containing fragments thereof. To enhance immunogenicity, these proteins or fragments can be conjugated to suitable carriers. Methods for preparing immunogenic conjugates with carriers such as BSA, KLH or other carrier proteins are well known in the art. In some circumstances, direct conjugation using, for example, carbodiimide reagents may be effective; in other instances linking reagents such as those supplied by Pierce Chemical Co. (Rockford, Ill.) may be desirable to provide accessibility to the hapten. The hapten peptides can be extended at either the amino or carboxy terminus with a cysteine residue or interspersed with cysteine residues, for example, to facilitate linking to a carrier. Administration of the immunogens is conducted generally by injection over a suitable time period and with use of suitable adjuvants, as is generally understood in the art. During the immunization schedule, titers of antibodies are taken to determine adequacy of antibody formation. While the polyclonal antisera produced in this way may be satisfactory for some applications, for pharmaceutical compositions, use of monoclonal preparations is preferred. Immortalized cell lines which secrete the desired monoclonal antibodies may be prepared using standard methods, see e.g., Kohler & Milstein (1992) or modifications which affect immortalization of lymphocytes or spleen cells, as is generally known. The immortalized cell lines secreting the desired antibodies can be screened by immunoassay in which the antigen is the peptide hapten, polypeptide or protein. When the appropriate immortalized cell culture secreting the desired antibody is identified, the cells can be cultured either in vitro or by production in ascites fluid. The desired monoclonal antibodies may be recovered from the culture supernatant or from the ascites supernatant. Fragments of the monoclonal antibodies or the polyclonal antisera which contain the immunologically significant portion(s) can be used as antagonists, as well as the intact antibodies. Use of immunologically reactive fragments, such as Fab or Fab′ fragments, is often preferable, especially in a therapeutic context, as these fragments are generally less immunogenic than the whole immunoglobulin. The antibodies or fragments may also be produced, using current technology, by recombinant means. Antibody regions that bind specifically to the desired regions of the protein can also be produced in the context of chimeras derived from multiple species. Antibody regions that bind specifically to the desired regions of the protein can also be produced in the context of chimeras from multiple species, for instance, humanized antibodies. The antibody can therefore be a humanized antibody or a human antibody, as described in U.S. Pat. No. 5,585,089 or Riechmann et al. (1988).

[0159] Agents that are assayed in the above method can be randomly selected or rationally selected or designed. As used herein, an agent is said to be randomly selected when the agent is chosen randomly without considering the specific sequences involved in the association of the protein of the invention alone or with its associated substrates, binding partners, etc. An example of randomly selected agents is the use of a chemical library or a peptide combinatorial library, or a growth broth of an organism. As used herein, an agent is said to be rationally selected or designed when the agent is chosen on a non-random basis which takes into account the sequence of the target site or its conformation in connection with the agent's action. Agents can be rationally selected or rationally designed by utilizing the peptide sequences that make up these sites. For example, a rationally selected peptide agent can be a peptide whose amino acid sequence is identical to or a derivative of any functional consensus site. The agents of the present invention can be, as examples, oligonucleotides, antisense polynucleotides, interfering RNA, peptides, peptide mimetics, antibodies, antibody fragments, small molecules, vitamin derivatives, as well as carbohydrates. Peptide agents of the invention can be prepared using standard solid phase (or solution phase) peptide synthesis methods, as is known in the art. In addition, the DNA encoding these peptides may be synthesized using commercially available oligonucleotide synthesis instrumentation and produced recombinantly using standard recombinant production systems. The production using solid phase peptide synthesis is necessitated if non-gene-encoded amino acids are to be included.

[0160] Another class of agents of the present invention includes antibodies or fragments thereof that bind to a protein encoded by a gene in Tables 2-4. Antibody agents can be obtained by immunization of suitable mammalian subjects with peptides, containing as antigenic regions, those portions of the protein intended to be targeted by the antibodies (see section above of antibodies as probes for standard antibody preparation methodologies).

[0161] In yet another class of agents, the present invention includes peptide mimetics that mimic the three-dimensional structure of the protein encoded by a gene from Tables 2-4. Such peptide mimetics may have significant advantages over naturally occurring peptides, including, for example: more economical production, greater chemical stability, enhanced pharmacological properties (half-life, absorption, potency, efficacy, etc.), altered specificity (e.g., a broad-spectrum of biological activities), reduced antigenicity and others. In one form, mimetics are peptide-containing molecules that mimic elements of protein secondary structure. The underlying rationale behind the use of peptide mimetics is that the peptide backbone of proteins exists chiefly to orient amino acid side chains in such a way as to facilitate molecular interactions, such as those of antibody and antigen. A peptide mimetic is expected to permit molecular interactions similar to the natural molecule. In another form, peptide analogs are commonly used in the pharmaceutical industry as non-peptide drugs with properties analogous to those of the template peptide. These types of non-peptide compounds are also referred to as peptide mimetics or peptidomimetics (Fauchere, 1986; Veber & Freidinger, 1985; Evans et al., 1987) which are usually developed with the aid of computerized molecular modeling. Peptide mimetics that are structurally similar to therapeutically useful peptides may be used to produce an equivalent therapeutic or prophylactic effect. Generally, peptide mimetics are structurally similar to a paradigm polypeptide (i.e., a polypeptide that has a biochemical property or pharmacological activity), but have one or more peptide linkages optionally replaced by a linkage using methods known in the art. Labeling of peptide mimetics usually involves covalent attachment of one or more labels, directly or through a spacer (e.g., an amide group), to non-interfering position(s) on the peptide mimetic that are predicted by quantitative structure-activity data and molecular modeling. Such non-interfering positions generally are positions that do not form direct contacts with the macromolecule(s) to which the peptide mimetic binds to produce the therapeutic effect. Derivitization (e.g., labeling) of peptide mimetics should not substantially interfere with the desired biological or pharmacological activity of the peptide mimetic. The use of peptide mimetics can be enhanced through the use of combinatorial chemistry to create drug libraries. The design of peptide mimetics can be aided by identifying amino acid mutations that increase or decrease binding of the protein to its binding partners. Approaches that can be used include the yeast two hybrid method (see Chien et al., 1991) and the phage display method. The two hybrid method detects protein-protein interactions in yeast (Fields et al., 1989). The phage display method detects the interaction between an immobilized protein and a protein that is expressed on the surface of phages such as lambda and M13 (Amberg et al., 1993; Hogrefe et al., 1993). These methods allow positive and negative selection for protein-protein interactions and the identification of the sequences that determine these interactions.

[0162] Method to Diagnose Crohn's Disease

[0163] The present invention also relates to methods for diagnosing inflammatory bowel disease or a related disease, preferably Crohn's disease (CD), a disposition to such disease, predisposition to such a disease and/or disease progression. In some methods, the steps comprise contacting a target sample with (a) nucleic acid molecule(s) or fragments thereof and comparing the concentration of individual mRNA(s) with the concentration of the corresponding mRNA(s) from at least one healthy donor. An aberrant (increased or decreased) mRNA level of at least one gene from Tables 2-4, at least 5 or 10 genes from Tables 2-4, at least 50 genes from Tables 2-4, at least 100 genes from Tables 2-4 or at least 200 genes from Tables 2-4 determined in the sample in comparison to the control sample is an indication of Crohn's disease or a related disease or a disposition to such kinds of diseases. For diagnosis, samples are, preferably, obtained from inflamed colon tissue. Samples can also be obtained from any parts of the body such as the GI track, colon, esophagus, stomach, rectum, jujenum, ileum, mucosa, submucosa, cecum, rectum, scalp, blood, dermis, epidermis, skin cells, cutaneous surfaces, intertrigious areas, genitalia, vessels and endothelium. Some non-limiting examples of cells that can be used are: muscle cells, nervous cells, blood and vessels cells, dermis, epidermis and other skin cells, T cell, mast cell, CD4+ lymphocyte, monocyte, macrophage, synovial cell, glial cell, villous intestinal cell, neutrophilic granulocyte, eosinophilic granulocyte, keratinocyte, lamina propria lymphocyte, intraepithelial lymphocyte, epithelial cells and lymphocytes.

[0164] For analysis of gene expression, total RNA is obtained from cells according to standard procedures and, preferably, reverse-transcribed. Preferably, a DNAse treatment (in order to get rid of contaminating genomic DNA) is performed. Some non-limiting examples of cells that can be used are: muscle cells, nervous cells, blood and vessels cells, dermis, epidermis and other skin cells, T cell, mast cell, CD4+ lymphocyte, monocyte, macrophage, synovial cell, glial cell, villous intestinal cell, neutrophilic granulocyte, eosinophilic granulocyte, keratinocyte, lamina propria lymphocyte, intraepithelial lymphocyte, epithelial cells and lymphocytes.

[0165] The nucleic acid molecule or fragment is typically a nucleic acid probe for hybridization or a primer for PCR. The person skilled in the art is in a position to design suitable nucleic acids probes based on the information provided in the Tables of the present invention. The target cellular component, i.e. mRNA, e.g., in colon tissue, may be detected directly in situ, e.g. by in situ hybridization or it may be isolated from other cell components by common methods known to those skilled in the art before contacting with a probe. Detection methods include Northern blot analysis, RNase protection, in situ methods, e.g. in situ hybridization, in vitro amplification methods (PCR, LCR, QRNA replicase or RNA-transcription/amplification (TAS, 3SR), reverse dot blot disclosed in EP-B10237362) and other detection assays that are known to those skilled in the art. Products obtained by in vitro amplification can be detected according to established methods, e.g. by separating the products on agarose or polyacrylamide gels and by subsequent staining with ethidium bromide. Alternatively, the amplified products can be detected by using labeled primers for amplification or labeled dNTPs. Preferably, detection is based on a microarray.

[0166] The probes (or primers) (or, alternatively, the reverse-transcribed sample mRNAs) can be detectably labeled, for example, with a radioisotope, a bioluminescent compound, a chemiluminescent compound, a fluorescent compound, a metal chelate, or an enzyme.

[0167] The present invention also relates to the use of the nucleic acid molecules or fragments described above for the preparation of a diagnostic composition for the diagnosis of Crohn's disease or a disposition to such a disease.

[0168] The present invention also relates to the use of the nucleic acid molecules of the present invention for the isolation or development of a compound which is useful for therapy of Crohn's disease. For example, the nucleic acid molecules of the invention and the data obtained using said nucleic acid molecules for diagnosis of Crohn's disease might allow for the identification of further genes which are specifically dysregulated, and thus may be considered as potential targets for therapeutic interventions.

[0169] The invention further provides prognostic assays that can be used to identify subjects having or at risk of developing Crohn's disease. In such method, a test sample is obtained from a subject and the amount and/or concentration of the nucleic acid described in Tables 2-4 is determined; wherein the presence of an associated allele, a particular allele of a polymorphic locus, or the likes in the nucleic acids sequences of this invention (see SEQ ID from Tables 2-36) can be diagnostic for a subject having or at risk of developing Crohn's. As used herein, a “test sample” refers to a biological sample obtained from a subject of interest. For example, a test sample can be a biological fluid, a cell sample, or tissue. A biological fluid can be, but is not limited to saliva, serum, mucus, urine, stools, spermatozoids, vaginal secretions, lymph, amiotic liquid, pleural liquid and tears. Cells can be, but are not limited to: muscle cells, nervous cells, blood and vessels cells, dermis, epidermis and other skin cells, T cell, mast cell, CD4+ lymphocyte, monocyte, macrophage, synovial cell, glial cell, villous intestinal cell, neutrophilic granulocyte, eosinophilic granulocyte, keranocyte, lamina propria lymphocyte, intraephitelial lymphocyte, epithelial cells and lymphocytes.

[0170] Furthermore, the prognostic assays described herein can be used to determine whether a subject can be administered an agent (e.g., an agonist, antagonist, peptidomimetic, polypeptide, nucleic acid such as antisense DNA or interfering RNA (RNAi), small molecule or other drug candidate) to treat Crohn's disease. Specifically, these assays can be used to predict whether an individual will have an efficacious response or will experience adverse events in response to such an agent. For example, such methods can be used to determine whether a subject can be effectively treated with an agent that modulates the expression and/or activity of a gene from Tables 2-4 or the nucleic acids described herein. In another example, an association study may be performed to identify polymorphisms from Tables 5-36 that are associated with a given response to the agent, e.g., an efficacious response or the likelihood of one or more adverse events. Thus, one embodiment of the present invention provides methods for determining whether a subject can be effectively treated with an agent for a disease associated with aberrant expression or activity of a gene from Tables 2-4 in which a test sample is obtained and nucleic acids or polypeptides from Tables 2-4 are detected (e.g., wherein the presence of a particular level of expression of a gene from Tables 2-4 or a particular allelic variant of such gene, such as polymorphisms from Tables 5-36 is diagnostic for a subject that can be administered an agent to treat a disorder such as Crohn's disease). In one embodiment, the method includes obtaining a sample from a subject suspected of having Crohn's disease or an affected individual and exposing such sample to an agent. The expression and/or activity of the nucleic acids and/or genes of the invention are monitored before and after treatment with such agent to assess the effect of such agent. After analysis of the expression values, one skilled in the art can determine whether such agent can effectively treat such subject. In another embodiment, the method includes obtaining a sample from a subject having or susceptible to developing Crohn's disease and determining the allelic constitution of polymorphisms from Tables 5-36 that is associated with a particular response to an agent. After analysis of the allelic constitution of the individual at the associated polymorphisms, one skilled in the art can determine whether such agent can effectively treat such subject.

[0171] The methods of the invention can also be used to detect genetic alterations in a gene from Tables 2-4, thereby determining if a subject with the lesioned gene is at risk for a disease associated with Crohn's disease. In preferred embodiments, the methods include detecting, in a sample of cells from the subject, the presence or absence of a genetic alteration characterized by at least one alteration linked to or affecting the integrity of a gene from Tables 2-4 encoding a polypeptide or the misexpression of such gene. For example, such genetic alterations can be detected by ascertaining the existence of at least one of: (1) a deletion of one or more nucleotides from a gene from Tables 2-4; (2) an addition of one or more nucleotides to a gene from Tables 2-4; (3) a substitution of one or more nucleotides of a gene from Tables 2-4; (4) a chromosomal rearrangement of a gene from Tables 2-4; (5) an alteration in the level of a messenger RNA transcript of a gene from Tables 2-4; (6) aberrant modification of a gene from Tables 2-4, such as of the methylation pattern of the genomic DNA, (7) the presence of a non-wild type splicing pattern of a messenger RNA transcript of a gene from Tables 2-4; (8) inappropriate post-translational modification of a polypeptide encoded by a gene from Tables 2-4; and (9) alternative promoter use. As described herein, there are a large number of assay techniques known in the art which can be used for detecting alterations in a gene from Tables 2-4. A preferred biological sample is a peripheral blood sample obtained by conventional means from a subject. Another preferred biological sample is a buccal swab. Other biological samples can be, but are not limited to, urine, stools, spermatozoids, vaginal secretions, lymph, amiotic liquid, pleural liquid and tears.

[0172] In certain embodiments, detection of the alteration involves the use of a probe/primer in a polymerase chain reaction (PCR) (see, e.g., U.S. Pat. Nos. 4,683,195 and 4,683,202), such as anchor PCR or RACE PCR, or alternatively, in a ligation chain reaction (LCR) (see, e.g., Landegran et al., 1988; and Nakazawa et al., 1994), the latter of which can be particularly useful for detecting point mutations in a gene from Tables 2-4 (see Abavaya et al., 1995). This method can include the steps of collecting a sample of cells from a patient, isolating nucleic acid (e.g., genomic DNA, mRNA, or both) from the cells of the sample, contacting the nucleic acid sample with one or more primers which specifically hybridize to a gene from Tables 2-4 under conditions such that hybridization and amplification of the nucleic acid from Tables 2-4 (if present) occurs, and detecting the presence or absence of an amplification product, or detecting the size of the amplification product and comparing the length to a control sample. PCR and/or LCR may be desirable to use as a preliminary amplification step in conjunction with some of the techniques used for detecting a mutation, an associated allele, a particular allele of a polymorphic locus, or the like described herein.

[0173] Alternative amplification methods include: self sustained sequence replication (Guatelli et al., 1990), transcriptional amplification system (Kwoh et al., 1989), Q-Beta Replicase (Lizardi et al., 1988), isothermal amplification (e.g. Dean et al., 2002); and Hafner et al., 2001), or any other nucleic acid amplification method, followed by the detection of the amplified molecules using techniques well known to those of ordinary skill in the art. These detection schemes are especially useful for the detection of nucleic acid molecules if such molecules are present in very low number.

[0174] In an alternative embodiment, alterations in a gene from Tables 2-4, from a sample cell can be identified by identifying changes in a restriction enzyme cleavage pattern. For example, sample and control DNA is isolated, amplified (optionally), digested with one or more restriction endonucleases, and fragment length sizes are determined by gel electrophoresis and compared. Differences in fragment length sizes between sample and control DNA indicate a mutation(s), an associated allele, a particular allele of a polymorphic locus, or the like in the sample DNA. Moreover, sequence specific ribozymes (see, e.g., U.S. Pat. No. 5,498,531 or DNAzyme e.g. U.S. Pat. No. 5,807,718) can be used to score for the presence of specific associated allele, a particular allele of a polymorphic locus, or the likes by development or loss of a ribozyme or DNAzyme cleavage site.

[0175] The present invention also relates to further methods for diagnosing IBD (ex: Crohn's disease) Crohn's disease or a related disorder, preferably Inflammation, a disposition to such disorder, predisposition to such a disorder and/or disorder progression. In some methods, the steps comprise contacting a target sample with (a) nucleic molecule(s) or fragments thereof and determining the presence or absence of a particular allele of a polymorphism that confers a disorder-related phenotype (e.g., predisposition to such a disorder and/or disorder progression). The presence of at least one allele from Tables 5-36 that is associated with Crohn's disease (“associated allele”), at least 5 or 10 associated alleles from Tables 5-36, at least 50 associated alleles from Tables 5-36 at least 100 associated alleles from Tables 5-36, or at least 200 associated alleles from Tables 5-36 determined in the sample is an indication of Crohn's disease or a related disorder, a disposition or predisposition to such kinds of disorders, or a prognosis for such disorder progression. Samples may be obtained from any parts of the body such as the GI track, colon, esophagus, stomach, rectum, jujenum, ileum, mucosa, submucosa, cecum, rectum, scalp, blood, dermis, epidermis, skin cells, cutaneous surfaces, intertrigious areas, genitalia, vessels and endothelium. Some non-limiting examples of cells that can be used are: muscle cells, nervous cells, blood and vessels cells, dermis, epidermis and other skin cells, T cell, mast cell, CD4+ lymphocyte, monocyte, macrophage, synovial cell, glial cell, villous intestinal cell, neutrophilic granulocyte, eosinophilic granulocyte, keratinocyte, lamina propria lymphocyte, intraepithelial lymphocyte, epithelial cells and lymphocytes.

[0176] In other embodiments, alterations in a gene from Tables 2-4 can be identified by hybridizing sample and control nucleic acids, e.g., DNA or RNA, to high density arrays or bead arrays containing tens to thousands of oligonucleotide probes (Cronin et al., 1996; Kozal et al., 1996). For example, alterations in a gene from Tables 2-4 can be identified in two dimensional arrays containing light-generated DNA probes as described in Cronin et al., (1996). Briefly, a first hybridization array of probes can be used to scan through long stretches of DNA in a sample and control to identify base changes between the sequences by making linear arrays of sequential overlapping probes. This step allows the identification of point mutations, associated alleles, particular alleles of a polymorphic locus, or the like. This step is followed by a second hybridization array that allows the characterization of specific mutations by using smaller, specialized probe arrays complementary to all variants, mutations, alleles detected. Each mutation array is composed of parallel probe sets, one complementary to the wild-type gene and the other complementary to the mutant gene.

[0177] In yet another embodiment, any of a variety of sequencing reactions known in the art can be used to directly sequence a gene from Tables 2-4 and detect an associated allele, a particular allele of a polymorphic locus, or the like by comparing the sequence of the sample gene from Tables 2-4 with the corresponding wild-type (control) sequence. Examples of sequencing reactions include those based on techniques developed by Maxam and Gilbert (1977) or Sanger (1977). It is also contemplated that any of a variety of automated sequencing procedures can be utilized when performing the diagnostic assays (Bio/Techniques 19:448, 1995) including sequencing by mass spectrometry (see, e.g. PCT International Publication No. WO 94/16101; Cohen et al., 1996; and Griffin et al. 1993), real-time pyrophosphate sequencing method (Ronaghi et al., 1998; and Permutt et al., 2001) and sequencing by hybridization (see e.g. Drmanac et al., 2002).

[0178] Other methods of detecting an associated allele, a particular allele of a polymorphic locus, or the likes in a gene from Tables 2-4 include methods in which protection from cleavage agents is used to detect mismatched bases in RNA/RNA, DNA/DNA or RNA/DNA heteroduplexes (Myers et al., 1985). In general, the technique of “mismatch cleavage” starts by providing heteroduplexes formed by hybridizing (labeled) RNA or DNA containing the wild-type gene sequence from Tables 2-4 with potentially mutant RNA or DNA obtained from a tissue sample. The double-stranded duplexes are treated with an agent that cleaves single-stranded regions of the duplex such as which will exist due to basepair mismatches between the control and sample strands. For instance, RNA/DNA duplexes can be treated with RNase and DNA/DNA hybrids treated with S1 nuclease to enzymatically digest the mismatched regions. In other embodiments, either DNA/DNA or RNA/DNA duplexes can be treated with hydroxylamine or osmium tetroxide and with piperidine in order to digest mismatched regions. After digestion of the mismatched regions, the resulting material is then separated by size on denaturing polyacrylamide gels to determine the site of an associated allele, a particular allele of a polymorphic locus, or the like (see, for example, Cotton et al., 1988; Saleeba et al., 1992). In a preferred embodiment, the control DNA or RNA can be labeled for detection, as described herein.

[0179] In still another embodiment, the mismatch cleavage reaction employs one or more proteins that recognize mismatched base pairs in double-stranded DNA (so called “DNA mismatch repair” enzymes) in defined systems for detecting and mapping point an associated allele, a particular allele of a polymorphic locus, or the likes in a gene from Tables 2-4 cDNAs obtained from samples of cells. For example, the mutY enzyme of E. coli cleaves A at G/A mismatches (Hsu et al., 1994). Other examples include, but are not limited to, the MutHLS enzyme complex of E. coli (Smith and Modrich., 1996) and Cel 1 from the celery (Kulinski et al., 2000) both cleave the DNA at various mismatches. According to an exemplary embodiment, a probe based on a gene sequence from Tables 2-4 is hybridized to a cDNA or other DNA product from a test cell or cells. The duplex is treated with a DNA mismatch repair enzyme, and the cleavage products, if any, can be detected using electrophoresis protocols or the like. See, for example, U.S. Pat. No. 5,459,039. Alternatively, the screen can be performed in vivo following the insertion of the heteroduplexes in an appropriate vector. The whole procedure is known to those ordinary skilled in the art and is referred to as mismatch repair detection (see e.g. Fakhrai-Rad et al., 2004).

[0180] In other embodiments, alterations in electrophoretic mobility can be used to identify an associated allele, a particular allele of a polymorphic locus, or the likes in genes from Tables 2-4. For example, single strand conformation polymorphism (SSCP) analysis can be used to detect differences in electrophoretic mobility between mutant and wild type nucleic acids (Orita et al., 1993; see also Cotton, 1993; and Hayashi et al., 1992). Single-stranded DNA fragments of sample and control nucleic acids from Tables 2-4 will be denatured and allowed to renature. The secondary structure of single-stranded nucleic acids varies according to sequence; the resulting alteration in electrophoretic mobility enables the detection of even a single base change. The DNA fragments may be labeled or detected with labeled probes. The sensitivity of the assay may be enhanced by using RNA (rather than DNA), in which the secondary structure is more sensitive to a change in sequence. In a preferred embodiment, the method utilizes heteroduplex analysis to separate double stranded heteroduplex molecules on the basis of changes in electrophoretic mobility (Kee et al., 1991).

[0181] In yet another embodiment, the movement of mutant or wild-type fragments in a polyacrylamide gel containing a gradient of denaturant is assayed using denaturing gradient gel electrophoresis (DGGE) (Myers et al., 1985). When DGGE is used as the method of analysis, DNA will be modified to insure that it does not completely denature, for example by adding a GC clamp of approximately 40 bp of high-melting GC-rich DNA by PCR. In a further embodiment, a temperature gradient is used in place of a denaturing gradient to identify differences in the mobility of control and sample DNA (Rosenbaum et al., 1987). In another embodiment, the mutant fragment is detected using denaturing HPLC (see e.g. Hoogendoorn et al., 2000).

[0182] Examples of other techniques for detecting point mutations, an associated allele, a particular allele of a polymorphic locus, or the like include, but are not limited to, selective oligonucleotide hybridization, selective amplification, selective primer extension, selective ligation, single-base extension, selective termination of extension or invasive cleavage assay. For example, oligonucleotide primers may be prepared in which the known associated allele, particular allele of a polymorphic locus, or the like is placed centrally and then hybridized to target DNA under conditions which permit hybridization only if a perfect match is found (Saiki et al., 1986; Saiki et al., 1989). Such allele specific oligonucleotides are hybridized to PCR amplified target DNA of a number of different associated alleles, a particular allele of a polymorphic locus, or the likes where the oligonucleotides are attached to the hybridizing membrane and hybridized with labeled target DNA. Alternatively, the amplification, the allele-specific hybridization and the detection can be done in a single assay following the principle of the 5′ nuclease assay (e.g. see Livak et al., 1995). For example, the associated allele, a particular allele of a polymorphic locus, or the like locus is amplified by PCR in the presence of both allele-specific oligonucleotides, each specific for one or the other allele. Each probe has a different fluorescent dye at the 5′ end and a quencher at the 3′ end. During PCR, if one or the other or both allele-specific oligonucleotides are hybridized to the template, the Taq polymerase via its 5′ exonuclease activity will release the corresponding dyes. The latter will thus reveal the genotype of the amplified product.

[0183] The hybridization may also be carried out with a temperature gradient following the principle of dynamic allele-specific hybridization or like (e.g. Jobs et al., 2003; and Bourgeois and Labuda, 2004). For example, the hybridization is done using one of the two allele-specific oligonucleotides labeled with a fluorescent dye, an intercalating quencher under a gradually increasing temperature. At low temperature, the probe is hybridized to both the mismatched and full-matched template. The probe melts at a lower temperature when hybridized to the template with a mismatch. The release of the probe is captured by an emission of the fluorescent dye, away from the quencher. The probe melts at a higher temperature when hybridized to the template with no mismatch. The temperature-dependent fluorescence signals therefore indicate the absence or presence of the associated allele, particular allele of a polymorphic locus, or the like (e.g. Jobs et al. supra). Alternatively, the hybridization is done under a gradually decreasing temperature. In this case, both allele-specific oligonucleotides are hybridized to the template competitively. At high temperature none of the two probes is hybridized. Once the optimal temperature of the full-matched probe is reached, it hybridizes and leaves no target for the mismatched probe. In the latter case, if the allele-specific probes are differently labeled, then they are hybridized to a single PCR-amplified target. If the probes are labeled with the same dye, then the probe cocktail is hybridized twice to identical templates with only one labeled probe, different in the two cocktails, in the presence of the unlabeled competitive probe.

[0184] Alternatively, allele specific amplification technology that depends on selective PCR amplification may be used in conjunction with the present invention. Oligonucleotides used as primers for specific amplification may carry the associated allele, particular allele of a polymorphic locus, or the like of interest in the center of the molecule, so that amplification depends on differential hybridization (Gibbs et al., 1989) or at the extreme 3′ end of one primer where, under appropriate conditions, mismatch can prevent, or reduce polymerase extension (Prossner, 1993). In addition it may be desirable to introduce a novel restriction site in the region of the associated allele, particular allele of a polymorphic locus, or the like to create cleavage-based detection (Gasparini et al., 1992). It is anticipated that in certain embodiments amplification may also be performed using Taq ligase for amplification (Barany, 1991). In such cases, ligation will occur only if there is a perfect match at the 3′ end of the 5′ sequence making it possible to detect the presence of a known associated allele, a particular allele of a polymorphic locus, or the like at a specific site by looking for the presence or absence of amplification. The products of such an oligonucleotide ligation assay can also be detected by means of gel electrophoresis. Furthermore, the oligonucleotides may contain universal tags used in PCR amplification and zip code tags that are different for each allele. The zip code tags are used to isolate a specific, labeled oligonucleotide that may contain a mobility modifier (e.g. Grossman et al., 1994).

[0185] In yet another alternative, allele-specific elongation followed by ligation will form a template for PCR amplification. In such cases, elongation will occur only if there is a perfect match at the 3′ end of the allele-specific oligonucleotide using a DNA polymerase. This reaction is performed directly on the genomic DNA and the extension/ligation products are amplified by PCR. To this end, the oligonucleotides contain universal tags allowing amplification at a high multiplex level and a zip code for SNP identification. The PCR tags are designed in such a way that the two alleles of a SNP are amplified by different forward primers, each having a different dye. The zip code tags are the same for both alleles of a given SNP and they are used for hybridization of the PCR-amplified products to oligonucleotides bound to a solid support, chip, bead array or like. For an example of the procedure, see Fan et al. (Cold Spring Harbor Symposia on Quantitative Biology, Vol. LXVIII, pp. 69-78, 2003).

[0186] Another alternative includes the single-base extension/ligation assay using a molecular inversion probe, consisting of a single, long oligonucleotide (see e.g. Hardenbol et al., 2003). In such an embodiment, the oligonucleotide hybridizes on both sides of the SNP locus directly on the genomic DNA, leaving a one-base gap at the SNP locus. The gap-filling, one-base extension/ligation is performed in four tubes, each having a different dNTP. Following this reaction, the oligonucleotide is circularized whereas unreactive, linear oligonucleotides are degraded using an exonulease such as exonuclease I of E. coli. The circular oligonucleotides are then linearized and the products are amplified and labeled using universal tags on the oligonucleotides. The original oligonucleotide also contains a SNP-specific zip code allowing hybridization to oligonucleotides bound to a solid support, chip, bead array or the like. This reaction can be performed at a highly multiplexed level.

[0187] In another alternative, the associated allele, particular allele of a polymorphic locus, or the like is scored by single-base extension (see e.g. U.S. Pat. No. 5,888,819). The template is first amplified by PCR. The extension oligonucleotide is then hybridized next to the SNP locus and the extension reaction is performed using a thermostable polymerase such as ThermoSequenase (GE Healthcare) in the presence of labeled ddNTPs. This reaction can therefore be cycled several times. The identity of the labeled ddNTP incorporated will reveal the genotype at the SNP locus. The labeled products can be detected by means of gel electrophoresis, fluorescence polarization (e.g. Chen et al., 1999) or by hybridization to oligonucleotides bound to a solid support, chip, bead array or the like. In the latter case, the extension oligonucleotide will contain a SNP-specific zip code tag.

[0188] In yet another alternative, the variant is scored by selective termination of extension. The template is first amplified by PCR and the extension oligonucleotide hybridizes in vicinity to the SNP locus, close to but not necessarily adjacent to it. The extension reaction is carried out using a thermostable polymerase such as ThermoSequenase (GE Healthcare) in the presence of a mix of dNTPs and at least one ddNTP. The latter has to terminate the extension at one of the alleles of the interrogated SNP, but not both such that the two alleles will generate extension products of different sizes. The extension product can then be detected by means of gel electrophoresis, in which case the extension products need to be labeled, or by mass spectrometry (see e.g. Storm et al., 2003).

[0189] In another alternative, the associated allele, particular allele of a polymorphic locus, or the like is detected using an invasive cleavage assay (see U.S. Pat. No. 6,090,543). There are five oligonucleotides per SNP to interrogate but these are used in a two step-reaction. During the primary reaction, three of the designed oligonucleotides are first hybridized directly to the genomic DNA. One of them is locus-specific and hybridizes up to the SNP locus (the pairing of the 3′ base at the SNP locus is not necessary). There are two allele-specific oligonucleotides that hybridize in tandem to the locus-specific probe but also contain a 5′ flap that is specific for each allele of the SNP. Depending upon hybridization of the allele-specific oligonucleotides at the base of the SNP locus, this creates a structure that is recognized by a cleavase enzyme (U.S. Pat. No. 6,090,606) and the allele-specific flap is released. During the secondary reaction, the flap fragments hybridize to a specific cassette to recreate the same structure as above except that the cleavage will release a small DNA fragment labeled with a fluorescent dye that can be detected using regular fluorescence detector. In the cassette, the emission of the dye is inhibited by a quencher.

[0190] Other types of markers can also be used for diagnostic purposes. For example, microsatellites can also be useful to detect the genetic predisposition of an individual to a given disorder. Microsatellites consist of short sequence motifs of one or a few nucleotides repeated in tandem. The most common motifs are polynucleotide runs, dinucleotide repeats (particularly the CA repeats) and trinucleotide repeats. However, other types of repeats can also be used. The microsatellites are very useful for genetic mapping because they are highly polymorphic in their length. Microsatellite markers can be typed by various means, including but not limited to DNA fragment sizing, oligonucleotide ligation assay and mass spectrometry. For example, the locus of the microsatellite is amplified by PCR and the size of the PCR fragment will be directly correlated to the length of the microsatellite repeat. The size of the PCR fragment can be detected by regular means of gel electrophoresis. The fragment can be labeled internally during PCR or by using end-labeled oligonucleotides in the PCR reaction (e.g. Mansfield et al., 1996). Alternatively, the size of the PCR fragment is determined by mass spectrometry. In such a case, however, the flanking sequences need to be eliminated. This can be achieved by ribozyme cleavage of an RNA transcript of the microsatellite repeat (Krebs et al., 2001). For example, the microsatellite locus is amplified using oligonucleotides that include a T7 promoter on one end and a ribozyme motif on the other end. Transcription of the amplified fragments will yield an RNA substrate for the ribozyme, releasing small RNA fragments that contain the repeated region. The size of the latter is determined by mass spectrometry. Alternatively, the flanking sequences are specifically degraded. This is achieved by replacing the dTTP in the PCR reaction by dUTP. The dUTP nucleosides are then removed by uracyl DNA glycosylases and the resulting abasic sites are cleaved by either abasic endonucleases such as human AP endonuclease or chemical agents such as piperidine. Bases can also be modified post-PCR by chemical agents such as dimethyl sulfate and then cleaved by other chemical agents such as piperidine (see e.g. Maxam and Gilbert, 1977; U.S. Pat. No. 5,869,242; and U.S. patent pending Ser. No. 60/335,068).

[0191] In another alternative, an oligonucleotide ligation assay can be performed. The microsatellite locus is first amplified by PCR. Then, different oligonucleotides can be submitted to ligation at the center of the repeat with a set of oligonucleotides covering all the possible lengths of the marker at a given locus (Zirvi et al., 1999). Another example of design of an oligonucleotide assay comprises the ligation of three oligonucleotides; a 5′ oligonucleotide hybridizing to the 5′ flanking sequence, a repeat oligonucleotide of the length of the shortest allele of the marker hybridizing to the repeated region and a set of 3′ oligonucleotides covering all the existing alleles hybridizing to the 3′ flanking sequence and a portion of the repeated region for all the alleles longer than the shortest one. For the shortest allele, the 3′ oligonucleotide exclusively hybridizes to the 3′ flanking sequence (U.S. Pat. No. 6,479,244).

[0192] The methods described herein may be performed, for example, by utilizing pre-packaged diagnostic kits comprising at least one probe nucleic acid selected from the SEQ ID of Tables 2-36, or antibody reagent described herein, which may be conveniently used, for example, in a clinical setting to diagnose patient exhibiting symptoms or a family history of a disorder or disorder involving abnormal activity of genes from Tables 2-4.

[0193] Method to Treat an Animal Suspected of Having IBD (Ex: Crohn's Disease)

[0194] The present invention provides methods of treating a disease associated with IBD (ex: Crohn's disease) by expressing in vivo the nucleic acids of at least one gene from Tables 2-4. These nucleic acids can be inserted into any of a number of well-known vectors for the transfection of target cells and organisms as described below. The nucleic acids are transfected into cells, ex vivo or in vivo, through the interaction of the vector and the target cell. The nucleic acids encoding a gene from Tables 2-4, under the control of a promoter, then express the encoded protein, thereby mitigating the effects of absent, partial inactivation, or abnormal expression of a gene from Tables 2-4.

[0195] Such gene therapy procedures have been used to correct acquired and inherited genetic defects, cancer, and viral infection in a number of contexts. The ability to express artificial genes in humans facilitates the prevention and/or cure of many important human disorders, including many disorders which are not amenable to treatment by other therapies (for a review of gene therapy procedures, see Anderson, 1992; Nabel & Felgner, 1993; Mitani & Caskey, 1993; Mulligan, 1993; Dillon, 1993; Miller, 1992; Van Brunt, 1998; Vigne, 1995; Kremer & Perricaudet 1995; Doerfler & Bohm 1995; and Yu et al., 1994).

[0196] Delivery of the gene or genetic material into the cell is the first critical step in gene therapy treatment of a disorder. A large number of delivery methods are well known to those of skill in the art. Preferably, the nucleic acids are administered for in vivo or ex vivo gene therapy uses. Non-viral vector delivery systems include DNA plasmids, naked nucleic acid, and nucleic acid complexed with a delivery vehicle such as a liposome. Viral vector delivery systems include DNA and RNA viruses, which have either episomal or integrated genomes after delivery to the cell. For a review of gene therapy procedures, see the references included in the above section.

[0197] The use of RNA or DNA based viral systems for the delivery of nucleic acids take advantage of highly evolved processes for targeting a virus to specific cells in the body and trafficking the viral payload to the nucleus. Viral vectors can be administered directly to patients (in vivo) or they can be used to treat cells in vitro and the modified cells are administered to patients (ex vivo). Conventional viral based systems for the delivery of nucleic acids could include retroviral, lentivirus, adenoviral, adeno-associated and herpes simplex virus vectors for gene transfer. Viral vectors are currently the most efficient and versatile method of gene transfer in target cells and tissues. Integration in the host genome is possible with the retrovirus, lentivirus, and adeno-associated virus gene transfer methods, often resulting in long term expression of the inserted transgene. Additionally, high transduction efficiencies have been observed in many different cell types and target tissues.

[0198] The tropism of a retrovirus can be altered by incorporating foreign envelope proteins, expanding the potential target population of target cells. Lentiviral vectors are retroviral vectors that are able to transduce or infect non-dividing cells and typically produce high viral titers. Selection of a retroviral gene transfer system would therefore depend on the target tissue. Retroviral vectors are comprised of cis-acting long terminal repeats with packaging capacity for up to 6-10 kb of foreign sequence. The minimum cis-acting LTRs are sufficient for replication and packaging of the vectors, which are then used to integrate the therapeutic gene into the target cell to provide permanent transgene expression. Widely used retroviral vectors include those based upon murine leukemia virus (MuLV), gibbon ape leukemia virus (GaLV), Simian Immuno deficiency virus (SIV), human immuno deficiency virus (HIV), and combinations thereof (see, e.g., Buchscher et al., 1992; Johann et al., 1992; Sommerfelt et al., 1990; Wilson et al., 1989; Miller et al., 1999; and PCT/US94/05700).

[0199] In applications where transient expression of the nucleic acid is preferred, adenoviral based systems are typically used. Adenoviral based vectors are capable of very high transduction efficiency in many cell types and do not require cell division. With such vectors, high titer and levels of expression have been obtained. This vector can be produced in large quantities in a relatively simple system. Adeno-associated virus (“AAV”) vectors are also used to transduce cells with target nucleic acids, e.g., in the in vitro production of nucleic acids and peptides, and for in vivo and ex vivo gene therapy procedures (see, e.g., West et al., 1987; U.S. Pat. No. 4,797,368; WO 93/24641; Kotin, 1994; Muzyczka, 1994). Construction of recombinant AAV vectors is described in a number of publications, including U.S. Pat. No. 5,173,414; Tratschin et al., 1985; Tratschin, et al., 1984; Hermonat & Muzyczka, 1984; and Samulski et al., 1989.

[0200] In particular, numerous viral vector approaches are currently available for gene transfer in clinical trials, with retroviral vectors by far the most frequently used system. All of these viral vectors utilize approaches that involve complementation of defective vectors by genes inserted into helper cell lines to generate the transducing agent. pLASN and MFG-S are examples are retroviral vectors that have been used in clinical trials (Dunbar et al., 1995; Kohn et al., 1995; Malech et al., 1997). PA317/pLASN was the first therapeutic vector used in a gene therapy trial (Blaese et al., 1995). Transduction efficiencies of 50% or greater have been observed for MFG-S packaged vectors (Ellem et al., 1997; and Dranoff et al., 1997).

[0201] Recombinant adeno-associated virus vectors (rAAV) are a promising alternative gene delivery systems based on the defective and nonpathogenic parvovirus adeno-associated type 2 virus. All vectors are derived from a plasmid that retains only the AAV 145 bp inverted terminal repeats flanking the transgene expression cassette. Efficient gene transfer and stable transgene delivery due to integration into the genomes of the transduced cell are key features for this vector system (Wagner et al., 1998, Kearns et al., 1996).

[0202] Replication-deficient recombinant adenoviral vectors (Ad) are predominantly used in transient expression gene therapy; because they can be produced at high titer and they readily infect a number of different cell types. Most adenovirus vectors are engineered such that a transgene replaces the Ad E1a, E1b, and E3 genes; subsequently the replication defector vector is propagated in human 293 cells that supply the deleted gene function in trans. Ad vectors can transduce multiple types of tissues in vivo, including nondividing, differentiated cells such as those found in the liver, kidney and muscle tissues. Conventional Ad vectors have a large carrying capacity. An example of the use of an Ad vector in a clinical trial involved polynucleotide therapy for antitumor immunization with intramuscular injection (Sterman et al., 1998). Additional examples of the use of adenovirus vectors for gene transfer in clinical trials include Rosenecker et al., 1996; Sterman et al., 1998; Welsh et al., 1995; Alvarez et al., 1997; Topf et al., 1998.

[0203] Packaging cells are used to form virus particles that are capable of infecting a host cell. Such cells include 293 cells, which package adenovirus, and ψ2 cells or PA317 cells, which package retrovirus. Viral vectors used in gene therapy are usually generated by a producer cell line that packages a nucleic acid vector into a viral particle. The vectors typically contain the minimal viral sequences required for packaging and subsequent integration into a host, other viral sequences being replaced by an expression cassette for the protein to be expressed. The missing viral functions are supplied in trans by the packaging cell line. For example, AAV vectors used in gene therapy typically only possess ITR sequences from the AAV genome which are required for packaging and integration into the host genome. Viral DNA is packaged in a cell line, which contains a helper plasmid encoding the other AAV genes, namely rep and cap, but lacking ITR sequences. The cell line is also infected with adenovirus as a helper. The helper virus promotes replication of the AAV vector and expression of AAV genes from the helper plasmid. The helper plasmid is not packaged in significant amounts due to a lack of ITR sequences. Contamination with adenovirus can be reduced by, e.g., heat treatment to which adenovirus is more sensitive than AAV.

[0204] In many gene therapy applications, it is desirable that the gene therapy vector be delivered with a high degree of specificity to a particular tissue type. A viral vector is typically modified to have specificity for a given cell type by expressing a ligand as a fusion protein with a viral coat protein on the viruses outer surface. The ligand is chosen to have affinity for a receptor known to be present on the cell type of interest. For example, Han et al., 1995, reported that Moloney murine leukemia virus can be modified to express human heregulin fused to gp70, and the recombinant virus infects certain human breast cancer cells expressing human epidermal growth factor receptor. This principle can be extended to other pairs of viruses expressing a ligand fusion protein and target cells expressing a receptor. For example, filamentous phage can be engineered to display antibody fragments (e.g., Fab or Fv) having specific binding affinity for virtually any chosen cellular receptor. Although the above description applies primarily to viral vectors, the same principles can be applied to nonviral vectors. Such vectors can be engineered to contain specific uptake sequences thought to favor uptake by specific target cells.

[0205] Gene therapy vectors can be delivered in vivo by administration to an individual patient, typically by systemic administration (e.g., intravenous, intraperitoneal, intramuscular, subdermal, or intracranial infusion) or topical application. Alternatively, vectors can be delivered to cells ex vivo, such as cells explanted from an individual patient (e.g., lymphocytes, bone marrow aspirates, and tissue biopsy) or universal donor hematopoietic stem cells, followed by reimplantation of the cells into a patient, usually after selection for cells which have incorporated the vector.

[0206] Ex vivo cell transfection for diagnostics, research, or for gene therapy (e.g., via re-infusion of the transfected cells into the host organism) is well known to those of skill in the art. In a preferred embodiment, cells are isolated from the subject organism, transfected with a nucleic acid (gene or cDNA), and re-infused back into the subject organism (e.g., patient). Various cell types suitable for ex vivo transfection are well known to those of skill in the art (see, e.g., Freshney et al., 1994; and the references cited therein for a discussion of how to isolate and culture cells from patients).

[0207] In one embodiment, stem cells are used in ex vivo procedures for cell transfection and gene therapy. The advantage to using stem cells is that they can be differentiated into other cell types in vitro, or can be introduced into a mammal (such as the donor of the cells) where they will engraft in the bone marrow. Methods for differentiating CD34+ cells in vitro into clinically important immune cell types using cytokines such a GM-CSF, IFN-γ and TNF-α, are known (see Inaba et al., 1992).

[0208] Stem cells are isolated for transduction and differentiation using known methods. For example, stem cells are isolated from bone marrow cells by panning the bone marrow cells with antibodies which bind unwanted cells, such as CD4+ and CD8+ (T cells), CD45+(panB cells), GR-1 (granulocytes), and lad (differentiated antigen presenting cells).

[0209] Vectors (e.g., retroviruses, adenoviruses, liposomes, etc.) containing therapeutic nucleic acids can be also administered directly to the organism for transduction of cells in vivo. Alternatively, naked DNA can be administered.

[0210] Administration is by any of the routes normally used for introducing a molecule into ultimate contact with blood or tissue cells, as described above. The nucleic acids from Tables 2-4 are administered in any suitable manner, preferably with the pharmaceutically acceptable carriers described above. Suitable methods of administering such nucleic acids are available and well known to those of skill in the art, and, although more than one route can be used to administer a particular composition, a particular route can often provide a more immediate and more effective reaction than another route (see Samulski et al., 1989). The present invention is not limited to any method of administering such nucleic acids, but preferentially uses the methods described herein.

[0211] The present invention further provides other methods of treating IBD (ex: Crohn's disease or UC) such as administering to an individual having IBD (ex: Crohn's disease or UC) an effective amount of an agent that regulates the expression, activity or physical state of at least one gene from Tables 2-4. An “effective amount” of an agent is an amount that modulates a level of expression or activity of a gene from Tables 2-4, in a cell in the individual at least about 10%, at least about 20%, at least about 30%, at least about 40%, at least about 50%, at least about 60%, at least about 70%, at least about 80% or more, compared to a level of the respective gene from Tables 2-4 in a cell in the individual in the absence of the compound. The preventive or therapeutic agents of the present invention may be administered, either orally or parenterally, systemically or locally. For example, intravenous injection such as drip infusion, intramuscular injection, intraperitoneal injection, subcutaneous injection, suppositories, intestinal lavage, oral enteric coated tablets, and the like can be selected, and the method of administration may be chosen, as appropriate, depending on the age and the conditions of the patient. The effective dosage is chosen from the range of 0.01 mg to 100 mg per kg of body weight per administration. Alternatively, the dosage in the range of 1 to 1000 mg, preferably 5 to 50 mg per patient may be chosen. The therapeutic efficacy of the treatment may be monitored by observing various parts of the GI tract, by endoscopy, barium, colonoscopy, or any other monitoring methods known in the art. Other ways of monitoring efficacy can be, but are not limited to monitoring inflammatory conditions involving the upper gastrointestinal tract such as monitoring the amelioration on the esophageal discomfort, decrease in pain, improved swallowing, reduced chest pain, decreased heartburn, decreased regurgitation of solids or liquids after swallowing or eating, decrease in vomiting, or improvement in weight gain or improvement in vitality.

[0212] The present invention further provides a method of treating an individual clinically diagnosed with IBD (ex: Crohn's disease or UC). The methods generally comprises analyzing a biological sample that includes a cell, in some cases, a GI track cell, from an individual clinically diagnosed with IBD (ex: Crohn's disease or UC) for the presence of modified levels of expression of at least 1 gene, at least 10 genes, at least 50 genes, at least 100 genes, or at least 200 genes from Tables 2-4. A treatment plan that is most effective for individuals clinically diagnosed as having a condition associated with Crohn's disease is then selected on the basis of the detected expression of such genes in a cell. Treatment may include administering a composition that includes an agent that modulates the expression or activity of a protein from Tables 2-4 in the cell. Information obtained as described in the methods above can also be used to predict the response of the individual to a particular agent. Thus, the invention further provides a method for predicting a patient's likelihood to respond to a drug treatment for a condition associated with IBD (ex: Crohn's disease or UC), comprising determining whether modified levels of a gene from Tables 2-4 is present in a cell, wherein the presence of protein is predictive of the patient's likelihood to respond to a drug treatment for the condition. Examples of the prevention or improvement of symptoms accompanied by IBD (ex: Crohn's disease or UC) that can monitored for effectiveness include prevention or improvement of diarrhea, prevention or improvement of weight loss, inhibition of bowel tissue edema, inhibition of cell infiltration, inhibition of surviving period shortening, and the like, and as a result, a preventing or improving agent for diarrhea, a preventing or improving agent for weight loss, an inhibitor for bowel tissues edema, an inhibitor for cell infiltration, an inhibitor for surviving period shortening, and the like can be identified.

[0213] The invention also provides a method of predicting a response to therapy in a subject having IBD (ex: Crohn's disease or UC) by determining the presence or absence in the subject of one or more markers associated with IBD (ex: Crohn's disease or UC) described in Tables 5-36, diagnosing the subject in which the one or more markers are present as having IBD (ex: Crohn's disease or UC), and predicting a response to a therapy based on the diagnosis e.g., response to therapy may include an efficacious response and/or one or more adverse events. The invention also provides a method of optimizing therapy in a subject having IBD (ex: Crohn's disease or UC) by determining the presence or absence in the subject of one or more markers associated with a clinical subtype of IBD (ex: Crohn's disease or UC), diagnosing the subject in which the one or more markers are present as having a particular clinical subtype of IBD (ex: Crohn's disease or UC), and treating the subject having a particular clinical subtype of IBD (ex: Crohn's disease or UC) based on the diagnosis. As an example, treatment for the fibrostenotic subtype of IBD (ex: Crohn's disease or UC) currently includes surgical removal of the affected, structured part of the bowel.

[0214] Thus, while there are a number of treatments for IBD (ex: Crohn's disease or UC) currently available, they all are accompanied by various side effects, high costs, and long complicated treatment protocols, which are often not available and effective in a large number of individuals. Accordingly, there remains a need in the art for more effective and otherwise improved methods for treating and preventing IBD (ex: Crohn's disease or UC). Thus, there is a continuing need in the medical arts for genetic markers of IBD (ex: Crohn's disease or UC) and guidance for the use of such markers. The present invention fulfills this need and provides further related advantages.

### EXAMPLES

### Example 1

### Identification of Cases and Controls

[0215] All individuals were sampled from the Quebec founder population (QFP). Membership in the founder population was defined as having four grandparents with French Canadian family names who were born in the Province of Quebec, Canada or in adjacent areas of the Provinces of New Brunswick and Ontario or in New England or New York State. The Quebec population is characterized both by extended LD and by decreased genetic heterogeneity. The increased extent of LD allows the detection of disease associated genes using a reasonable marker density, while still allowing the increased meiotic resolution of population-based mapping. The specific combination of age in generations, optimal number of founders and large present population size makes the QFP optimal for LD-based gene mapping.

[0216] Patient inclusion criteria for the study include diagnosis for Crohn's disease by any one of the following: a colonoscopy, a radiological examination with barium, an abdominal surgical operation or a biopsy or a surgical specimen. The colonoscopy diagnosis consists of observing linear, deep or serpentigenous ulcers, pseudopolyps, or skip areas. The barium radiological examination consists of the detection of strictures, ulcerations and string signs by observing the barium enema and the small bowel followed through an NMRI series.

[0217] Patients that were diagnosed with ulcerative colitis, infectious colitis or other intestinal diseases were excluded from the study. All human sampling was subject to ethical review procedures.

[0218] All enrolled QFP subjects (patients and controls) provided a 30 ml blood sample (3 barcoded tubes of 10 ml). Samples were processed immediately upon arrival at Genizon's laboratory. All samples were scanned and logged into a LabVantage Laboratory Information Management System (LIMS), which served as a hub between the clinical data management system and the genetic analysis system. Following centrifugation, the buffy coat containing the white blood cells was isolated from each tube. Genomic DNA was extracted from the buffy coat from one of the tubes, and stored at 4° C. until required for genotyping. DNA extraction was performed with a commercial kit using a guanidine hydrochloride based method (FlexiGene, Qiagen) according to the manufacturer's instructions. The extraction method yielded high molecular weight DNA, and the quality of every DNA sample was verified by agarose gel electrophoresis. Genomic DNA appeared on the gel as a large band of very high molecular weight. The remaining two buffy coats were stored at −80° C. as backups.

[0219] The QFP samples were collected as family trios consisting of Crohn's disease subjects and two first degree relatives. Of the 500 trios, 477 were Parent, Parent, Child (PPC) trios; the remainders were Parent, Child, Child (PCC) trios. Only the PPC trios were used for the analysis reported here because they produced equal numbers of more accurately estimated case and control haplotypes than the PCC trios. 382 trios were used in the genome wide scan. One member of each trio was affected with Crohn's disease. For the 382 trios used in the genome wide scan, these included 189 daughters, 90 sons, 54 mothers and 49 fathers. When a child was the affected member of the trio, the two non-transmitted parental chromosomes (one from each parent) were used as controls, when one of the parents was affected, that person's spouse provided the control chromosomes. The recruitment of trios allowed a more precise determination of long extended haplotypes.

### Example 2

### Genome Wide Association

[0220] Genotyping was performed using Perlegen's ultra-high-throughput platform. Marker loci were amplified by PCR and hybridized to wafers containing arrays of oligonucleotides. Allele discrimination was performed through allele-specific hybridization. In total, 248,535 SNPs, distributed as evenly as possible throughout the genome, were genotyped on the 382 QFP trios for a total of 372,802,500 genotypes. These markers were mostly selected from various databases including the ˜1.6 million SNP database of Perlegen Life Sciences (Patil, 2001); several thousand were obtained from the HapMap consortium database and/or dbSNP at NCBI. The SNPs were chosen to maximize uniformity of genetic coverage and to cover a distribution of allele frequencies. All SNPs that did not pass the quality controls for the assay, that is, that had a minor allele frequency of less than 1%, a Mendelian error rate within trios greater than 1%, that deviated significantly from the Hardy-Weinberg equilibrium, or that had excessive missing data (cut-off at 1% missing values or higher) were removed from the analysis.

[0221] Genetic analysis was performed on a total of 165,803 SNPs (158,811 autosomal, 6851 X chromosome and 141 Y chromosome). The average gap size was approximately 17 kb. Of the 165,803 markers, ˜140,000 had a minor allele frequency (MAF) greater than 10% for the QFP.

[0222] The genotyping information was entered into a Unified Genotype Database (a proprietary database under development) from which it was accessed using custom-built programs for export to the genetic analysis pipeline. Analyses of these genotypes were performed with the statistical tools described in Example 3. The GWS permitted the identification of 371 candidate chromosomal regions linked to Crohn's disease (Table 1).

### Example 3

### Genetic Analysis

[0223] 1. Dataset Quality Assessment

[0224] Prior to performing any analysis, the dataset from the GWS was verified for completeness of the trios. The programs Famcheck and Fampull removed any trios with abnormal family structure or missing individuals (e.g. trios without a proband, duos, singletons, etc.), and calculated the total number of complete trios in the dataset. The trios were also tested to make sure that no subjects within the cohort were related more closely than second cousins (6 meiotic steps).

[0225] Subsequently, the program DataStats was used to calculate the following statistics per marker and per family:
[0226] Minor allele frequency (MAF) for each marker; Missing values for each marker and family; Hardy Weinberg Equilibrium for each marker; and
[0227] Mendelian segregation error rate.

[0228] The following acceptance criteria were applied for internal analysis purposes:
[0229] MAF>1%;
[0230] Missing values <1%;
[0231] Observed non-Mendelian segregation <0.33%;
[0232] Non significant deviation in allele frequencies from Hardy Weinberg equilibrium.

[0233] Markers or families not meeting these criteria were removed from the dataset in the following step. Analyses of variance were performed using the algorithm GenAnova, to assess whether families or markers have a greater effect on missing values and/or non-Mendelian segregation. This was used to determine the smallest number of data points to remove from the dataset in order to meet the requirements for missing values and non-Mendelian segregation. The families and/or markers were removed from the dataset using the program DataPull, which generates an output file that is used for subsequent analysis of the genotype data.

[0234] 2. Phase Determination

[0235] The program PhaseFinderSNP2.0 was used to determine phase from trio data on a marker-by-marker, trio-by-trio basis. The output file contains haplotype data for all trio members, with ambiguities present when all trio members are heterozygous or where data is missing. The program AlIHaps2 PatCtrl was then used to determine case and control haplotypes and to prepare the data in the proper input format for the next stage of analysis, using the expectation maximization algorithm, PL-EM, to call phase on the remaining ambiguities. This stage consists of several modules for resolution of the remaining phase ambiguities. PLEMInOut1 was first used to recode the haplotypes for input into the PL-EM algorithm in 15-marker blocks for the genome wide scan data and for 11 marker blocks for fine and ultra-fine mapping data sets. The haplotype information was encoded as genotypes, allowing for the entry of known phase into the algorithm; this method limits the possible number of estimated haplotypes conditioned on already known phase assignments. The PL-EM algorithm was used to estimate haplotypes from the “pseudo-genotype” data in 11 or 15-marker windows, advancing in increments of one marker across the chromosome. The results were then converted into multiple haplotype files using the program PLEMInOut2. Subsequently PLEMBlockGroup was used to convert the individual 11 or 15-marker block files into one continuous block of haplotypes for the entire chromosome and to generate files for further analysis by LDSTATS and SINGLETYPE. PLEMBlockGroup takes the consensus estimation of the allele call at each marker over all separate estimations (most markers are estimated 11-15 different times as the 11 or 15 marker blocks pass over their position).

[0236] 3. Haplotype Association Analysis

[0237] Haplotype association analysis was performed using the program LDSTATS. LDSTATS tests for association of haplotypes with the disease phenotype. The algorithms LDSTATS (v2.0) and LDSTATS (v4.0) define haplotypes using multi-marker windows that advance across the marker map in one-marker increments. Windows can contain any odd number of markers specified as a parameter of the algorithm. Other marker windows can also be used. At each position the frequency of haplotypes in cases and controls was calculated and a chi-square statistic was calculated from case control frequency tables. For LDSTATS v2.0, the significance of the chi-square for single marker and 3-marker windows was calculated as Pearson's chi-square with degrees of freedom. Larger windows of multi-allelic haplotype association were tested using Smith's normalization of the square root of Pearson's Chi-square. In addition, LDSTATS v2.0 calculates Chi-square values for the transmission disequilibrium test (TDT) for single markers in situations where the trios consisted of parents and an affected child.

[0238] LDSTATS v4.0 calculates significance of chi-square values using a permutation test in which case-control status is randomly permuted until 350 permuted chi-square values are observed that are greater than or equal to chi-square value of the actual data. The P value is then calculated as 350/the number of permutations required.

[0239] The best signal at a given location was determined by comparing the significance (p-value) of the association with Crohn disease for window sizes of 1, 3, 5, 7, and 9 SNPs, and selecting the most significant window. For a given window size at a given location, the association with Crohn disease was evaluated by comparing the overall distribution of haplotypes in the cases with the overall distribution of haplotypes in the controls. Haplotypes with a relative risk greater than one increase the risk of developing Crohn disease while haplotypes with a relative risk less than one are protective and decrease the risk.

[0240] 4. Singletype Analysis

[0241] The SINGLETYPE algorithm assesses the significance of case-control association for single markers using the genotype data from the laboratory as input in contrast to LDSTATS single marker window analyses, in which case-control alleles for single markers from estimated haplotypes in file, hapatctr.txt, as input. SINGLETYPE calculates P values for association for both alleles, 1 and 2, as well as for genotypes, 11, 12, and 22, and plots these as −log₁₀ P values for significance of association against marker position.

[0242] 5. Conditional Haplotype Analyses

[0243] Conditional haplotype analyses were performed on subsets of the original set of 382 cases and 382 controls using the program LDSTATS (v2.0). The selection of a subset of cases and their matched controls was based on the carrier status of cases at a gene or locus of interest. We selected the gene NOD2 (alias CARD15) on chromosome 16 and the gene IL23R on chromosome 1 based on our association findings using LDSTAT (v2.0) in our fine mapping of these two loci with 477 trios (see below). Additionally, we selected the gene IRAK2 on chromosome 3 and identified haplotypes based on SNPs in the genome wide scan on 382 trios. The most significant association signal in NOD2, using build 35, was obtained with a haplotype window of size 7 containing SNPs corresponding to SEQ IDs 21467, 21468, 21469, 21470, 21471, 21472, 21473 (see Table below for conversion to the specific DNA alleles used). A reduced haplotype diversity was observed and we selected two sets of risk haplotypes for conditional analyses. The first set consisted of haplotypes 2121222 and 1121211 and the second set contained the above two haplotypes and haplotype 2121211. Using the first set, we partitioned the cases into two groups; the first group consisting of those cases that were carrier of a risk haplotype and the second group consisting of the remaining cases, the non-carriers. The resulting sample sizes were respectively 125 and 227. The sample sizes were 200 and 152 for the two groups when we partitioned the cases into two groups using the second set containing three risk haplotypes. LDSTAT (v2.0) was run in each group and regions showing association with Crohn's disease are reported in Tables 5-20. Regions associated with Crohn's disease in the group of carriers (B35#has_NOD2_cr_{—}3haps) indicate the presence of an epistatic interaction between risk factors in those regions and risk factors in NOD2 (Table 5). Regions associated with Crohn's disease in the group of non carriers (B35#not_NOD2_cr_{—}2haps) indicate the existence of risk factors acting independently of NOD2 (Table 6). The most significant association signal in NOD2, using build 36, was obtained with a haplotype window of size 7 containing SNPs corresponding to SEQ IDs 21474, 21467, 21468, 21469, 21470, 21471, 21472 (see Table below for conversion to the specific DNA alleles used). A reduced haplotype diversity was observed and we selected a set of risk haplotypes and a set of protective haplotypes for conditional analyses. The risk set consisted of haplotypes 1112121 and 1212122, while excluding genotype 1212122/1221121 due to dominance effects. The protective set consisted of allele 1222211, excluding herozygote carriers of either allele 1112121 or 1212122, and of homozygote individuals with genotype 1221121/1221121. The resulting sample sizes were 132 and 238 for the subsetting based on the risk set and 158 and 212 for the protective set, respectively for the carriers and the non-carriers. LDSTAT (v2.0) was run in each group and regions showing association with Crohn's disease are reported in Tables 5-20. Regions associated with Crohn's disease in the group of non-carriers of a risk haplotype (B36#not_NOD2_cr) and in the group of carriers of a protective haplotype (B36#has_NOD2_cp) indicate the existence of risk factors acting independently of NOD2 (Tables 20 and 17).

[0244] A second conditional analysis was performed using the gene IL23R on chromosome 1. The most significant association in IL23R, using build 35, was obtained with a haplotype window of size 9 containing SNPs corresponding to SEQ IDs 21481, 21482, 21483, 21484, 21485, 21486, 21487, 21488, 21489 (see Table below for conversion to the specific DNA alleles used). A reduced haplotype diversity was observed and we selected one set of protective haplotypes and a risk haplotype for conditional analyses. The protective set consisted of haplotypes 212111122 and 212111121 and the risk haplotype was 221211121. However, due to dominance effects involving the risk haplotype, we also considered the risk haplotype 221211121 while excluding heterozygotes involving haplotypes 122122212, 222122211 or 212111122 and the risk haplotype. Using the set of protective haplotypes, we partitioned the cases into two groups; the first group consisting of those cases that were carrier of a protective haplotype and the second group consisting of the remaining cases, the non-carriers. The resulting sample sizes were respectively 204 and 162. LDSTATS (v2.0) was run in each group and regions showing association with Crohn's disease are reported in Tables 5-20. Regions associated with Crohn's disease in the group of carriers (B35#has_IL23R_cp2hap), indicate the existence of risk factors acting independently of IL23R. Regions associated with Crohn's disease in the group of non-carriers (B35#not_IL23R_cp2hap) indicate the presence of an epistatic interaction between risk factors in those regions and risk factors in IL23R (Tables 7 and 10). We repeated the process of partitioning the cases into two groups using the risk haplotype in IL23R. The carriers were cases with a haplotype in the risk set, the non-carriers were the remaining set of cases. The sample sizes for the two groups were 184 and 182 respectively. Regions associated with Crohn's disease in the group of carriers (B35#has_IL23R_cr) and (B35#has_IL23R_cr_not3) indicate the presence of an epistatic interaction between risk factors in those regions and risk factors in IL23R (Tables 8 and 9). Regions associated with Crohn's disease in the group of non-carriers (B35#not_IL23R_cr) and (B35#not_IL23R_cr_not3) indicate the presence of risk factors acting independently of IL23R (Tables 11 and 12). The most significant association in IL23R, using build 36, was obtained with a haplotype window of size 5 containing SNPs corresponding to SEQ IDs 21488, 21489, 21492, 21493, 21494 (see Table below for conversion to the specific DNA alleles used). A reduced haplotype diversity was observed and we selected one set of risk haplotypes for conditional analyses. The risk set consisted of haplotype 21222, while excluding heterozygote genotypes with haplotypes 12122 or 22122 and haplotype 21222 due to dominance effects. We partitioned the cases into two groups; the first group consisting of those cases that were carrier of a haplotype in the risk set and the second group consisting of the remaining cases, the non-carriers. The resulting sample sizes were respectively 194 and 174. LDSTATS (v2.0) was run in each group and regions showing association with Crohn's disease are reported in Tables 5-20. Regions associated with Crohn's disease in the group of carriers (B36#has_IL23R_cr) indicate the presence of an epistatic interaction between risk factors in those regions and risk factors in IL23R (Table 15). Regions associated with Crohn's disease in the group of non-carriers of a risk haplotype (B36#not_IL23R_cr) indicate the existence of risk factors acting independently of IL23R (Table 16). When considering the program LDSTATS (v4.0), the most significant association in IL23R, using build 36, was obtained with a haplotype window of size 3 containing SNPs corresponding to SEQ IDs 21482, 21483, 21484 (see Table below for conversion to the specific DNA alleles used). A reduced haplotype diversity was observed and we selected one set of risk and a set of protective haplotypes for conditional analyses. The risk set consisted of genotypes 212/221 and 212/212. We partitioned the cases into two groups; the first group consisting of those cases that were carrier of a genotype in the risk set and the second group consisting of the remaining cases, the non-carriers. The resulting sample sizes were respectively 112 and 256. The protective set consisted of genotypes 121/221 and 121/121. As was done with the risk set, we partitioned the cases into two groups; the first group consisting of those cases that were carrier of a genotype in the protective set and the second group consisting of the remaining cases, the non-carriers. The resulting sample sizes were respectively 111 and 257. LDSTATS (v2.0) was run in each group and regions showing association with Crohn's disease are reported in Tables 5-20. Regions associated with Crohn's disease in the group of carriers (B36#has_IL23R-1_cr) indicate the presence of an epistatic interaction between risk factors in those regions and risk factors in IL23R (Table 14). Regions, associated with Crohn's disease in the group of non-carriers of a risk haplotype (B36#not_IL23R-1cr) and in the group of carriers of a protective haplotype (B36#has_IL23R-1_cp) indicate the existence of risk factors acting independently of IL23R (Tables 18 and 13).

[0245] A third conditional analysis was performed using the gene IRAK2 on chromosome 3. The most significant association in IRAK2, using build 36, was obtained with a single SNP corresponding to SEQ ID 21498 (see Table below for conversion to the specific DNA alleles used). A reduced haplotype diversity was observed and we selected a risk genotype for conditional analyses. The risk set consisted of genotype 2/2. We partitioned the cases into two groups; the first group consisting of those cases that were carrier of the risk genotype and the second group consisting of the remaining cases, the non-carriers. The resulting sample sizes were respectively 111 and 259. LDSTATS (v2.0) was run in each group and regions showing association with Crohn's disease are reported in Table 5-20. Regions, associated with Crohn's disease in the group of non carriers of a risk haplotype (B36#not_IRAK2_cr) indicate the existence of risk factors acting independently of IRAK2 (Table 19).

[0246] For each region that was associated with Crohn's disease in the conditional analyses, we report in Tables 21-36 the allele frequencies and the relative risk (RR) for the haplotypes contributing to the best signal at each SNP in the region. The best signal at a given location was determined by comparing the significance (p-value) of the association with Crohn's disease for window sizes of 1, 3, 5, 7, and 9 SNPs, and selecting the most significant window. For a given window size at a given location, the association with Crohn's disease was evaluated by comparing the overall distribution of haplotypes in the cases with the overall distribution of haplotypes in the controls. Haplotypes with a relative risk greater than one increase the risk of developing Crohn's disease while haplotypes with a relative risk less than one are protective and decrease the risk.

DNA alleles used in haplotypes (NOD2/CARD15 Build 35)

| SeqID | 21475 | 21476 | 21477 | 21478 | 21479 | 21480 | 21480 |
|---|---|---|---|---|---|---|---|
| Position B35 | 49303427 | 49305205 | 49308676 | 49308899 | 49310925 | 49314041 | 49314275 |
| Allele | T/C | T/C | T/G | A/G | A/G | G/C | T/C |
| 2121222 | C | T | G | A | G | C | C |
| 1121211 | T | T | G | A | G | G | T |
| 2121211 | C | T | G | A | G | G | T |

DNA alleles used in haplotypes (IL23R Build 35)

| SeqID | 21481 | 21482 | 21483 | 21484 | 21485 | 21486 | 21487 | 21490 | 21491 |
|---|---|---|---|---|---|---|---|---|---|
| Position B35 | 67381537 | 67382937 | 67384786 | 67387749 | 67388943 | 67390943 | 67392949 | 67395507 | 67397137 |
| Alleles | T\|G | A\|G | A\|G | T\|G | T\|C | A\|C | T\|C | T\|C | T\|C |
| 221211121 | G | G | A | G | T | A | T | C | T |
| 122122212 | T | G | G | T | C | C | C | T | C |
| 222122211 | G | G | G | T | C | C | C | T | T |
| 212111122 | G | A | G | T | T | A | T | C | C |
| 212111121 | G | A | G | T | T | A | T | C | T |

DNA alleles used in haplotypes (NOD2/CARD15 Build 36)

| SeqID | 21474 | 21475 | 21476 | 21477 | 21478 | 21479 | 21480 |
|---|---|---|---|---|---|---|---|
| Position B36 | 49302189 | 49303427 | 49305205 | 49308676 | 49308899 | 49310925 | 49314041 |
| Alleles | A\|G | T\|C | T\|C | T\|G | A\|G | A\|G | G\|C |
| 1112121 | A | T | T | G | A | G | G |
| 1212122 | A | C | T | G | A | G | C |
| 1221121 | A | C | C | T | A | G | G |
| 1222211 | A | C | C | G | G | A | G |

DNA alleles used in haplotypes (IL23R Build 36)

| SeqID | 21490 | 21491 | 21492 | 21493 | 21494 |
|---|---|---|---|---|---|
| Position B36 | 67456074 | 67457704 | 67457975 | 67458031 | 67459652 |
| Alleles | T\|C | T\|C | T\|C | A\|G | T\|C |
| 12122 | T | C | T | G | C |
| 21222 | C | T | C | G | C |
| 22122 | C | C | T | G | C |

DNA alleles used in haplotypes (iL23R Build 36 LDV4)

| SeqID | 21495 | 21496 | 21497 |
|---|---|---|---|
| Position B36 | 67443504 | 67445353 | 67448316 |
| Alleles | A\|G | A\|G | T\|G |
| 121 | A | G | T |
| 212 | G | A | G |
| 221 | G | G | T |

DNA alleles used in haplotypes (IRAK2 Build 36)

| SeqID | 21498 |
|---|---|
| Position B36 | 10253980 |
| Alleles | A\|C |
| 1 | A |
| 2 | C |

### Example 4

### Gene Identification and Characterization

[0247] A series of gene characterization was performed for each candidate region described in Table 1. Any gene or EST mapping to the interval based on public map data or proprietary map data was considered as a candidate Crohn's disease gene. The approach used to identify all genes located in the critical regions is described below.

[0248] Public Gene Mining

[0249] Once regions were identified using the analyses described above, a series of public data mining efforts were undertaken, with the aim of identifying all genes located within the critical intervals as well as their respective structural elements (i.e., promoters and other regulatory elements, UTRs, exons and splice sites). The initial analysis relied on annotation information stored in public databases (e.g. NCBI, UCSC Genome Bioinformatics, Entrez Human Genome Browser, OMIM—see below for database URL information). Tables 2-4 lists the genes that have been mapped to the 654 candidate regions.

Database URLs

| Name | URL |
|---|---|
| Biocarta | http://www.biocarta.com/ |
| BioCyc | http://www.biocyc.org/ |
| Biomolecular Interaction Network | http://bind.ca/ |
| Database (BIND) | |
| Database of Interacting Proteins | http://dip.doe-mbi.ucla.edu/ |
| Gene Expression Omnibus | http://www.ncbi.nlm.nih.gov/geo/ |
| Human Genome Browser | http://www.ensembl.org/Homo_sapiens/ |
| Interdom | http://interdom.lit.org.sg/help/term.php |
| Kyoto Encyclopedia of Genes and | http://www.genome.jp/kegg/ |
| Genomes (KEGG) | |
| Molecular Interactions Database | http://mint.bio.uniroma2.it/mint/ |
| (MINT) | |
| National Center for Biotechnology | http://www.ncbi.nlm.nih.gov/ |
| Information (NCBI) | |
| Online Mendelian Inheritance in | http://www.ncbi.nlm.nih.gov/entrez/query.fcgi?db=OMIM |
| Man (OMIM) | |
| OmniViz | http://www.omniviz.com/applications/omni_viz.htm |
| Pathway Enterprise | http://www.omniviz.com/applications/pathways.htm |
| Reactome | http://www.reactome.org/ |
| Transpath | http://www.biobase.de/pages/products/transpath.html |
| UCSC Genome Bioinformatics | http://genome.ucsc.edu/index.html?org=Human |
| UniGene | http://www.ncbi.nlm.nih.gov/entrez/query.fcgi?db=unigene |

[0250] For some genes the available public annotation was extensive, whereas for others very little was known about a gene's function. Customized analysis was therefore performed to characterize genes that corresponded to this latter class. Importantly, the presence of rare splice variants and artifactual ESTs was carefully evaluated. Subsequent cluster analysis of novel ESTs provided an indication of additional gene content in some cases. The resulting clusters were graphically displayed against the genomic sequence, providing indications of separate clusters that may contribute to the same gene, thereby facilitating development of confirmatory experiments in the laboratory. While much of this information was available in the public domain, the customized analysis performed revealed additional information not immediately apparent from the public genome browsers.

[0251] A unique consensus sequence was constructed for each splice variant and a trained reviewer assessed each alignment. This assessment included examination of all putative splice junctions for consensus splice donor/acceptor sequences, putative start codons, consensus Kozak sequences and upstream in-frame stops, and the location of polyadenylation signals. In addition, conserved noncoding sequences (CNSs) that could potentially be involved in regulatory functions were included as important information for each gene. The genomic reference and exon sequences were then archived for future reference. A master assembly that included all splice variants, exons and the genomic structure was used in subsequent analyses (i.e., analysis of polymorphisms). Table 3 lists gene clusters based on the publicly available EST and cDNA clustering algorithm, ECGene.

[0252] An important component of these efforts was the ability to visualize and store the results of the data mining efforts. A customized version of the highly versatile genome browser GBrowse (http://www.gmod.org/) was implemented in order to permit the visualization of several types of information against the corresponding genomic sequence. In addition, the results of the statistical analyses were plotted against the genomic interval, thereby greatly facilitating focused analysis of gene content.

[0253] Computational Analysis of Genes and GeneMaps

[0254] In order to assist in the prioritization of candidate genes for which minimal annotation existed, a series of computational analyses were performed that included basic BLAST searches and alignments to identify related genes. In some cases this provided an indication of potential function. In addition, protein domains and motifs were identified that further assisted in the understanding of potential function, as well as predicted cellular localization.

[0255] A comprehensive review of the public literature was also performed in order to facilitate identification of information regarding the potential role of candidate genes in the pathophysiology of Crohn's disease. In addition to the standard review of the literature, public resources (Medline and other online databases) were also mined for information regarding the involvement of candidate genes in specific signaling pathways. A variety of pathway and yeast two hybrid databases were mined for information regarding protein-protein interactions. These included BIND, MINT, DIP, Interdom, and Reactome, among others. By identifying homologues of genes in the Crohn's candidate regions and exploring whether interacting proteins had been identified already, knowledge regarding the GeneMaps for Crohn's disease was advanced. The pathway information gained from the use of these resources was also integrated with the literature review efforts, as described above.

[0256] Genes identified in the WGAS were evaluated using the Ingenuity Pathway Analysis application (IPA, Ingenuity systems) in order to identify direct biological interactions between these genes, and also to identify molecular regulators acting on those genes (indirect interactions) that could be also involved in CD. The purpose of this effort was to decipher the molecules involved in contributing to CD. These gene interaction networks are very valuable tools in the sense that they facilitate extension of the map of gene products that could represent potential drug targets for CD.

[0257] Expression Studies

[0258] In order to determine the expression patterns for genes, relevant information was first extracted from public databases. The UniGene database, for example, contains information regarding the tissue source for ESTs and cDNAs contributing to individual clusters. This information was extracted and summarized to provide an indication in which tissues the gene was expressed. Particular emphasis was placed on annotating the tissue source for bona fide ESTs, since many ESTs mapped to Unigene clusters are artifactual. In addition, SAGE and microarray data, also curated at NCBI (Gene Expression Omnibus), provided information on expression profiles for individual genes. Particular emphasis was placed on identifying genes that were expressed in tissues known to be involved in the pathophysiology of Crohn's disease, e.g. intestinal and immune system tissues.

[0259] Polymorphism Analysis

[0260] Polymorphisms identified in candidate genes, including those from the public domain as well as those identified by sequencing candidate genes and regions, are evaluated for potential function. Initially, polymorphisms are examined for potential impact upon encoded proteins. If the protein is a member of a gene family with reported 3-dimensional structural information, this information is used to predict the location of the polymorphism with respect to protein structure. This information provided insight into the potential role of polymorphisms in altering protein or ligand interactions, as well as suitability as a drug target. In a second phase of analysis we evaluate the potential role of polymorphisms in other biological phenomena, including regulation of transcription, splicing and mRNA stability, etc. There are many examples of the functional involvement of naturally occurring polymorphisms in these processes. As part of this analysis, polymorphisms located in promoter or other regulatory elements, canonical splice sites, exonic and intronic splice enhancers and repressors, conserved noncoding sequences and UTRs are localized.

### Example 5

### SNP and Polymorphism Discovery (SNPD)

[0261] Candidate regions are selected for sequencing in order to identify all polymorphisms. In cases where the critical interval, identified by fine mapping, is relatively small (˜50 kb), the entire region, including all introns, is sequenced to identify polymorphisms. In situations where the region is large (>50 kb), candidate genes are prioritized for sequencing, and/or only functional gene elements (promoters, exons and splice sites) are sequenced.

[0262] The samples sequenced are selected according to which haplotypes contribute to the association signal observed in the region. The purpose is to select a set of samples that covered all the major haplotypes in the given region. Each major haplotype must be present in a few copies. The first step therefore consisted of determining the major haplotypes in the region to be sequenced.

[0263] Once a region is defined with the two boundary markers, all the markers used in fine mapping that are located within the region are used to determine the major haplotypes. Long haplotypes covering the whole region are thus inferred using the middle marker as an anchor. The results included two series of haplotype themes that define the major haplotypes, comparing the cases and the controls. This exercise is repeated using an anchor in the peripheral regions to ensure that major haplotype subsets that are not anchored at the original middle marker are not missed.

[0264] Once the major haplotypes are determined as described above, appropriate genomic DNA samples are selected such that each major haplotype and haplotype subset were represented in at least two to four copies.

[0265] The sequencing protocol included the following steps, once a region was delimited:

[0266] 1. Primer Design

[0267] The design of the primers is performed using a proprietary primer design tool. A primer quality control step was included in the primer design process. Primers that successfully passed the control quality process are synthesized by Integrated DNA Technologies (IDT). The sense and anti-sense oligos are separated such that the sense oligos were placed on one plate in the same position as their anti-sense counterparts on another plate. Two additional plates are created from each storage plate, one for use in PCR and the other for sequencing. For PCR, the sense and anti-sense oligos of the same pair are combined in the same well to achieve a final concentration of 1.5 μM for each oligonucleotide.

[0268] 2. PCR Optimization

[0269] PCR conditions are optimized by testing a variety of conditions that included varying salt concentrations and temperatures, as well as including various additives. PCR products are checked for robust amplification and minimal background by agarose gel electrophoresis.

[0270] 3. PCR on Selected Samples

[0271] PCR products used for sequencing are amplified using the conditions chosen during optimization. The PCR products are purified free of salts, dNTPs and unincorporated primers by use of a MultiScreen PCR384 filter plate manufactured by Millipore. Following PCR, the amplicons are quantified by use of a lambda/Hind III standard curve. This is done to ensure that the quantity of PCR product required for sequencing had been generated. The raw data is measured against the standard curve data in Excel by use of a macro.

[0272] 4. Sequencing

[0273] Sequencing of PCR products is performed by DNA Landmarks using ABI 3730 capillary sequencing instruments.

[0274] 5. Sequence Analysis

[0275] The ABI Prism SeqScape software (Applied Biosystems) is used for SNP identification. The chromatogram trace files are imported into a SeqScape sequencing project and the base calling is automatically performed. Sequences are then aligned and compared to each other using the SeqScape program. The base calling is checked manually, base by base; editing was performed if needed.

### Example 6

### Ultra Fine Mapping (UFM)

[0276] Once polymorphisms are identified by sequencing efforts as described in Example 5, additional genotyping of all newly found polymorphisms is performed on the samples used in the fine mapping study. Various types of genotyping assays may need to be utilized based on the type of polymorphism identified (i.e., SNP, indel, microsatellite). The assay type can be, but is not restricted to, Sentrix Assay Matrix on Illumina BeadStations, microsatellite on MegaBACE, SNP on ABI or Orchid. The frequencies of genotypes and haplotypes in cases and controls are analyzed in a similar manner as the GWS data. By examining all SNPs in a region, polymorphisms are identified that increase an individual's susceptibility to Crohn's disease. The result of ultra-fine mapping is to identify the polymorphism that is most associated with disease phenotype as part of the search for the actual DNA polymorphism that confers susceptibility to disease.

[0277] All publications, patents and patent applications mentioned in the specification and reference list are herein incorporated by reference in their entirety for all purposes. Various modifications and variations of the described method and system of the invention will be apparent to those skilled in the art without departing from the scope and spirit of the invention. Although the invention has been described in connection with specific preferred embodiments, it should be understood that the invention as claimed should not be unduly limited to such specific embodiments. Indeed, various modifications of the described modes for carrying out the invention that are obvious to those skilled in molecular biology, genetics, or related fields are intended to be within the scope of the following claims.

[0278] The practice of the present invention will employ, unless otherwise indicated, conventional techniques of cell biology, cell culture, molecular biology, transgenic biology, microbiology, recombinant DNA, and immunology, which are within the skill of the art. Such techniques are explained fully in the literature. See, for example, Molecular Cloning A Laboratory Manual, 2nd Ed., ed. by Sambrook, Fritsch and Maniatis (Cold Spring Harbor Laboratory Press: 1989); DNA Cloning, Volumes I and H (D. N. Glover ed., 4); Oligonucleotide Synthesis (M. J. Gait ed., 1984); Mullis et al. U.S. Pat. No. 4,683,195; Nucleic Acid Hybridization (B. D. Hames & S. J. Higgins eds. 1984); Transcription And Translation (B. D. Haines & S. J. Higgins eds. 1984); Culture Of Animal Cells (R. 1. Freshney, Alan R. Liss, Inc., 1987); Immobilized Cells And Enzymes (IRL Press, 1986); B. Perbal, A Practical Guide To Molecular Cloning (1984); the treatise, Methods In Enzymology (Academic Press, Inc., N.Y.); Gene Transfer Vectors For Mammalian Cells (J. H. Miller and M. P. Calos eds., 1987, Cold Spring Harbor Laboratory); Methods In Enzymology, Vols. 154 and 155 (Wu et al. eds.), Immunochemical Methods In Cell And Molecular Biology (Mayer and Walker, eds., Academic Press, London, 1987); Handbook Of Experimental Immunology, Volumes I-IV (D. M. Weir and C. C. Blackwell, eds., 1986); Manipulating the Mouse Embryo, (Cold Spring Harbor Laboratory Press, Cold Spring Harbor, N.Y., 1986).

### REFERENCES

[0279] Aaltonen, J., M. P. Laitinen, et al. (1999). “Human growth differentiation factor 9 (GDF-9) and its novel homolog GDF-9B are expressed in oocytes during early folliculogenesis.” J Clin Endocrinol Metab. 84(8): 2744-50.
[0280] Abbott, D. W., A. Wilkins, et al. (2004). “The Crohn's Disease Protein, NOD2, Requires RIP2 in Order to Induce Ubiquitinylation of a Novel Site on NEMO.” Curr Biol 14(24): 2217-27.
[0281] Adcock, I. M., M. J. Peters, et al. (1993). “Transcription factor interactions in human lung.” Biochem Soc Trans 21 (Pt 3)(3): 277S.
[0282] Agnholt et al (2004). Increased production of granulocyte-macrophage colony-stimulating factor in Crohn's disease—a possible target for infliximab treatment. Eur J Gastroenterol Hepatol. 16(7):649-55.
[0283] Aithal, G. P., C. P. Day, et al. (2001). “Association of single nucleotide polymorphisms in the interleukin-4 gene and interleukin-4 receptor gene with Crohn's disease in a British population.” Genes Immun 2(1): 44-7.
[0284] Alvarado-Kristensson, M. and T. Andersson (2005). “Protein phosphatase 2A regulates apoptosis in neutrophils by dephosphorylating both p38 MAPK and its substrate caspase 3.” J Biol Chem. 280(7): 6238-44.
[0285] Alwine, J. C., D. J. Kemp, et al. (1977). “Method for detection of specific RNAs in agarose gels by transfer to diazobenzyloxymethyl-paper and hybridization with DNA probes.” Proc Natl Acad Sci USA 74(12): 5350-4.
[0286] Anderson, W. F. (1992). “Human gene therapy.” Science 256(5058): 808-13.
[0287] Andres, P. G. and L. S. Friedman (1999). “Epidemiology and the natural course of inflammatory bowel disease.” Gastroenterol Clin North Am 28(2): 255-81, vii.
[0288] Angeloni, D., F. M. Duh, et al. (2003). “C to A single nucleotide polymorphism in intron 18 of the human MST1R (RON) gene that maps at 3p21.3.” Mol Cell Probes. 17(2-3): 55-7.
[0289] Aoki et al (1995). A novel gene, Translin, encodes a recombination hotspot binding protein associated with chromosomal translocations. Nat Genet. 10(2):167-74.
[0290] Bai, R. Y., C. Koester, et al. (2002). “SMIF, a Smad4-interacting protein that functions as a co-activator in TGFbeta signalling.” Nat Cell Biol. 4(3): 181-90.
[0291] Barany, F. (1991). “Genetic disease detection and DNA amplification using cloned thermostable ligase.” Proc Natl Acad Sci USA 88(1): 189-93.
[0292] Barre, F. X., S. Ait-Si-Ali, et al. (2000). “Unambiguous demonstration of triple-helix-directed gene modification.” Proc Natl Acad Sci USA 97(7): 3084-8.
[0293] Becker, C., S. Wirtz, et al. (2003). “Constitutive p40 promoter activation and IL-23 production in the terminal ileum mediated by dendritic cells.” J Clin Invest 112(5): 693-706.
[0294] Bednarek, A. K., C. L. Keck-Waggoner, et al., (2001). “WWOX, the FRA16D gene, behaves as a suppressor of tumor growth.” Cancer Res 61(22): 8068-73.
[0295] Behl, C. (1997). “Amyloid beta-protein toxicity and oxidative stress in Alzheimer's disease.” Cell Tissue Res 290(3): 471-80.
[0296] Belkhiri, A., A. Zaika, et al. (2005). “Darpp-32: a novel antiapoptotic gene in upper gastrointestinal carcinomas.” Cancer Res. 65(15): 6583-92.
[0297] Bender, C. F., M. L. Sikes, et al. (2002). “Cancer predisposition and hematopoietic failure in Rad50(S/S) mice.” Genes Dev. 16(17): 2237-51.
[0298] Bespalova, I. N., G. Van Camp, et al. (2001). “Mutations in the Wolfram syndrome 1 gene (WFS1) are a common cause of low frequency sensorineural hearing loss.” Hum Mol Genet 10(22): 2501-8.
[0299] Bielenberg, D. R., Y. Hida, et al. (2004). “Semaphorin 3F, a chemorepulsant for endothelial cells, induces a poorly vascularized, encapsulated, nonmetastatic tumor phenotype.” J Clin Invest. 114(9): 1260-71.
[0300] Bjursten, M., P. W. Bland, et al. (2005). “Long-term treatment with anti-alpha 4 integrin antibodies aggravates colitis in G alpha i2-deficient mice.” Eur J Immunol. 35(8): 2274-83.
[0301] Blanchard, C., S. Durual, et al. (2004). “IL-4 and IL-13 up-regulate intestinal trefoil factor expression: requirement for STAT6 and de novo protein synthesis.” J Immunol 172(6): 3775-83.
[0302] Blaser, S., J. Horn, et al. (2004). “The novel human platelet septin SEPT8 is an interaction partner of SEPT4.” Thromb Haemost. 91(5): 959-66.
[0303] Bloch, K. D., J. R. Wolfram, et al. (1995). “Three members of the nitric oxide synthase II gene family (NOS2A, NOS2B, and NOS2C) colocalize to human chromosome 17.” Genomics 27(3): 526-30.
[0304] Boengler, K., F. Pipp, et al. (2003). “The ankyrin repeat containing SOCS box protein 5: a novel protein associated with arteriogenesis.” Biochem Biophys Res Commun 302(1): 17-22.
[0305] Boren, J., A. Ramos-Montoya, et al. (2006). “In situ localization of transketolase activity in epithelial cells of different rat tissues and subcellularly in liver parenchymal cells.” J Histochem Cytochem. 54(2): 191-9.
[0306] Bouma, G. and W. Strober (2003). “The immunological and genetic basis of inflammatory bowel disease.” Nat Rev Immunol 3(7): 521-33.
[0307] Bourgeois, S, and D. Labuda (2004). “Dynamic allele-specific oligonucleotide hybridization on solid support.” Anal Biochem 324(2): 309-11.
[0308] Brightbill, H. D., D. H. Libraty, et al. (1999). “Host defense mechanisms triggered by microbial lipoproteins through toll-like receptors.” Science 285(5428): 732-6.
[0309] Brodbeck, J., A. Davies, et al. (2002). “The ducky mutation in Cacna2d2 results in altered Purkinje cell morphology and is associated with the expression of a truncated alpha 2 delta-2 protein with abnormal function.” J Biol Chem. 277(10): 7684-93.
[0310] Brown, J. L., L. Stowers, et al. (1996). “Human Step20 homologue hPAK1 links GTPases to the JNK MAP kinase pathway.” Curr Biol 6(5): 598-605.
[0311] Browning, C. M., M. J. Smith, et al. (2001). “Human GLI-2 is a tat activation response element-independent Tat cofactor.” J Virol 75(5): 2314-23.
[0312] Bulavin, D. V., C. Phillips, et al. (2004). “Inactivation of the Wip1 phosphatase inhibits mammary tumorigenesis through p38 MAPK-mediated activation of the p16(Ink4a)-p19(Arf) pathway.” Nat Genet. 36(4): 343-50.
[0313] Cai, D., L. K. Clayton, et al. (1999). “AND-34, a novel p130Cas-binding thymic stromal cell protein regulated by adhesion and inflammatory cytokines.” J Immunol. 163(4): 2104-12.
[0314] Cai, D., K. N. Felekkis, et al. (2003). “The GDP exchange factor AND-34 is expressed in B cells, associates with HEF1, and activates Cdc42.” J. Immunol. 170(2): 969-78.
[0315] Cale, J. M., C. E. Shaw, et al. (1998). “Optimization of a reverse transcription-polymerase chain reaction (RT-PCR) mass assay for low-abundance mRNA.” Methods Mol Biol 105: 351-71.
[0316] Chamouard, P., L. Grunebaum, et al. (1995). “Prothrombin fragment 1+2 and thrombin-antithrombin III complex as markers of activation of blood coagulation in inflammatory bowel diseases.” Eur J Gastroenterol Hepatol. 7(12): 1183-8.
[0317] Chang, N. S., N. Pratt, et al. (2001). “Hyaluronidase induction of a WW domain-containing oxidoreductase that enhances tumor necrosis factor cytotoxicity.” J Biol Chem 276(5): 3361-70.
[0318] Chavany, C., C. Vicario-Abejon, et al. (1998). “Transgenic mice for interleukin 3 develop motor neuron degeneration associated with autoimmune reaction against spinal cord motor neurons.” Proc Natl Acad Sci USA 95(19): 11354-9.
[0319] Chen, X., L. Levine, et al. (1999). “Fluorescence polarization in homogeneous nucleic acid analysis.” Genome Res 9(5): 492-8.
[0320] Chen, S., X. Yin, et al. (2003). “The C-terminal kinase domain of the p34cdc2-related PITSLRE protein kinase (p110C) associates with p21-activated kinase 1 and inhibits its activity during anoikis.” J Biol Chem 278(22): 20029-36. Epub 2003 Mar. 6.
[0321] Chen, Q., L. Rabach, et al. (2005). “IL-11 receptor alpha in the pathogenesis of IL-13-induced inflammation and remodeling.” J Immunol 174(4): 2305-13.
[0322] Chien, C. T., P. L. Bartel, et al. (1991). “The two-hybrid system: a method to identify and clone genes for proteins that interact with a protein of interest.” Proc Natl Acad Sci USA 88(21): 9578-82.
[0323] Choi, J., B. Nannenga, et al. (2002). “Mice deficient for the wild-type p53-induced phosphatase gene (Wip1) exhibit defects in reproductive organs, immune function, and cell cycle control.” Mol Cell Biol 22(4): 1094-105.
[0324] Clavell, M., H. Correa-Gracian, et al. (2000). “Detection of interferon regulatory factor-1 in lamina propria mononuclear cells in Crohn's disease.” J Pediatr Gastroenterol Nutr. 30(1): 43-7.
[0325] Cobrin, G. M. and M. T. Abreu (2005). “Defects in mucosal immunity leading to Crohn's disease.” Immunol Rev. 206: 277-95.
[0326] Cohen, A. S., D. L. Smisek, et al. (1996). “Emerging technologies for sequencing antisense oligonucleotides: capillary electrophoresis and mass spectrometry.” Adv Chromatogr 36: 127-62.
[0327] Cohn, R. D., M. D. Henry, et al. (2002). “Disruption of DAG1 in differentiated skeletal muscle reveals a role for dystroglycan in muscle regeneration.” Cell 110(5): 639-48.
[0328] Combaret, L., O. A. Adegoke, et al. (2005). “USP19 is a ubiquitin-specific protease regulated in rat skeletal muscle during catabolic states.” Am J Physiol Endocrinol Metab. 288(4): E693-700.
[0329] Costello et al (2005). Dissection of the inflammatory bowel disease transcriptome using genome-wide cDNA microarrays. PLoS Med. August; 2(8):e199.
[0330] Cotton, R. G., N. R. Rodrigues, et al. (1988). “Reactivity of cytosine and thymine in single-base-pair mismatches with hydroxylamine and osmium tetroxide and its application to the study of mutations.” Proc Natl Acad Sci USA 85(12): 4397-401.
[0331] Couve, A., S. Restituito, et al. (2004). “Marlin-1, a novel RNA-binding protein associates with GABA receptors.” J Biol Chem 279(14): 13934-43. Epub 2004 Jan. 12.
[0332] Couzens, M., M. Liu, et al. (2000). “Peptide YY-2 (PYY2) and pancreatic polypeptide-2 (PPY2): species-specific evolution of novel members of the neuropeptide Y gene family.” Genomics 64(3): 318-23.
[0333] Cronin, M. T., R. V. Fucini, et al. (1996). “Cystic fibrosis mutation detection by hybridization to light-generated DNA probe arrays.” Hum Mutat 7(3): 244-55.
[0334] Croucher, P. J., S. Mascheretti, et al. (2003). “Lack of association between the C3435T MDR1 gene polymorphism and inflammatory bowel disease in two independent Northern European populations.” Gastroenterology 125(6): 1919-20; author reply 1920-1.
[0335] Cuppen, E., M. van Ham, et al. (2000). “The zyxin-related protein TRIP6 interacts with PDZ motifs in the adaptor protein RIL and the protein tyrosine phosphatase PTP-BL.” Eur J Cell Biol. 79(4): 283-93.
[0336] Dalwadi, H., B. Wei, et al. (2003). “B cell developmental requirement for the G alpha i2 gene.” J Immunol. 170(4): 1707-15.
[0337] Dean, F. B., S. Hosono, et al. (2002). “Comprehensive human genome amplification using multiple displacement amplification.” Proc Natl Acad Sci USA 99(8): 5261-6.
[0338] del Peso, L., R. Hernandez-Alcoceba, et al. (1997). “Rho proteins induce metastatic properties in vivo.” Oncogene 15(25): 3047-57.
[0339] Dentelli, P., A. Rosso, et al. (2004). “IL-3 affects endothelial cell-mediated smooth muscle cell recruitment by increasing TGF beta activity: potential role in tumor vessel stabilization.” Oncogene 23(9): 1681-92.
[0340] DeSalle, L. M., E. Latres, et al. (2001). “The de-ubiquitinating enzyme Unp interacts with the retinoblastoma protein.” Oncogene. 20(39): 5538-42.
[0341] Deschenes, C., L. Alvarez, et al. (2004). “The nucleocytoplasmic shuttling of E2F4 is involved in the regulation of human intestinal epithelial cell proliferation and differentiation.” J Cell Physiol. 199(2): 262-73.
[0342] Diefenbach, A., H. Schindler, et al. (1999). “Requirement for type 2 NO synthase for IL-12 signaling in innate immunity.” Science 284(5416): 951-5.
[0343] Dijkstra, G., A. J. Zandvoort, et al. (2002). “Increased expression of inducible nitric oxide synthase in circulating monocytes from patients with active inflammatory bowel disease.” Scand J Gastroenterol. 37(5): 546-54.
[0344] Dillon, N. (1993). “Regulating gene expression in gene therapy.” Trends Biotechnol 11(5): 167-73.
[0345] Ding, Z., L. L. Gillespie, et al. (2003). “Human MI-ER1 alpha and beta function as transcriptional repressors by recruitment of histone deacetylase 1 to their conserved ELM2 domain.” Mol Cell Biol. 23(1): 250-8.
[0346] Donato, J. L., J. Ko, et al. (2002). “Human HTm4 is a hematopoietic cell cycle regulator.” J Clin Invest. 109(1): 51-8.
[0347] Donovan, F. M., C. J. Pike, et al. (1997). “Thrombin induces apoptosis in cultured neurons and astrocytes via a pathway requiring tyrosine kinase and RhoA activities.” J Neurosci 17(14): 5316-26.
[0348] Dranoff, G., R. Soiffer, et al. (1997). “A phase I study of vaccination with autologous, irradiated melanoma cells engineered to secrete human granulocyte-macrophage colony stimulating factor.” Hum Gene Ther 8(1): 111-23.
[0349] Drmanac, R., S. Drmanac, et al. (2002). “Sequencing by hybridization (SBH): advantages, achievements, and opportunities.” Adv Biochem Eng Biotechnol 77: 75-101.
[0350] Dryja, T. P., L. B. Hahn, et al. (1996). “Missense mutation in the gene encoding the alpha subunit of rod transducin in the Nougaret form of congenital stationary night blindness.” Nat Genet. 13(3): 358-60.
[0351] Ducale, A. E., S. I. Ward, et al. (2005). “Regulation of hyaluronan synthase-2 expression in human intestinal mesenchymal cells: mechanisms of interleukin-1beta-mediated induction.” Am J Physiol Gastrointest Liver Physiol. 289(3): G462-70.
[0352] Duerr, R. H. (2002). “The genetics of inflammatory bowel disease.” Gastroenterol Clin North Am 31(1): 63-76.
[0353] Dunbar, C. E., M. Cottler-Fox, et al. (1995). “Retrovirally marked CD34-enriched peripheral blood and bone marrow cells contribute to long-term engraftment after autologous transplantation.” Blood 85(11): 3048-57.
[0354] Dusetti, N. J., Y. Jiang, et al. (2002). “Cloning and expression of the rat vacuole membrane protein 1 (VMP1), a new gene activated in pancreas with acute pancreatitis, which promotes vacuole formation.” Biochem Biophys Res Commun 290(2): 641-9.
[0355] Elez, R., A. Piiper, et al. (2000). “Polo-like kinase1, a new target for antisense tumor therapy.” Biochem Biophys Res Commun 269(2): 352-6.
[0356] Ellem, K. A., M. G. O'Rourke, et al. (1997). “A case report: immune responses and clinical course of the first human use of granulocyte/macrophage-colony-stimulating-factor-transduced autologous melanoma cells for immunotherapy.” Cancer Immunol Immunother 44(1): 10-20.
[0357] Esaki, M., M. Furuse, et al. (1999). “Polymorphism of heat-shock protein gene HSP70-2 in Crohn disease: possible genetic marker for two forms of Crohn disease.” Scand J Gastroenterol 34(7): 703-7.
[0358] Esworthy R. S., R. Aranda, et. (2001). “Mice with combined disruption of Gpx1 and Gpx2 genes have colitis.” Am J Physiol Gastrointest Liver Physiol. 281 (3):G848-55. PMID: 11518697.
[0359] Evans, B. E., K. E. Rittle, et al. (1987). “Design of nonpeptidal ligands for a peptide receptor: cholecystokinin antagonists.” J Med Chem 30(7): 1229-39.
[0360] Fackler, O. T. and B. M. Peterlin (2000). “Endocytic entry of HIV-1.” Curr Biol 10(16): 1005-8.
[0361] Fakhrai-Rad, H., J. Zheng, et al. (2004). “SNP discovery in pooled samples with mismatch repair detection.” Genome Res 14(7): 1404-12.
[0362] Fan, J. and A. B. Malik (2003). “Toll-like receptor-4 (TLR4) signaling augments chemokine-induced neutrophil migration by modulating cell surface expression of chemokine receptors.” Nat Med 9(3): 315-21.
[0363] Farmer, R. G., G. Whelan, et al. (1985). “Long-term follow-up of patients with Crohn's disease. Relationship between the clinical pattern and prognosis.” Gastroenterology 88(6): 1818-25.
[0364] Fechir, M., K. Linker, et al. (2005). “The RNA binding protein TIAR is involved in the regulation of human iNOS expression.” Cell Mol Biol (Noisy-le-grand). 51(3): 299-305.
[0365] Fidder, H. H., S. Olschwang, et al. (2003). “Association between mutations in the CARD15 (NOD2) gene and Crohn's disease in Israeli Jewish patients.” Am J Med Genet 121A(3): 240-4.
[0366] Fields, S, and O, Song (1989). “A novel genetic system to detect protein-protein interactions.” Nature 340(6230): 245-6.
[0367] Frank-Kamenetskii, M. D. and S. M. Mirkin (1995). “Triplex DNA structures.” Annu Rev Biochem 64: 65-95.
[0368] Freeman, W. M., S. J. Walker, et al. (1999). “Quantitative RT-PCR: pitfalls and potential.” Biotechniques 26(1): 112-22, 124-5.
[0369] Frolova, E. I., G. M. Dolganov, et al. (1991). “Linkage mapping of the human CSF2 and IL3 genes.” Proc Natl Acad Sci USA 88(11): 4821-4.
[0370] Fujita, Y., Y. Ezura, et al. (2004). “Hypercholesterolemia associated with splice-junction variation of inter-alpha-trypsin inhibitor heavy chain 4 (ITIH4) gene.” J Hum Genet 49(1): 24-8.
[0371] Fukushige, S., K. Matsubara, et al. (1986). “Localization of a novel v-erbB-related gene, c-erbB-2, on human chromosome 17 and its amplification in a gastric cancer cell line.” Mol Cell Biol 6(3): 955-8.
[0372] Fukushima, T., J. M. Zapata, et al. (2006). “Critical function for SIP, a ubiquitin E3 ligase component of the beta-catenin degradation pathway, for thymocyte development and G1 checkpoint.” Immunity. 24(1): 29-39.
[0373] Gainetdinov, R. R., L. M. Bohn, et al. (1999). “Muscarinic supersensitivity and impaired receptor desensitization in G protein-coupled receptor kinase 5-deficient mice.” Neuron. 24(4): 1029-36.
[0374] Gan, B., Z. K. Melkoumian, et al. (2005). “Identification of FIP200 interaction with the TSC1-TSC2 complex and its role in regulation of cell size control.” J Cell Biol. 170(3): 379-89.
[0375] Gary-Gouy, H., J. Harriague, et al. (2002). “CD5-negative regulation of B cell receptor signaling pathways originates from tyrosine residue Y429 outside an immunoreceptor tyrosine-based inhibitory motif.” J Immunol. 168(1): 232-9.
[0376] Gasparini, P., A. Bonizzato, et al. (1992). “Restriction site generating-polymerase chain reaction (RG-PCR) for the probeless detection of hidden genetic variation: application to the study of some common cystic fibrosis mutations.” Mol Cell Probes 6(1): 1-7.
[0377] Geyer, M., H. Yu, et al. (2002). “Subunit H of the V-ATPase binds to the medium chain of adaptor protein complex 2 and connects Nef to the endocytic machinery.” J Biol Chem 277(32): 28521-9. Epub 2002 May 24.
[0378] Giachino, D., M. M. van Duist, et al. (2004). “Analysis of the CARD15 variants R702W, G908R and L1007fs in Italian IBD patients.” Eur J Hum Genet 12(3): 206-12.
[0379] Gibbs, R. A., P. N. Nguyen, et al. (1989). “Detection of single DNA base differences by competitive oligonucleotide priming.” Nucleic Acids Res 17(7): 2437-48.
[0380] Girardin, S. E., I. G. Boneca, et al. (2003). “Nod2 is a general sensor of peptidoglycan through muramyl dipeptide (MDP) detection.” J Biol Chem 278(11): 8869-72.
[0381] Girardin, S. E., J. P. Hugot, et al. (2003). “Lessons from Nod2 studies: towards a link between Crohn's disease and bacterial sensing.” Trends Immunol 24(12): 652-8.
[0382] Griffin, H. G. and A. M. Griffin (1993). “DNA sequencing. Recent innovations and future trends.” Appl Biochem Biotechnol 38(1-2): 147-59.
[0383] Grossman, P. D., W. Bloch, et al. (1994). “High-density multiplex detection of nucleic acid sequences: oligonucleotide ligation assay and sequence-coded separation.” Nucleic Acids Res 22(21): 4527-34.
[0384] Guatelli, J. C., K. M. Whitfield, et al. (1990). “Isothermal, in vitro amplification of nucleic acids by a multienzyme reaction modeled after retroviral replication.” Proc Natl Acad Sci USA 87(5): 1874-8.
[0385] Guatelli, J. C., K. M. Whitfield, et al. (1990). “Isothermal, in vitro amplification of nucleic acids by a multienzyme reaction modeled after retroviral replication.” Proc Natl Acad Sci USA 87(19): 7797.
[0386] Hafner, G. J., I. C. Yang, et al. (2001). “Isothermal amplification and multimerization of DNA by Bst DNA polymerase.” Biotechniques 30(4): 852-6, 858, 860 passim.
[0387] Hampe, J., J. Grebe, et al. (2002). “Association of NOD2 (CARD 15) genotype with clinical course of Crohn's disease: a cohort study.” Lancet 359(9318): 1661-5.
[0388] Harada, M., Y. Qin, et al. (2005). “G-CSF prevents cardiac remodeling after myocardial infarction by activating the Jak-Stat pathway in cardiomyocytes.” Nat Med. 11(3): 305-11.
[0389] Hardenbol, P., J. Baner, et al. (2003). “Multiplexed genotyping with sequence-tagged molecular inversion probes.” Nat Biotechnol 21(6): 673-8. Epub 2003 May 5.
[0390] Hardwick, J. C., G. R. Van Den Brink, et al. (2004). “Bone morphogenetic protein 2 is expressed by, and acts upon, mature epithelial cells in the colon.” Gastroenterology. 126(1): 111-21.
[0391] Hartman, M. E., J. C. O'Connor, et al. (2004). “Insulin receptor substrate-2-dependent interleukin-4 signaling in macrophages is impaired in two models of type 2 diabetes mellitus.” J Biol Chem 279(27): 28045-50.
[0392] Hasegawa, T., A. Yagi, et al. (2000). “Interaction between GADD34 and kinesin superfamily, KIF3A.” Biochem Biophys Res Commun. 267(2): 593-6.
[0393] Hayashi, K. (1992). “PCR-SSCP: a method for detection of mutations.” Genet Anal Tech Appl 9(3): 73-9.
[0394] Heintz, K., K. Palme, et al. (1992). “The Ncypt1 gene from Neurospora crassa is located on chromosome 2: molecular cloning and structural analysis.” Mol Gen Genet 235(2-3): 413-21.
[0395] Hellevuo, K., M. Yoshimura, et al. (1993). “A novel adenylyl cyclase sequence cloned from the human erythroleukemia cell line.” Biochem Biophys Res Commun. 192(1): 311-8.
[0396] Helms, C., L. Cao, et al. (2003). “A putative RUNX1 binding site variant between SLC9A3R1 and NAT9 is associated with susceptibility to psoriasis.” Nat Genet 35(4): 349-56.
[0397] Henry, M. D. and K. P. Campbell (1998). “A role for dystroglycan in basement membrane assembly.” Cell. 95(6): 859-70.
[0398] Hermonat, P. L. and N. Muzyczka (1984). “Use of adeno-associated virus as a mammalian DNA cloning vector: transduction of neomycin resistance into mammalian tissue culture cells.” Proc Natl Acad Sci USA 81(20): 6466-70.
[0399] Hirai, H., K. Tanaka, et al. (2002). “Cutting edge: agonistic effect of indomethacin on a prostaglandin D2 receptor, CRTH2.” J Immunol. 168(3): 981-5.
[0400] Hisamatsu, T., M. Suzuki, et al. (2003). “Interferon-gamma augments CARD4/NOD1 gene and protein expression through interferon regulatory factor-1 in intestinal epithelial cells.” J Biol Chem. 278(35): 32962-8.
[0401] Hobbs, M. R., V. Udhayakumar, et al. (2002). “A new NOS2 promoter polymorphism associated with increased nitric oxide production and protection from severe malaria in Tanzanian and Kenyan children.” Lancet 360(9344): 1468-75.
[0402] Hoffman, J., F. Kuhnert, et al. (2004). “Wnts as essential growth factors for the adult small intestine and colon.” Cell Cycle. 3(5): 554-7.
[0403] Hogrefe, H. H., R. L. Mullinax, et al. (1993). “A bacteriophage lambda vector for the cloning and expression of immunoglobulin Fab fragments on the surface of filamentous phage.” Gene 128(1): 119-26.
[0404] Hoogendoorn, B., N. Norton, et al. (2000). “Cheap, accurate and rapid allele frequency estimation of single nucleotide polymorphisms by primer extension and DHPLC in DNA pools.” Hum Genet 107(5): 488-93.
[0405] Hsu, I. C., Q. Yang, et al. (1994). “Detection of DNA point mutations with DNA mismatch repair enzymes.” Carcinogenesis 15(8): 1657-62.
[0406] Hu, W., F. Yin, et al. (2002). “[Effect of human calcyclin binding protein encoding gene on development of multiple drug resistance in gastric cancer].” Zhonghua Zhong Liu Za Zhi. 24(5): 426-9.
[0407] Hugot, J. P., M. Chamaillard, et al. (2001). “Association of NOD2 leucine-rich repeat variants with susceptibility to Crohn's disease.” Nature 411(6837): 599-603.
[0408] Hugot, J. P. and G. Thomas (1998). “Genome-wide scanning in inflammatory bowel diseases.” Dig Dis 16(6): 364-9.
[0409] Hunt, T. W., T. A. Fields, et al. (1996). “RGS10 is a selective activator of G alpha i GTPase activity.” Nature. 383(6596): 175-7.
[0410] Hutchings, N. J., N. Clarkson, et al. (2003). “Linking the T cell surface protein CD2 to the actin-capping protein CAPZ via CMS and CIN85.” J Biol Chem. 278(25): 22396-403.
[0411] Ince-Dunn, G., B. J. Hall, et al. (2006). “Regulation of thalamocortical patterning and synaptic maturation by NeuroD2.” Neuron. 49(5): 683-95.
[0412] Inostroza, J. A., F. H. Mermelstein, et al. (1992). “Dr1, a TATA-binding protein-associated phosphoprotein and inhibitor of class II gene transcription.” Cell. 70(3): 477-89.
[0413] Irvine, E. J. (2004). “Patients' fears and unmet needs in inflammatory bowel disease.” Aliment Pharmacol Ther 20 Suppl 4: 54-9.
[0414] Ishibashi, K., M. Suzuki, et al. (2001). “Identification of a new multigene four-transmembrane family (MS4A) related to CD20, HTm4 and beta subunit of the high-affinity IgE receptor.” Gene 264(1): 87-93.
[0415] Ishigaki, S., J. Niwa, et al. (2000). “Two novel genes, human neugrin and mouse m-neugrin, are upregulated with neuronal differentiation in neuroblastoma cells.” Biochem Biophys Res Commun 279(2): 526-33.
[0416] Ishii, M., H. Fei, et al. (2003). “Targeted disruption of GPR7, the endogenous receptor for neuropeptides B and W, leads to metabolic defects and adult-onset obesity.” Proc Natl Acad Sci USA 100(18): 10540-5. Epub 2003 Aug. 18.
[0417] Ishitani, T., S. Kishida, et al. (2003). “The TAK1-NLK mitogen-activated protein kinase cascade functions in the Wnt-5a/Ca(2+) pathway to antagonize Wnt/beta-catenin signaling.” Mol Cell Biol 23(1): 131-9.

[0418] Itoh et al (2001). “Decreased Bax expression by mucosal T cells favours resistance to apoptosis in Crohn's disease.” Gut. 49(1):35-41.
[0419] Ivanov, A. I., A. Nusrat, et al. (2004). “The epithelium in inflammatory bowel disease: potential role of endocytosis of junctional proteins in barrier disruption.” Novartis Found Symp 263: 115-24.
[0420] Jan, Y., M. Matter, et al. (2004). “A mitochondrial protein, Bit1, mediates apoptosis regulated by integrins and Groucho/TLE corepressors.” Cell 116(5): 751-62.
[0421] Jandrig et al (2004). ST18 is a breast cancer tumor suppressor gene at human chromosome 8q11.2. Oncogene. 23(57):9295-302.
[0422] Jiang, P. H., Y. Motoo, et al. (2004). “Expression of vacuole membrane protein 1 (VMP1) in spontaneous chronic pancreatitis in the WBN/Kob rat.” Pancreas 29(3): 225-30.
[0423] Jobs, M., W. M. Howell, et al. (2003). “DASH-2: flexible, low-cost, and high-throughput SNP genotyping by dynamic allele-specific hybridization on membrane arrays.” Genome Res 13(5): 916-24.
[0424] Johann, S. V., J. J. Gibbons, et al. (1992). “GLVR1, a receptor for gibbon ape leukemia virus, is homologous to a phosphate permease of Neurospora crassa and is expressed at high levels in the brain and thymus.” J Virol 66(3): 1635-40.
[0425] Johannesen, J., A. Pie, et al. (2001). “Linkage of the human inducible nitric oxide synthase gene to type 1 diabetes.” J Clin Endocrinol Metab 86(6): 2792-6.
[0426] Johnson, E. N. and K. M. Druey (2002). “Heterotrimeric G protein signaling: role in asthma and allergic inflammation.” J Allergy Clin Immunol. 109(4): 592-602.
[0427] Kaarniranta, K., T. Ryhanen, et al. (2005). “Geldanamycin activates Hsp70 response and attenuates okadaic acid-induced cytotoxicity in human retinal pigment epithelial cells.” Brain Res Mol Brain Res. 137(1-2): 126-31.
[0428] Kajita, M., Y. Ezura, et al. (2003). “Association of the −381T/C promoter variation of the brain natriuretic peptide gene with low bone-mineral density and rapid postmenopausal bone loss.” J Hum Genet 48(2): 77-81.
[0429] Kaltschmidt, C., B. Kaltschmidt, et al. (1994). “Constitutive NF-kappa B activity in neurons.” Mol Cell Biol 14(6): 3981-92.
[0430] Kanazawa, N., M. Kurosaki, et al. (2004). “Regulation of hepatitis C virus replication by interferon regulatory factor 1.” J Virol 78(18): 9713-20.
[0431] Kanehisa, M. (1984). “Use of statistical criteria for screening potential homologies in nucleic acid sequences.” Nucleic Acids Res 12(1 Pt 1): 203-13.
[0432] Kanei-Ishii, C., J. Ninomiya-Tsuji, et al. (2004). “Wnt-1 signal induces phosphorylation and degradation of c-Myb protein via TAK1, HIPK2, and NLK.” Genes Dev 18(7): 816-29.
[0433] Karason, A., J. E. Gudjonsson, et al. (2003). “A susceptibility gene for psoriatic arthritis maps to chromosome 16q: evidence for imprinting.” Am J Hum Genet. 72(1): 125-31.
[0434] Kato, A., Y. Nagata, et al. (2004). “Delta-tubulin is a component of intercellular bridges and both the early and mature perinuclear rings during spermatogenesis.” Dev Biol 269(1): 196-205.
[0435] Kashio, N., W. Matsumoto, et al. (1998). “The second domain of the CD45 protein tyrosine phosphatase is critical for interleukin-2 secretion and substrate recruitment of TCR-zeta in vivo.” J Biol Chem. 273(50): 33856-63.
[0436] Kashio et al (2003). Galectin-9 induces apoptosis through the calcium-calpain-caspase-1 pathway. J. Immunol.; 170(7):3631-6.
[0437] Kayed et al (2004). Expression analysis of MAC30 in human pancreatic cancer and tumors of the gastrointestinal tract. Histol Histopathol. 19(4): 1021-31.
[0438] Kim, S., J. Lee, et al. (2003). “BP75, bromodomain-containing M(r) 75,000 protein, binds dishevelled-1 and enhances Wnt signaling by inactivating glycogen synthase kinase-3 beta.” Cancer Res. 63(16): 4792-5.
[0439] Kimmel, S. G., R. Mo, et al. (2000). “New mouse models of congenital anorectal malformations.” J Pediatr Surg. 35(2): 227-30; discussion 230-1.
[0440] Klausz, G., T. Molnar, et al. (2005). “Polymorphism of the heat-shock protein gene Hsp70-2, but not polymorphisms of the IL-10 and CD14 genes, is associated with the outcome of Crohn's disease.” Scand J Gastroenterol. 40(10): 1197-204.
[0441] Klein, B. K., J. J. Shieh, et al. (2001). “Receptor binding kinetics of human IL-3 variants with altered proliferative activity.” Biochem Biophys Res Commun 288(5): 1244-9.
[0442] Klein, W., A. Tromm, et al. (2001). “Interleukin-4 and interleukin-4 receptor gene polymorphisms in inflammatory bowel diseases.” Genes Immun 2(5): 287-9.
[0443] Kobayashi, K. S., M. Chamaillard, et al. (2005). “Nod2-dependent regulation of innate and adaptive immunity in the intestinal tract.” Science 307(5710): 731-4.
[0444] Koh, K. P., Y. Wang, et al. (2004). “T cell-mediated vascular dysfunction of human allografts results from IFN-gamma dysregulation of NO synthase.” J Clin Invest 114(6): 846-56.
[0445] Kohler, G. and C. Milstein (1992). “Continuous cultures of fused cells secreting antibody of predefined specificity. 1975.” Biotechnology 24: 524-6.
[0446] Kohn, D. B., K. I. Weinberg, et al. (1995). “Engraftment of gene-modified umbilical cord blood cells in neonates with adenosine deaminase deficiency.” Nat Med 1(10): 1017-23.
[0447] Kojima et al (2005). STAT3 regulates Nemo-like kinase by mediating its interaction with IL-6-stimulated TGFbeta-activated kinase 1 for STAT3 Ser-727 phosphorylation. Proc Natl Acad Sci USA. 102(12):4524-9.
[0448] Kolesnick, R. and H. R. Xing (2004). “Inflammatory bowel disease reveals the kinase activity of KSR1.” J Clin Invest 114(9): 1233-7.
[0449] Kolodziejski, P. J., A. Musial, et al. (2002). “Ubiquitination of inducible nitric oxide synthase is required for its degradation.” Proc Natl Acad Sci USA 99(19): 12315-20.
[0450] Kong et al (2005). ELL-associated factors 1 and 2 are positive regulators of RNA polymerase II elongation factor ELL. Proc Natl Acad Sci USA. 102(29):10094-8.
[0451] Kontani, K., T. Chano, et al. (2003). “RB1CC1 suppresses cell cycle progression through RB1 expression in human neoplastic cells.” Int J Mol Med. 12(5): 767-9.
[0452] Kopp, E. and S. Ghosh (1994). “Inhibition of NF-kappa B by sodium salicylate and aspirin.” Science 265(5174): 956-9.

[0453] Kotin, R. M. (1994). “Prospects for the use of adeno-associated virus as a vector for human gene therapy.” Hum Gene Ther 5(7): 793-801.
[0454] Kovalenko et al (2003). “The tumour suppressor CYLD negatively regulates NF-kappaB signalling by deubiquitination.” Nature. 424(6950):801-5.
[0455] Kozal, M. J., N. Shah, et al. (1996). “Extensive polymorphisms observed in HIV-1 clade B protease gene using high-density oligonucleotide arrays.” Nat Med 2(7): 753-9.
[0456] Kray, A. E., R. S. Carter, et al. (2005). “Positive regulation of IkappaB kinase signaling by protein serine/threonine phosphatase 2A.” J Biol Chem. 280(43): 35974-82.
[0457] Krebs, S., D. Seichter, et al. (2001). “Genotyping of dinucleotide tandem repeats by MALDI mass spectrometry of ribozyme-cleaved RNA transcripts.” Nat Biotechnol 19(9): 877-80.
[0458] Kremer, E. J. and M. Perricaudet (1995). “Adenovirus and adeno-associated virus mediated gene transfer.” Br Med Bull 51(1): 31-44.
[0459] Kulinski, J., D. Besack, et al. (2000). “CEL I enzymatic mutation detection assay.” Biotechniques 29(1): 44-6, 48.
[0460] Kunapuli, P. and J. L. Benovic (1993). “Cloning and expression of GRK5: a member of the G protein-coupled receptor kinase family.” Proc Natl Acad Sci USA 90(12): 5588-92.
[0461] Kure et al (1998). “A missense mutation (His42Arg) in the T-protein gene from a large Israeli-Arab kindred with nonketotic hyperglycinemia.” Hum Genet. 102(4):430-4.
[0462] Kure, S., T. Shinka, et al. (1998). “A one-base deletion (183delC) and a missense mutation (D276H) in the T-protein gene from a Japanese family with nonketotic hyperglycinemia.” J Hum Genet 43(2): 135-7.
[0463] Kuroki, T., F. Trapasso, et al. (2002). “Genetic alterations of the tumor suppressor gene WWOX in esophageal squamous cell carcinoma.” Cancer Res 62(8): 2258-60.
[0464] Kusugami, K., A. Fukatsu, et al. (1995). “Elevation of interleukin-6 in inflammatory bowel disease is macrophage- and epithelial cell-dependent.” Dig Dis Sci. 40(5): 949-59.
[0465] Kwoh, D. Y., G. R. Davis, et al. (1989). “Transcription-based amplification system and detection of amplified human immunodeficiency virus type 1 with a bead-based sandwich hybridization format.” Proc Natl Acad Sci USA 86(4): 1173-7.
[0466] Langmann et al. (2004). “Loss of detoxification in inflammatory bowel disease: dysregulation of pregnane X receptor target genes.” Gastroenterology. 127(1):26-40.
[0467] Larkin, D., D. Murphy, et al. (2004). “ICIn, a novel integrin alphaIIbbeta3-associated protein, functionally regulates platelet activation.” J Biol Chem 279(26): 27286-93.
[0468] Lesage, S., H. Zouali, et al. (2002). “CARD15/NOD2 mutational analysis and genotype-phenotype correlation in 612 patients with inflammatory bowel disease.” Am J Hum Genet 70(4): 845-57.
[0469] Leveille, C., A. L.-D. R, et al. (1999). “CD20 is physically and functionally coupled to MHC class II and CD40 on human B cell lines.” Eur J Immunol. 29(1): 65-74.
[0470] Li, J., Y. Yang, et al. (2002). “Oncogenic properties of PPM1D located within a breast cancer amplification epicenter at 17q23.” Nat Genet 31(2): 133-4.
[0471] Li, Z., X. Dong, et al. (2005). “Regulation of PTEN by Rho small GTPases.” Nat Cell Biol 7(4): 399-404. Epub 2005 Mar. 27.
[0472] Ligumsky et al (1997). Analysis of cytokine profile in human colonic mucosal Fc epsilonRI-positive cells by single cell PCR: inhibition of IL-3 expression in steroid-treated IBD patients. FEBS Lett. 413(3):436-40.
[0473] Lin, Y., A. Khokhlatchev, et al. (2002). “Death-associated protein 4 binds MST1 and augments MST1-induced apoptosis.” J Biol Chem 277(50): 47991-8001.
[0474] Lin, C. H., S. Hansen, et al. (2005). “The dosage of the neuroD2 transcription factor regulates amygdala development and emotional learning.” Proc Natl Acad Sci USA. 102(41): 14877-82.
[0475] Linden, D. R., K. F. Foley, et al. (2005). “Serotonin transporter function and expression are reduced in mice with TNBS-induced colitis.” Neurogastroenterol Motil. 17(4): 565-74.
[0476] Linstedt et al (1993). Giantin, a novel conserved Golgi membrane protein containing a cytoplasmic domain of at least 350 kDa. Mol Biol Cell. 4(7):679-93.
[0477] Liu, J., X. Guan, et al. (2004). “Synergistic activation of interleukin-12 p35 gene transcription by interferon regulatory factor-1 and interferon consensus sequence-binding protein.” J Biol Chem 279(53): 55609-17.
[0478] Liu, C., C. Kuei, et al. (2005). “INSL5 is a high affinity specific agonist for GPCR142 (GPR100).” J Biol Chem. 280(1): 292-300.
[0479] Livak, K. J., J. Marmaro, et al. (1995). “Towards fully automated genome-wide polymorphism screening.” Nat Genet 9(4): 341-2.
[0480] Lizardi, P. M., X. Huang, et al. (1998). “Mutation detection and single-molecule counting using isothermal rolling-circle amplification.” Nat Genet 19(3): 225-32.
[0481] Loftus, E. V., Jr. (2004). “Clinical epidemiology of inflammatory bowel disease: Incidence, prevalence, and environmental influences.” Gastroenterology 126(6): 1504-17.
[0482] Lohi, H., S. Makela, et al. (2002). “Upregulation of CFTR expression but not SLC26A3 and SLC9A3 in ulcerative colitis.” Am J Physiol Gastrointest Liver Physiol. 283(3): G567-75.
[0483] Lombardi, M. S., A. Kavelaars, et al. (1999). “Decreased expression and activity of G-protein-coupled receptor kinases in peripheral blood mononuclear cells of patients with rheumatoid arthritis.” Faseb J. 13(6): 715-25.
[0484] Lowenstein, C. J., C. S. Glatt, et al. (1992). “Cloned and expressed macrophage nitric oxide synthase contrasts with the brain enzyme.” Proc Natl Acad Sci USA 89(15): 6711-5.
[0485] Machida et al (2005). Association of polymorphic alleles of CTLA4 with inflammatory bowel disease in the Japanese. World J Gastroenterol. 11 (27):4188-93.
[0486] Mady et al (2002). Expression of E2F-4 gene in colorectal adenocarcinoma and corresponding covering mucosa: an immunohistochemistry, image analysis, and immunoblot study. Appl Immunohistochem Mol Morphol. 10(3):225-30.
[0487] Magro, F., M. A. Vieira-Coelho, et al. (2002). “Impaired synthesis or cellular storage of norepinephrine, dopamine, and 5-hydroxytryptamine in human inflammatory bowel disease.” Dig Dis Sci. 47(1): 216-24.
[0488] Malech, H. L., P. B. Maples, et al. (1997). “Prolonged production of NADPH oxidase-corrected granulocytes after gene therapy of chronic granulomatous disease.” Proc Natl Acad Sci USA 94(22): 12133-8.
[0489] Malo, M. S., W. Zhang, et al. (2004). “Thyroid hormone positively regulates the enterocyte differentiation marker intestinal alkaline phosphatase gene via an atypical response element.” Mol Endocrinol. 18(8): 1941-62.
[0490] Mannon, P. J., I. J. Fuss, et al. (2004). “Anti-interleukin-12 antibody for active Crohn's disease.” N Engl J Med 351(20): 2069-79.
[0491] Mansfield, E. S., M. Vainer, et al. (1996). “Sensitivity, reproducibility, and accuracy in short tandem repeat genotyping using capillary array electrophoresis.” Genome Res 6(9): 893-903.
[0492] Matsumoto et al (1998). Human ecalectin, a variant of human galectin-9, is a novel eosinophil chemoattractant produced by T lymphocytes. J Biol Chem. 273(27):16976-84.
[0493] Maxam, A. M. and W. Gilbert (1977). “A new method for sequencing DNA.” Proc Natl Acad Sci USA 74(2): 560-4.
[0494] Mazzocchi, G., P. Rebuffat, et al. (2005). “G Protein Receptors (GPR) 7 and 8 are Expressed in Human Adrenocortical Cells, and their Endogenous Ligands Neuropeptides B and W Enhance Cortisol Secretion by Activating Adenylate Cyclase- and Phospholipase C-dependent Signaling Cascades.” J Clin Endocrinol Metab 29: 29.
[0495] Mazzocco, M., M. Maffei, et al. (2002). “The identification of a novel human homologue of the SH3 binding glutamic acid-rich (SH3BGR) gene establishes a new family of highly conserved small proteins related to Thioredoxin Superfamily.” Gene 291(1-2): 233-9.
[0496] Mecklenbrauker, I., S. L. Kalled, et al. (2004). “Regulation of B-cell survival by BAFF-dependent PKCdelta-mediated nuclear signalling.” Nature 431(7007): 456-61.
[0497] Meili, R., A. T. Sasaki, et al. (2005). “Rho Rocks PTEN.” Nat Cell Biol 7(4): 334-335.
[0498] Melkoumian, Z. K., X. Peng, et al. (2005). “Mechanism of cell cycle regulation by FIP200 in human breast cancer cells.” Cancer Res. 65(15): 6676-84.
[0499] Metcalf, D. (1985). “The granulocyte-macrophage colony stimulating factors.” Cell 43(1): 5-6.
[0500] Miller, A. D. (1992). “Human gene therapy comes of age.” Nature 357(6378): 455-60.
[0501] Miller, A. D., J. V. Garcia, et al. (1991). “Construction and properties of retrovirus packaging cells based on gibbon ape leukemia virus.” J Virol 65(5): 2220-4.
[0502] Milojevic, T., V. Reiterer, et al. (2006). “The ubiquitin-specific protease Usp4 regulates the cell surface level of the A2A receptor.” Mol Pharmacol. 69(4): 1083-94.
[0503] Mischak, H., A. Bodenteich, et al. (1991). “Mouse protein kinase C-delta, the major isoform expressed in mouse hemopoietic cells: sequence of the cDNA, expression patterns, and characterization of the protein.” Biochemistry 30(32): 7925-31.
[0504] Mitani, K. and C. T. Caskey (1993). “Delivering therapeutic genes—matching approach and application.” Trends Biotechnol 11(5): 162-6.
[0505] Miyamoto, A., K. Nakayama, et al. (2002). “Increased proliferation of B cells and auto-immunity in mice lacking protein kinase Cdelta.” Nature 416(6883): 865-9.
[0506] Monteleone, G., A. Kumberova, et al. (2001). “Blocking Smad7 restores TGF-beta1 signaling in chronic inflammatory bowel disease.” J Clin Invest. 108(4): 601-9.
[0507] Monticelli, S., D. C. Solymar, et al. (2004). “Role of NFAT proteins in IL13 gene transcription in mast cells.” J Biol Chem 279(35): 36210-8.
[0508] Moreira, E. S., T. J. Wiltshire, et al. (2000). “Limb-girdle muscular dystrophy type 2G is caused by mutations in the gene encoding the sarcomeric protein telethonin.” Nat Genet. 24(2): 163-6.
[0509] Mosialos, G. (1997). “The role of Rel/NF-kappa B proteins in viral oncogenesis and the regulation of viral transcription.” Semin Cancer Biol 8(2): 121-9.
[0510] Muzyczka, N. (1994). “Adeno-associated virus (AAV) vectors: will they work?” J Clin Invest 94(4): 1351.
[0511] Myers, R. M., Z. Larin, et al. (1985). “Detection of single base substitutions by ribonuclease cleavage at mismatches in RNA:DNA duplexes.” Science 230(4731): 1242-6.
[0512] Myers, R. M., N. Lumelsky, et al. (1985). “Detection of single base substitutions in total genomic DNA.” Nature 313(6002): 495-8.
[0513] Mykkanen, O. M., M. Gronholm, et al. (2001). “Characterization of human palladin, a microfilament-associated protein.” Mol Biol Cell 12(10): 3060-73.
[0514] Nagashima et al (2003). “A novel PHD-finger motif protein, p47ING3, modulates p53-mediated transcription, cell cycle control, and apoptosis.” Oncogene. 22(3):343-50.
[0515] Nabel, G. J. and P. L. Felgner (1993). “Direct gene transfer for immunotherapy and immunization.” Trends Biotechnol 11(5): 211-5.
[0516] Nagata, K., A. Puls, et al. (1998). “The MAP kinase kinase kinase MLK2 co-localizes with activated JNK along microtubules and associates with kinesin superfamily motor KIF3.” Embo J. 17(1): 149-58.
[0517] Nagley, P. and Y. H. Wei (1998). “Ageing and mammalian mitochondrial genetics.” Trends Genet 14(12): 513-7.
[0518] Nanao et al (1994). “Identification of the mutations in the T-protein gene causing typical and atypical nonketotic hyperglycinemia.” Hum Genet. 93(6):655-8.
[0519] Nanao, K., G. Takada, et al. (1994). “Structure and chromosomal localization of the aminomethyltransferase gene (AMT).” Genomics. 19(1): 27-30.
[0520] Napolitano, M., F. Miceli, et al. (2000). “Expression and relationship between endothelin-1 messenger ribonucleic acid (mRNA) and inducible/endothelial nitric oxide synthase mRNA isoforms from normal and preeclamptic placentas.” J Clin Endocrinol Metab 85(6): 2318-23.
[0521] Nathan, C. and M. U. Shiloh (2000). “Reactive oxygen and nitrogen intermediates in the relationship between mammalian hosts and microbial pathogens.” Proc Natl Acad Sci USA 97(16): 8841-8.
[0522] Neil, G. A., R. W. Summers, et al. (1992). “CD5+ B cells are decreased in peripheral blood of patients with Crohn's disease.” Dig Dis Sci. 37(9): 1390-5.
[0523] Netzer, C., L. Rieger, et al. (2001). “SALL1, the gene mutated in Townes-Brocks syndrome, encodes a transcriptional repressor which interacts with TRF1/PIN2 and localizes to pericentromeric heterochromatin.” Hum Mol Genet. 10(26): 3017-24.
[0524] Neurath, M. F., B. Weigmann, et al. (2002). “The transcription factor T-bet regulates mucosal T cell activation in experimental colitis and Crohn's disease.” J Exp Med. 195(9): 1129-43.
[0525] Newman, B., X. Gu, et al. (2005). “A risk haplotype in the Solute Carrier Family 22A4/22A5 gene cluster influences phenotypic expression of Crohn's disease.” Gastroenterology 128(2): 260-9.
[0526] Ngsee, J. K., L. A. Elferink, et al. (1991). “A family of ras-like GTP-binding proteins expressed in electromotor neurons.” J Biol Chem 266(4): 2675-80.
[0527] Niu, T., Z. S. Qin, et al. (2002). “Bayesian haplotype inference for multiple linked single-nucleotide polymorphisms.” Am J Hum Genet 70(1): 157-69.
[0528] Odashima, M., G. Bamias, et al. (2005). “Activation of A2A adenosine receptor attenuates intestinal inflammation in animal models of inflammatory bowel disease.” Gastroenterology. 129(1): 26-33.
[0529] Ogura, Y., D. K. Bonen, et al. (2001). “A frameshift mutation in NOD2 associated with susceptibility to Crohn's disease.” Nature 411(6837): 603-6.
[0530] Ogura, Y., N. Inohara, et al. (2001). “Nod2, a Nod1/Apaf-1 family member that is restricted to monocytes and activates NF-kappaB.” J Biol Chem 276(7): 4812-8. Epub 2000 Nov. 21.
[0531] Oppmann, B., R. Lesley, et al. (2000). “Novel p19 protein engages IL-12p40 to form a cytokine, IL-23, with biological activities similar as well as distinct from IL-12.” Immunity 13(5): 715-25.
[0532] Orita, M., H. Iwahana, et al. (1989). “Detection of polymorphisms of human DNA by gel electrophoresis as single-strand conformation polymorphisms.” Proc Natl Acad Sci USA 86(8): 2766-70.
[0533] Ouburg, S., R. Mallant-Hent, et al. (2005). “The toll-like receptor 4 (TLR4) Asp299Gly polymorphism is associated with colonic localisation of Crohn's disease without a major role for the Saccharomyces cerevisiae mannan-LBP-CD14-TLR4 pathway.” Gut 54(3): 439-40.
[0534] Pahl, H. L., B. Krauss, et al. (1996). “The immunosuppressive fungal metabolite gliotoxin specifically inhibits transcription factor NF-kappaB.” J Exp Med 183(4): 1829-40.
[0535] Parham, C., M. Chirica, et al. (2002). “A receptor for the heterodimeric cytokine IL-23 is composed of IL-12Rbeta1 and a novel cytokine receptor subunit, IL-23R.” J Immunol 168(11): 5699-708.
[0536] Paris, S., R. Sesboue, et al. (2002). “Inhibition of tumor growth and metastatic spreading by overexpression of inter-alpha-trypsin inhibitor family chains.” Int J Cancer. 97(5): 615-20.
[0537] Peltekova, V. D., R. F. Wintle, et al. (2004). “Functional variants of OCTN cation transporter genes are associated with Crohn disease.” Nat Genet 36(5): 471-5. Epub 2004 Apr. 11.
[0538] Pfeffer, S. R. (2005). “Structural clues to Rab GTPase functional diversity.” J Biol Chem 3: 3.
[0539] Pirone, D. M., S. Fukuhara, et al. (2000). “SPECs, small binding proteins for Cdc42.” J Biol Chem 275(30): 22650-6.
[0540] Podolsky, D. K. (1991). “Inflammatory bowel disease (1).” N Engl J Med 325(13): 928-37.
[0541] Podolsky, D. K. (1991). “Inflammatory bowel disease (2).” N Engl J Med 325(14): 1008-16.
[0542] Pol, O., J. R. Palacio, et al. (2003). “The expression of delta- and kappa-opioid receptor is enhanced during intestinal inflammation in mice.” J Pharmacol Exp Ther. 306(2): 455-62.
[0543] Praskova, M., A. Khoklatchev, et al. (2004). “Regulation of the MST1 kinase by autophosphorylation, by the growth inhibitory proteins, RASSF1 and NORE1, and by Ras.” Biochem J 381 (Pt 2): 453-62.
[0544] Qiu, Y., L. Ravi, et al. (1998). “Requirement of ErbB2 for signalling by interleukin-6 in prostate carcinoma cells.” Nature 393(6680): 83-5.
[0545] Raap, A. K. (1998). “Advances in fluorescence in situ hybridization.” Mutat Res 400(1-2): 287-98.
[0546] Rebollo et al (2001). “The association of Aiolos transcription factor and Bcl-xL is involved in the control of apoptosis.” J Immunol. 167(11):6366-73.
[0547] Reiley et al (2004). “Negative regulation of JNK signaling by the tumor suppressor CYLD.” J Biol Chem. 279(53):55161-7.
[0548] Remick, D. G. (1995). “Applied molecular biology of sepsis.” J Crit Care 10(4): 198-212.
[0549] Ren et al (2002). “E2F integrates cell cycle progression with DNA repair, replication, and G(2)/M checkpoints.” Genes Dev. 16(2):245-56.
[0550] Ren, L. Q., N. Gourmala, et al. (1998). “Lipopolysaccharide-induced expression of IP-10 mRNA in rat brain and in cultured rat astrocytes and microglia.” Brain Res Mol Brain Res 59(2): 256-63.
[0551] Reuter, U., A. Chiarugi, et al. (2002). “Nuclear factor-kappaB as a molecular target for migraine therapy.” Ann Neurol 51(4): 507-16.
[0552] Ridley, A. J. (1997). “The GTP-binding protein Rho.” Int J Biochem Cell Biol 29(11): 1225-9.
[0553] Roediger, W. E. (1980). “The colonic epithelium in ulcerative colitis: an energy-deficiency disease?” Lancet 2(8197): 712-5.
[0554] Roessler, E., Y. Z. Du, et al. (2003). “Loss-of-function mutations in the human GLI2 gene are associated with pituitary anomalies and holoprosencephaly-like features.” Proc Natl Acad Sci USA 100(23): 13424-9.
[0555] Romero et al (1999). “Aiolos transcription factor controls cell death in T cells by regulating Bcl-2 expression and its cellular localization.” EMBO J. 18(12):3419-30.
[0556] Ronaghi, M., M. Uhlen, et al. (1998). “A sequencing method based on real-time pyrophosphate.” Science 281(5375): 363, 365.
[0557] Rosenecker, J., K. H. Harms, et al. (1996). “Adenovirus infection in cystic fibrosis patients: implications for the use of adenoviral vectors for gene transfer.” Infection 24(1): 5-8.
[0558] Sahl et al (1998). “Granulocyte-macrophage colony-stimulating factor and interleukin-3 potentiate interferon-gamma-mediated endothelin production by human monocytes: role of protein kinase C. Immunology.” 95(3):473-9.
[0559] Saiki, R. K., T. L. Bugawan, et al. (1986). “Analysis of enzymatically amplified beta-globin and HLA-DQ alpha DNA with allele-specific oligonucleotide probes.” Nature 324(6093): 163-6.
[0560] Saiki, R. K., P. S. Walsh, et al. (1989). “Genetic analysis of amplified DNA with immobilized sequence-specific oligonucleotide probes.” Proc Natl Acad Sci USA 86(16): 6230-4.
[0561] Saleeba, J. A. and R. G. Cotton (1993). “Chemical cleavage of mismatch to detect mutations.” Methods Enzymol 217: 286-95.
[0562] Samulski, R. J., L. S. Chang, et al. (1989). “Helper-free stocks of recombinant adeno-associated viruses: normal integration does not require viral gene expression.” J Virol 63(9): 3822-8.
[0563] Sandborn, W. J. and W. A. Faubion (2004). “Biologics in inflammatory bowel disease: how much progress have we made?” Gut 53(9): 1366-73.
[0564] Sanders, L. C., F. Matsumura, et al. (1999). “Inhibition of myosin light chain kinase by p21-activated kinase.” Science 283(5410): 2083-5.
[0565] Sandford, A. J., T. Shirakawa, et al. (1993). “Localisation of atopy and beta subunit of high-affinity IgE receptor (Fc epsilon RI) on chromosome 11q.” Lancet 341(8841): 332-4.
[0566] Sanger, F., S, Nicklen, et al. (1977). “DNA sequencing with chain-terminating inhibitors.” Proc Natl Acad Sci USA 74(12): 5463-7.
[0567] Sans, M., D. Tassies, et al. (2003). “The 4G/4G genotype of the 4G/5G polymorphism of the type-1 plasminogen activator inhibitor (PAI-1) gene is a determinant of penetrating behaviour in patients with Crohn's disease.” Aliment Pharmacol Ther 17(8): 1039-47.
[0568] Santelli, E., M. Leone, et al. (2005). “Structural analysis of Siah1-Siah-interacting protein interactions and insights into the assembly of an E3 ligase multiprotein complex.” J Biol Chem. 280(40): 34278-87.
[0569] Sarraf et al (1998). “Differentiation and reversal of malignant changes in colon cancer through PPARgamma.” Nat Med 4(9):1046-52.
[0570] Sato, A., S. Kishida, et al. (2004). “Sall1, a causative gene for Townes-Brocks syndrome, enhances the canonical Wnt signaling by localizing to heterochromatin.” Biochem Biophys Res Commun. 319(1): 103-13.
[0571] Satoh, A. K., F. Tokunaga, et al. (1997). “Rab proteins of Drosophila melanogaster: novel members of the Rab-protein family.” FEBS Lett 404(1): 65-9.
[0572] Sauter, E. R., M. Herlyn, et al. (2000). “Prolonged response to antisense cyclin D1 in a human squamous cancer xenograft model.” Clin Cancer Res 6(2): 654-60.
[0573] Schaffer, C. J. and L. B. Nanney (1996). “Cell biology of wound healing.” Int Rev Cytol 169: 151-81.
[0574] Schreck, R., P. Rieber, et al. (1991). “Reactive oxygen intermediates as apparently widely used messengers in the activation of the NF-kappa B transcription factor and HIV-1.” Embo J 10(8): 2247-58.
[0575] Segain, J. P., D. Raingeard de la Bletiere, et al. (2003). “Rho kinase blockade prevents inflammation via nuclear factor kappa B inhibition: evidence in Crohn's disease and experimental colitis.” Gastroenterology 124(5): 1180-7.
[0576] Sells, M. A., U. G. Knaus, et al. (1997). “Human p21-activated kinase (Pak1) regulates actin organization in mammalian cells.” Curr Biol 7(3): 202-10.
[0577] Shekarabi, M., S. W. Moore, et al. (2005). “Deleted in colorectal cancer binding netrin-1 mediates cell substrate adhesion and recruits Cdc42, Rac1, Pak1, and N-WASP into an intracellular signaling complex that promotes growth cone expansion.” J Neurosci 25(12): 3132-41.
[0578] Shi, G. X., K. Harrison, et al. (2004). “Toll-like receptor signaling alters the expression of regulator of G protein signaling proteins in dendritic cells: implications for G protein-coupled receptor signaling.” J Immunol. 172(9): 5175-84.
[0579] Shi, Y., W. Hu, et al. (2004). “Regulation of drug sensitivity of gastric cancer cells by human calcyclin-binding protein (CacyBP).” Gastric Cancer 7(3): 160-6.
[0580] Silkov et al (2002). “Enhanced apoptosis of B and T lymphocytes in TAFII105 dominant-negative transgenic mice is linked to nuclear factor-kappa B.” J Biol Chem. 277(20):17821-9.
[0581] Shivakumar, L., J. Minna, et al. (2002). “The RASSF1A tumor suppressor blocks cell cycle progression and inhibits cyclin D1 accumulation.” Mol Cell Biol. 22(12): 4309-18.
[0582] Simon, H., I. Fortsch, et al. (1999). “Triple helix formation inhibits DNA gyrase activity.” Antisense Nucleic Acid Drug Dev 9(6): 527-31.
[0583] Smith, C. A., T. Farrah, et al. (1994). “The TNF receptor superfamily of cellular and viral proteins: activation, costimulation, and death.” Cell 76(6): 959-62.
[0584] Smith, J. and P. Modrich (1996). “Mutation detection with MutH, MutL, and MutS mismatch repair proteins.” Proc Natl Acad Sci USA 93(9): 4374-9.
[0585] Smith, M. J., S. D. Gitlin, et al. (2001). “GLI-2 modulates retroviral gene expression.” J Virol 75(5): 2301-13.
[0586] Sommerfelt, M. A. and R. A. Weiss (1990). “Receptor interference groups of 20 retroviruses plating on human cells.” Virology 176(1): 58-69.
[0587] Steindler, C., Z. Li, et al. (2004). “Jamip1 (marlin-1) defines a family of proteins interacting with janus kinases and microtubules.” J Biol Chem 279(41): 43168-77.
[0588] Steinhauer, D. A., S. A. Wharton, et al. (1991). “Amantadine selection of a mutant influenza virus containing an acid-stable hemagglutinin glycoprotein: evidence for virus-specific regulation of the pH of glycoprotein transport vesicles.” Proc Natl Acad Sci USA 88(24): 11525-9.
[0589] Sterman, D. H., J. Treat, et al. (1998). “Adenovirus-mediated herpes simplex virus thymidine kinase/ganciclovir gene therapy in patients with localized malignancy: results of a phase I clinical trial in malignant mesothelioma.” Hum Gene Ther 9(7): 1083-92.
[0590] Stevens, T. H. and M. Forgac (1997). “Structure, function and regulation of the vacuolar (H+)-ATPase.” Annu Rev Cell Dev Biol 13: 779-808.
[0591] Stohr, H., N. Mohr, et al. (2002). “Cloning and characterization of WDR17, a novel WD repeat-containing gene on chromosome 4q34.” Biochim Biophys Acta 1579(1): 18-25.
[0592] Storm, N., B. Darnhofer-Patel, et al. (2003). “MALDI-TOF mass spectrometry-based SNP genotyping.” Methods Mol Biol 212: 241-62.
[0593] Straub, R. H., K. Stebner, et al. (2005). “Key role of the sympathetic microenvironment for the interplay of tumour necrosis factor and interleukin 6 in normal but not in inflamed mouse colon mucosa.” Gut. 54(8): 1098-106.
[0594] Strom, T. M., K. Hortnagel, et al. (1998). “Diabetes insipidus, diabetes mellitus, optic atrophy and deafness (DIDMOAD) caused by mutations in a novel gene (wolframin) coding for a predicted transmembrane protein.” Hum Mol Genet. 7(13): 2021-8.
[0595] Sugawara et al (2005). “Linkage to peroxisome proliferator-activated receptor-gamma in SAMP1/YitFc mice and in human Crohn's disease.” Gastroenterology. 128(2):351-60.
[0596] Sugimura, K., K. D. Taylor, et al. (2003). “A novel NOD2/CARD15 haplotype conferring risk for Crohn disease in Ashkenazi Jews.” Am J Hum Genet 72(3): 509-18.
[0597] Suzuki, S., L. F. Chuang, et al. (2002). “Interactions of opioid and chemokine receptors: oligomerization of mu, kappa, and delta with CCR5 on immune cells.” Exp Cell Res. 280(2): 192-200.
[0598] Tanaka, S., M. Mori, et al. (1997). “Coexpression of Grb7 with epidermal growth factor receptor or Her2/erbB2 in human advanced esophageal carcinoma.” Cancer Res. 57(1): 28-31.
[0599] Tanaka, S., M. Mori, et al. (1998). “A novel variant of human Grb7 is associated with invasive esophageal carcinoma.” J Clin Invest 102(4): 821-7.
[0600] Teller, I. C. and J. F. Beaulieu (2001). “Interactions between laminin and epithelial cells in intestinal health and disease.” Expert Rev Mol Med. 2001: 1-18.
[0601] Tratschin, J. D., M. H. West, et al. (1984). “A human parvovirus, adeno-associated virus, as a eucaryotic vector: transient expression and encapsidation of the procaryotic gene for chloramphenicol acetyltransferase.” Mol Cell Biol 4(10): 2072-81.
[0602] Tremaine, W. J. (2003). Clinical features and complications of Crohn's disease. Inflammatory bowel disease, from bench to bedside. S. R. Targan, F. Shanahan and L. C. Karp. Dordrecht, Kluwer Acad. Pub.: 291-304.
[0603] Trinchieri, G., S. Pflanz, et al. (2003). “The IL-12 family of heterodimeric cytokines: new players in the regulation of T cell responses.” Immunity 19(5): 641-4.
[0604] Ustun, S., N. Turgay, et al. (2004). “Interleukin (IL) 5 levels and eosinophilia in patients with intestinal parasitic diseases.” World J Gastroenterol 10(24): 3643-6.
[0605] Van Molle, W., B. Wielockx, et al. (2002). “HSP70 protects against TNF-induced lethal inflammatory shock.” Immunity. 16(5): 685-95.
[0606] Vermeire, S., G. Wild, et al. (2002). “CARD15 Genetic Variation in a Quebec Population: Prevalence, Genotype-Phenotype Relationship, and Haplotype Structure.” Am J Hum Genet 71(1): 74-83.
[0607] Vitt, U. A., S. Mazerbourg, et al. (2002). “Bone morphogenetic protein receptor type II is a receptor for growth differentiation factor-9.” Biol Reprod. 67(2): 473-80.
[0608] Vojtek, A. B. and C. J. Der (1998). “Increasing complexity of the Ras signaling pathway.” J Biol Chem 273(32): 19925-8.
[0609] Wang, P., P. Wu, et al. (1995). “Interleukin (IL)-10 inhibits nuclear factor kappa B (NF kappa B) activation in human monocytes. IL-10 and IL-4 suppress cytokine synthesis by different mechanisms.” J Biol Chem 270(16): 9558-63.
[0610] Warabi, K., M. D. Richardson, et al. (2002). “Human substance P receptor undergoes agonist-dependent phosphorylation by G protein-coupled receptor kinase 5 in vitro.” FEBS Lett 521(1-3): 140-4.
[0611] Weichart, D., J. Gobom, et al. (2006). “Analysis of NOD2-mediated proteome response to muramyl dipeptide in HEK293 cells.” J Biol Chem. 281(4): 2380-9.
[0612] West, M. H., J. P. Trempe, et al. (1987). “Gene expression in adeno-associated virus vectors: the effects of chimeric mRNA structure, helper virus, and adenovirus VA1 RNA.” Virology 160(1): 38-47.
[0613] Wild, G. E. and J. D. Rioux (2004). “Genome scan analyses and positional cloning strategy in IBD: successes and limitations.” Best Pract Res Clin Gastroenterol 18(3): 541-553.
[0614] Wilson, C., M. S. Reitz, et al. (1989). “Formation of infectious hybrid virions with gibbon ape leukemia virus and human T-cell leukemia virus retroviral envelope glycoproteins and the gag and pol proteins of Moloney murine leukemia virus.” J Virol 63(5): 2374-8.
[0615] Wolf, F. W., R. M. Marks, et al. (1992). “Characterization of a novel tumor necrosis factor-alpha-induced endothelial primary response gene.” J Biol Chem 267(2): 1317-26.
[0616] Wonsey, D. R., K. I. Zeller, et al. (2002). “The c-Myc target gene PRDX3 is required for mitochondrial homeostasis and neoplastic transformation.” Proc Natl Acad Sci USA. 99(10): 6649-54.
[0617] Wu, J. Y., Y. Jin, et al. (2005). “Impaired TGF-beta responses in peripheral T cells of G alpha i2−/− mice.” J Immunol. 174(10): 6122-8.
[0618] Yamada, R., T. Tanaka, et al. (2001). “Association between a single-nucleotide polymorphism in the promoter of the human interleukin-3 gene and rheumatoid arthritis in Japanese patients, and maximum-likelihood estimation of combinatorial effect that two genetic loci have on susceptibility to the disease.” Am J Hum Genet 68(3): 674-85.
[0619] Yamamoto, S., G. Yang, et al. (2003). “Activation of Mst1 causes dilated cardiomyopathy by stimulating apoptosis without compensatory ventricular myocyte hypertrophy.” J Clin Invest 111(10): 1463-74.
[0620] Yamazaki, K., M. Takazoe, et al. (2002). “Absence of mutation in the NOD2/CARD15 gene among 483 Japanese patients with Crohn's disease.” J Hum Genet 47(9): 469-72.
[0621] Yamit-Hezi, A. and R. Dikstein (1998). “TAFII105 mediates activation of anti-apoptotic genes by NF-kappaB.” Embo J. 17(17): 5161-9.
[0622] Yan, F., S. K. John, et al. (2004). “Kinase suppressor of Ras-1 protects intestinal epithelium from cytokine-mediated apoptosis during inflammation.” J Clin Invest 114(9): 1272-80.
[0623] Yin et al (2003). “Cloning and characterization of the human IFT20 gene.” Mol Biol Rep. 30(4):255-60.
[0624] Yu, M., E. Poeschla, et al. (1994). “Progress towards gene therapy for HIV infection.” Gene Ther 1(1): 13-26.
[0625] Yu, Q., S. J. Cok, et al. (2003). “Translational repression of human matrix metalloproteinases-13 by an alternatively spliced form of T-cell-restricted intracellular antigen-related protein (TIAR).” J Biol Chem. 278(3): 1579-84.
[0626] Zaratin, P. F., A. Quattrini, et al. (2005). “Schwann cell overexpression of the GPR7 receptor in inflammatory and painful neuropathies.” Mol Cell Neurosci 28(1): 55-63.
[0627] Zhang, W. J., W. A. Koltun, et al. (2000). “Absence of GNAI2 codon 179 oncogene mutations in inflammatory bowel disease.” Inflamm Bowel Dis. 6(2): 103-6.
[0628] Zhang, M., P. Liu, et al. (2002). “MLN64 mediates mobilization of lysosomal cholesterol to steroidogenic mitochondria.” J Biol Chem. 277(36): 33300-10.
[0629] Zhang, S. X., E. G. Gras, et al. (2005). “Identification of direct serum response factor gene targets during DMSO induced P19 cardiac cell differentiation.” J Biol Chem 28: 28.
[0630] Zhang, Z., A. Andoh, et al. (2005). “Interleukin-1beta and tumor necrosis factor-alpha upregulate interleukin-23 subunit p19 gene expression in human colonic subepithelial myofibroblasts.” Int J Mol Med 15(1): 79-83.
[0631] Zhou, J., J. Ma, et al. (2004). “BRD7, a novel bromodomain gene, inhibits G1-S progression by transcriptionally regulating some important molecules involved in ras/MEK/ERK and Rb/E2F pathways.” J Cell Physiol. 200(1): 89-98.

### BOOKS

[0632] Abbas A K, Litchman A H. Cellular and Molecular Immunology. Philadelphia: Saunders; 1994. 417 p.
[0633] Austen B M and. Westwood O M R. Protein Targeting and Secretion. Oxford: IRL Press; 1991. 85 p.
[0634] Bishop M J, editor. Guide to Human Genome Computing, 2d ed. San Diego: Academic Press; 1998. 306 p.
[0635] Cowell I G, Austin C A, editors. DNA Library Protocols. Methods in Molecular Biology. Vol. 69 Totowa, N.J.: Humana Press; 1997. 321 p.
[0636] Freshney R I, editor. Animal Cell Culture: A Practical Approach. Oxford: IRL Press; 1986.
[0637] Freshney R I. Culture Of Animal Cells: A Manual of Basic Technique. New York: AR Liss; 1987. 397 p.
[0638] Glover D M, editor. DNA Cloning: A Pratical Approach. Vols 1 & 2. Oxford; Washington: IRL Press; 1985.
[0639] Gribskov M, Devereux J, editors. Sequence Analysis Primer. Oxford University Press; 1994. 296 p.
[0640] Griffin A M, Griffin H G, editors. Computer Analysis of Sequence Data, Part 1. Totowa, N.J. Humana Press; 1994. 392 p.
[0641] Hames B D, Higgins S J, editors. Nucleic Acid Hybridization: A Practical Approach. Oxford: IRL Press; 1985. 245 p.
[0642] Hames B D, Higgins S J, editors. Transcription and Translation: A Practical Approach. Oxford: IRL Press; 1984. 328 p.
[0643] Harlow Ed, Lane D. Antibodies: A Laboratory Manual. New York: Cold Spring Harbor Laboratory; 1988. 726 p.
[0644] Heinje G. von. Sequence Analysis in Molecular Biology. San Diego: Academic Press; 1987. 188 p.
[0645] Hogan B, Costantini F, Lacy E, editors. Manipulating the Mouse Embryo: A Laboratory Manual. New York: Cold Spring Harbor Laboratory Press; 1986. 332 p.
[0646] Huber B E, Carr B I. Molecular and Immunologic Approaches. Mt. Kisco, N.Y.: Futura Publishing Co; 1994.
[0647] Jones J. Amino Acid and Peptide Synthesis. Oxford; New York: Oxford Science Publications; 1992. 86 p.
[0648] Kaufman P B, William W, Donghern K, editors. Handbook of Molecular and Cellular Methods in Biology and Medicine. Boca Raton: CRC Press; 1995. 484 p.
[0649] Lesk A M, editor. Computational Molecular Biology: sources and methods for sequence analysis. New York: Oxford University Press; 1988. 254 p.
[0650] Male D, Cooke A, Owen M, Trowsdale J, Champion B, editors. Advanced Immunology. 3rd ed. London; Baltimore: Mosby; 1996. 273 p.
[0651] McPherson M J, editor. Directed Mutagenesis: A Practical Approach. New York: IRL Press; 1991.257 p.
[0652] McPherson M J, Quirke P, Taylor J R, editors. PCR: A Practical Approach. Oxford; New York: IRL Press; 1991.253 p.
[0653] Miller J H, Calos M P, editors. Gene Transfer Vectors for Mammalian Cells. New York: Cold Spring Harbor Laboratory Press; 1987. 169 p.
[0654] Miller J H, Calos M P, editors. Gene Transfer Vectors For Mammalian Cells. New York: Cold Spring Harbor Laboratory; 1987. 169 p.
[0655] Pawlowitzki I H, Edwards J H, Thompson E A, editors. Genetic Mapping of Disease Genes. Academic Press London; 1997.288 p.
[0656] Perbal B V. A Practical Guide to Molecular Cloning. 1st ed. New York: Wiley Interscience Publication; 1984. 554 p.
[0657] Perbal B V. A Practical Guide To Molecular Cloning. New York: Wiley; 1984. 554 p.
[0658] Peruski L F, Peruski A H. The Internet and the New Biology. Tools for Genomic and Molecular Research. Washington, D.C.: American Society for Microbiology Press; 1997.
[0659] Sambrook J. Molecular Cloning: A Laboratory Manual. 2nd ed. 3 vols. New York: Cold Spring Harbor Laboratory Press; 1989.
[0660] Sell S. Immunology, Immunopathology & Immunity. 5th ed. Stamford, Conn.: Appleton & Lange; 1996. 1014 p.
[0661] Smith D W, editor. Biocomputing. Informatics and Genome Projects, New York: Academic Press; 1993. 336 p.
[0662] Stites D P, Terr A T, editors. Basic and Clinical Immunology. 7th ed. Norwalk, Conn.: Appleton & Lange; 1991. 870 p.
[0663] Walker J M. Protein Protocols on CD-ROM, Humana Press, Totowa, N.J.
[0664] Weir D M, Herzenberg L A, Blackwell C, editors. Handbook Of Experimental Immunology. 4 vols. Oxford: Blackwell; 1986.
[0665] Woodward J. Immobilized Cells And Enzymes: A Practical Approach. Oxford: IRL Press; 1986.
[0666] Wu R, Grossman L, editors. Methods in Enzymology: Rexcombinant DNA Part E. Vol. 154. Amsterdam: Elsevier Science; 1987. 576 p.
[0667] Wu R, Grossman L, editors. Methods in Enzymology: Rexcombinant DNA Part F. Vol. 155. Amsterdam: Elsevier Science; 1987. 628 p.

### PATENTS

[0668] U.S. Pat. No. 4,683,202.
[0669] U.S. Pat. No. 4,952,501.
[0670] WO03042661A2
[0671] US 20040009479A1
[0672] U.S. Pat. No. 5,315,000
[0673] WO1997US0005216
[0674] U.S. Pat. No. 5,498,531
[0675] U.S. Pat. No. 5,807,718
[0676] U.S. Pat. No. 5,888,819
[0677] U.S. Pat. No. 6,090,543
[0678] U.S. Pat. No. 6,090,606
[0679] U.S. Pat. No. 5,585,089
[0680] U.S. Pat. No. 4,683,195
[0681] U.S. Pat. No. 4,683,202
[0682] U.S. Pat. No. 5,459,039.
[0683] U.S. Pat. No. 6,090,543).
[0684] U.S. Pat. No. 6,090,606
[0685] U.S. Pat. No. 5,869,242
[0686] U.S. 60/335,068
[0687] U.S. Pat. No. 6,479,244
[0688] PCT/US94/05700
[0689] U.S. Pat. No. 4,797,368
[0690] WO 93/24641
[0691] U.S. Pat. No. 5,173,414

Lengthy table referenced here
US20090181380A1-20090716-T00001
Please refer to the end of the specification for access instructions.

LENGTHY TABLES
The patent application contains a lengthy table section. A copy of the table is available in electronic form from the USPTO web site (http://seqdata.uspto.gov/?pageRequest=docDetail&DocID=US20090181380A1). An electronic copy of the table will also be available from the USPTO upon request and payment of the fee set forth in 37 CFR 1.19(b)(3).

1. A method of constructing a GeneMap for Crohn's disease comprising identifying at least two chromosomal loci associated with Crohn's disease in a population, wherein said at least two chromosomal loci are selected from the genomic regions listed in Table 1.

2.-20. (canceled)

21. A method of diagnosing Crohn's disease, the predisposition to Crohn's disease, or the progression of Crohn's disease in an individual, comprising comparing (i) the amount and/or concentration of at least one polypeptide encoded in Candidate Region 341 and/or at least one nucleic acid encoding the polypeptide in a biological sample from the individual with (ii) a control amount and/or concentration of the at least one polypeptide and/or the at least one nucleic acid; wherein a significant difference between the amount and/or concentration of the at least one polypeptide and/or the at least one nucleic acid of (i) and the control amount and/or concentration of the at least one polypeptide and/or the at least one nucleic acid of (ii) is indicative of a Crohn's disease, the predisposition to Cronh's disease or the progression of Crohn's disease in the individual.

22. (canceled)

23. The method of claim 21, wherein the amount and/or concentration of the at least one nucleic acid is determined with a nucleic acid probe.

24. The method of claim 23, wherein said nucleic acid probe is selected from group consisting of SEQ ID NOs: 3747, 3749, 3751, 3753, 3755, 3757, 3759; 3761, 3763, 3765, 3767, 3771, 3773, 3775, 3777, 3779, 3781, 3783, 3785, 3787, 3789, 3791, 3793, 3795, 3797, 3799, 3801, 3803, 3805, 3807, 3809, 3811, 3813, 3815, 3817, 3819, 3821, 3823, 3825, 3827, 3829, 3831, 3833, 3835, 3837, 3839, 3841, 3843, 3845, 3847, 3849, 3851, 3853, 3855, 3857, 3859, 3861, 3863, 3865 3887 and 3889 or a fragment thereof.

25. The method of claim 23, wherein said nucleic acid probe is capable of hybridizing to a sequences selected from group consisting of SEQ ID NOs: 3747, 3749, 3751, 3753, 3755, 3757, 3759; 3761, 3763, 3765, 3767, 3771, 3773, 3775, 3777, 3779, 3781, 3783, 3785, 3787, 3789, 3791, 3793, 3795. 3797, 3799, 3801, 3803, 3805, 3807, 3809, 3811, 3813, 3815, 3817, 3819, 3821, 3823, 3825, 3827, 3829, 3831, 3833, 3835, 3837, 3839, 3841, 3843, 3845, 3847, 3849, 3851, 3853, 3855, 3857, 3859, 3861, 3863, 3865 3887 and 3889 or a fragment thereof.

26.-38. (canceled)

39. A method of evaluating Crohn's disease or detecting the susceptibility to Crohn's disease comprising detecting at least one mutation or polymorphism in Candidate Region 341 in a patient.

40.-48. (canceled)

49. The method of claim 39, wherein the mutation is at least one of SNP from Candidate Region 341.

51. (canceled)

52. A method of evaluating Crohn's disease or diagnosing the susceptibility to Crohn's disease in an individual, comprising screening for an at-risk haplotype in Candidate Region 341, that is more frequently present in an individual susceptible to Crohn's disease compared to a control individual, wherein the presence of the at-risk haplotype is indicative of an increased risk for the onset or the development of Crohn's disease in the individual.

53. (canceled)

54. The method of claim 52, wherein the risk for the onset or the development of Crohn's disease is increased at least about 20%.

55. The method of claim 52, wherein the at-risk haplotype is characterized by the presence of at least one single nucleotide polymorphism in Candidate Region 341.

56.-63. (canceled)

64. A method of determining a susceptibility to Crohn's disease in an individual, comprising (a) determining the expression level or the composition of a polypeptide encoded by at least one gene of Candidate Region 341 in a test sample, (b) comparing the result obtained in step (a) with the expression level or the composition of the polypeptide encoded by the at least one gene in a control sample to determine the presence of an alteration in the expression level or the composition of the polypeptide in the test sample, wherein the presence of the alteration in the expression level or the composition of the polypeptide in the test sample is indicative of an increased susceptibility to Crohn's Disease.

65. The method of claim 64, wherein the alteration in the expression level or composition of the polypeptide is caused by the expression of a splicing variant of a mRNA encoding the polypeptide in the test sample that differs from a splicing variant expressed in a control sample.

66. A drug screening assay comprising: (a) contacting a test compound with a cell from an individual having Crohn's disease and (b) determining the level of gene expression of at least one gene in Candidate Region 341 in the cell of step (a) and (c) comparing the level of gene expression obtained in step (b) with the level of gene expression of the at least one gene in a normal cell; wherein a similarity between the level of gene expression in the cell of step (a) and the level of gene expression in the normal cell is indicative that the test compound is a candidate drug to treat Crohn's disease.

67.-68. (canceled)

69. A method for predicting the efficacy of a drug for treating Crohn's disease in a human patient, comprising: (a) obtaining a a gene expression profile from at least one of a gene in Candidate Region 341 from a sample from the human patient to which the drug has been administered and (b) comparing the gene expression profile obtained in step (a) with a reference gene expression profile from the at least one gene in Candidate Region 341, wherein a similarity between the expression profile obtained in step (a) and the reference expression profile is indicative of the efficacy of the drug for treating Crohn's disease in the human patient.

70.-77. (canceled)

78. The method of claim 69, wherein the reference expression profile is that of a cell derived from a patient that does not have Crohn's disease.

79.-80. (canceled)

81. A method for predicting the efficacy of a drug for treating Crohn's disease in a human patient, comprising: (a) obtaining a set of genotypes from Candidate Region 341 from a sample of the human patient to which the drug has been administered, and (b) comparing the set of genotypes obtained in step (a) with a set of genotypes from Candidate Region 341 associated with the efficacy of the drug, wherein a similarity between the set of genotypes obtained in step (a) and the set of genotypes associated with the efficacy of the drug is indicative of the efficacy of the drug for treating Crohn's disease in the human patient.

82.-85. (canceled)

86. The method of claim 81 wherein the set of genotypes of step (a) is obtained by hybridization of allele-specific oligonucleotides complementary to a polymorphic loci from any one of Tables 2, 3, 4, 5-36.

87. The method of claim 86, wherein the allele-specific oligonucleotides comprise nucleic acid molecules at least 95% identical to SEQ ID of any one of Tables 2, 3, 4, 5-36.

88.-117. (canceled)

118. A method for identifying a gene that regulates drug response in Crohn's disease, comprising: (a) obtaining a gene expression profile from at least one gene of Candidate Region 341 in a cell induced to a pro-inflammatory like state in the presence of a candidate drug; (b) obtaining a reference gene expression profile for the at least one gene of Candidate region 341 in a cell induced to a pro-inflammatory like state in the absence of the candidate drug; and (c) comparing the gene expression profile obtained in step (a) with the reference expression profile, wherein a difference in the gene expression profiles is indicative that the at least one gene regulates the candidate drug response Crohn's disease.

119.-136. (canceled)

137. A method of assessing a patient's risk of having or developing Crohn's disease, comprising: (a) in the patient's sample, determining a level of expression of at least one gene or product thereof of Candidate Region 341, (b) comparing the level of expression obtained in step (a) to the level of expression of the at least one gene or product thereof of a cell of an individual suffering from Crohn's disease; and wherein a similarity between the level of expression of step (a) and (b) is indicative of an increased risk for the patient to have or develop Crohn's disease.

138. A method of assessing a patient's risk of having or developing Crohn's disease, comprising: (a) in the patient's sample, determining a genotype for at least one polymorphic locus of Candidate Region 341, (b) comparing said genotype obtained in step (a) to a genotype for the at least one polymorphic locus of Candidate Region 341 associated with Crohn's disease; and wherein a similarity between the genotype of step (a) and (b) is indicative of an increased risk for the patient to have or develop Crohn's disease.

139.-140. (canceled)

141. A method of detecting the onset or the progression of Crohn's disease in an individual, said method comprising comparing a parameter from a sample from the individual to a control parameter, wherein a difference between the parameter from the sample from the individual and the control parameter is indicative of the onset or progression of Crohn's disease in the individual and wherein the parameter from the sample from the individual is selected from the group consisting of:
a level of expression of a gene in Candidate Region 341;
a mutation in a gene in Candidate Region 341;
a single nucleotide polymorphism in Candidate Region 341;
a haplotype in Candidate Region 341;
a level of expression of a polypeptide encoded by a gene in Candidate Region 341; and
a mutation in a polypeptide encoded by a gene in Candidate Region 341; and
wherein the control parameter is from a healthy individual and is selected from the group consisting of:
a level of expression of a gene in Candidate Region 341;
a mutation in a gene in Candidate Region 341;
a single nucleotide polymorphism in Candidate Region 341;
a haplotype in Candidate Region 341;
a level of expression of a polypeptide encoded by a gene in Candidate Region 341; and
a mutation in a polypeptide encoded by a gene in Candidate Region 341.

The application's sequence listing, which the Patent Office published only in electronic form, follows.

SEQUENCE LISTING (21498 sequences)

SEQ ID NO: 1 - DNA, 7450 bp, Homo sapiens
cgccggggcgagttcctgcagggtggacccggcgatcaggtctccgcggtgccactttgggcgcgggcgggaagccgggacgctccgcacctgcagcgaccttgggctccgcggagcgggcgcgggcacctgtggctgcgtcctatggcgcacgtggaggcggaggctccggggagccgccggggccgcctgtgagccggagagcggaggaggcaccggcgcgcacgatgtcgttccttgaagaggcgagggcagcggggcgcgcggtggtcctggcgttggtgctgctgctgctccccgccgtgcccgtgggcgccagcgttccgccgcggcccctgctcccgctgcagcccggcatgccccacgtgtgtgctgagcaggagctgaccctggtgggccgccgccagccgtgcgtgcaggccttaagccacacggtgccggtgtggaaggccggctgtgggtggcaggcgtggtgcgtgggtcatgagcggagaaccgtctactacatgggctacaggcaggtgtataccacggaggcccggaccgtgctcaggtgctgccgagggtggatgcagcagcccgacgaggagggctgcctctcggctgaatgcagcgccagcctctgttttcacggtggccgttgtgtgccaggctcagcccagccgtgtcactgtccccccggcttccagggaccccgctgtcagtatgatgtggacgaatgccgaacccacaacggtggctgccagcaccggtgcgtgaacaccccaggctcctacctctgtgagtgcaagcccggcttccggctccacactgacagcaggacctgcctggccattaactcctgcgccctgggcaatggcggctgccagcaccactgtgtccagctcacaatcactcggcatcgctgccagtgccggcccgggttccagctccaggaggacggcaggcattgtgtccgtagaagcccgtgtgccaacaggaacggcagctgcatgcacaggtgccaggtggtccggggcctcgcccgctgtgagtgccacgtgggctatcagctagcagcggacggcaaggcctgtgaagatgtggacgaatgtgccgcagggctggcccagtgtgcccatggctgcctcaacacccaggggtccttcaagtgcgtgtgtcacgcgggctatgagctgggcgccgatggccggcagtgctaccggattgagatggaaatcgtgaacagctgtgaggccaacaacggcggctgctcccatggctgcagccacaccagtgctgggcccctgtgcacatgtccccgcggctacgagctggacacagatcagaggacctgcatcgatgtcgacgactgtgcagacagcccgtgctgccagcaggtgtgcaccaacaaccctggcgggtacgagtgcggctgctacgccggctaccggctcagtgccgatggctgcggctgtgaggatgtggatgagtgcgcctccagccgtggcggctgcgagcaccactgcaccaacctggccggctccttccagtgctcctgcgaggccggctaccggctgcacgaggaccgtaggggctgcagccccctggaggagccgatggtggacctggacggcgagctgcctttcgtgcggcccctgccccacattgccgtgctccaggacgagctgccgcaactcttccaggatgacgacgtcggggccgatgaggaagaggcagagttgcggggcgaacacacgctcacagagaagtttgtctgcctggatgactcctttggccatgactgcagcttgacctgtgatgactgcaggaacggagggacctgcctcctgggcctggatggctgtgattgccccgagggctggactgggctcatctgcaatgagacttgtcctccggacacctttgggaagaactgcagcttctcctgcagctgtcagaatggtgggacctgcgactctgtcacgggggcctgccgctgccccccgggtgtcagtggaactaactgtgaggatggctgccccaagggctactatggcaagcactgtcgcaagaaatgcaactgtgccaaccggggccggtgccaccgcctctacggggcctgcctctgcgacccagggctctacggccgcttctgccacctcacctgcccgccgtgggcctttgggccgggctgctcggaggagtgccagtgtgtgcagccccacacgcagtcctgtgacaagagggatggcagctgctcctgcaaggctggcttccggggcgagcgctgtcaggcagagtgtgagctgggctactttgggccggggtgctggcaggcatgcacctgcccagtgggcgtggcctgtgactccgtgagcggcgagtgtgggaagcggtgtcctgctggcttccagggagaggactgtggccaagagtgcccggtggggacgtttggcgtgaactgctcgagctcctgctcctgtgggggggccccctgccacggggtcacggggcagtgccggtgtccgccggggaggactggggaagactgtgaggcagattgtcccgagggccgctgggggctgggctgccaggagatctgcccagcatgccagcacgctgcccgctgcgaccctgagaccggagcctgcctgtgcctccctggcttcgtcggcagccgctgccaggacgtgtgcccagcaggctggtatggtcccagctgccagacaaggtgctcttgtgccaatgatgggcactgccacccagccaccggacactgcagctgtgcccccgggtggaccggctttagctgccagagagcctgtgatactgggcactggggacctgactgcagccacccctgcaactgcagcgctggccacgggagctgtgatgccatcagcggcctgtgtctgtgtgaggctggctacgtgggcccgcggtgcgagcagcagtgtccccagggccactttgggcccggctgtgagcagcggtgccagtgtcagcatggagcagcctgtgaccacgtcagcggggcctgcacctgcccggccggctggaggggcaccttctgcgagcatgcctgcccggccggcttctttggattggactgtcgcagtgcctgcaactgcaccgccggagctgcctgtgatgccgtgaatggctcctgcctctgccccgctggccgccggggcccccgctgtgccgagacctgcccagcccacacctacgggcacaattgcagccaggcctgtgcctgctttaacggggcctcctgtgaccctgtccacgggcagtgccactgtgcccctggctggatggggccctcctgcctgcaggcctgccctgccggcctgtacggcgacaactgtcggcattcctgcctctgccagaacggagggacctgtgaccctgtctcaggccactgtgcgtgcccagagggctgggccggcctggcctgtgagaaggagtgcctcccccgggacgtcagagctggctgccggcacagcggcggttgcctcaacgggggcctgtgtgacccgcacacgggccgctgcctctgcccagccggctggactggggacaagtgtcagagcccctgcctgcggggctggtttggagaggcctgtgcccagcgctgcagctgcccgcctggcgctgcctgccaccacgtcactggggcctgccgctgtccccctggcttcactggctccggctgcgagcaggcctgcccacccggcagctttggggaggactgtgcgcagatgtgccagtgtcccggtgagaacccggcctgccaccctgccaccgggacctgctcatgtgctgctggctaccacggccccagctgccagcaacgatgtccgcccgggcggtatgggccaggctgtgaacagctgtgtgggtgtctcaacgggggctcctgtgatgcggccacgggggcctgccgctgccccactgggttcctcgggacggactgcaacctcacctgtccgcagggccgcttcggccccaactgcacccacgtgtgtgggtgtgggcagggggcggcctgcgaccctgtgaccggcacctgcctctgccccccggggagagccggcgtccgctgtgagcgaggctgcccccagaaccggtttggcgtgggctgcgagcacacctgctcctgcagaaatgggggcctgtgccacgccagcaacggcagctgctcctgtggcctgggctggacggggcggcactgcgagctggcctgtccccctgggcgctacggagccgcctgccatctggagtgctcctgccacaacaacagcacgtgtgagcctgccacgggcacctgccgctgcggccccggcttctatggccaggcctgcgagcacccctgtccccctggcttccacggggctggctgccaggggttgtgctggtgtcaacatggagccccctgcgaccccatcagtggccgatgcctctgccctgccggcttccacggccacttctgtgagagggggtgtgagccaggttcatttggagagggctgccaccagcgctgtgactgtgacgggggggcaccctgtgaccctgtcaccggtctctgcctttgcccaccagggcgctcaggagccacctgtaacctggattgcagaaggggccagtttgggcccagctgcaccctgcactgtgactgcgggggtggggctgactgcgaccctgtcagtgggcagtgtcactgtgtggatggctacatggggcccacgtgccgggaaggtgggcccctccggctccccgagaacccgtccttagcccagggctcagcgggcacactgcccgcctccagcagacccacatcccggagcggtggaccagcgaggcactagtagaggcagtcccgtggagcccgcctctccagtcccagccagaggggaccctggcctttggtgaccactgagaaggacacttcacgggcccagagctcctggtactgcccttcctttgagggccgtggagggctgtggacagcccagcaacctgtcgctcttggaggctggtgtggccttgaggagggaagcctcgcatggccgctggaagagaggcgcctcctggcctggctctgcagaacccaggggcacgctctgggcctgggctgaggaagtcccgctctccccgcggctctgagttggactgaggacaggtgtgggcgccagtgtgggtgcaggcgcaggtgcaggcacagggccactgtcctccaggcaggctttttggtgctaggccctgggactggaagtcgcccagcccgtatttatgtaaaggtatttatgggccactgcacatgcccgctgcagccctgggatcagctggaagctgcctgtcatctcctgcccaatccccagaaaccctgattcaggtctgcaggctcctgcgggctcaccaggctgctggctccggtaccatgtaaacctaggaaggtaaaggagcaggcaacctcctcgtggcctgtgtgtttgctgtgttacgtggactctgtgtgggctcctccctggggcccggccagcataacggtgcacccagggacctcccagtgcacccggggccctttgcaggggtgggggtgccacacaagtgaagaagttgggactcatctcagttcccagtgctattgaggagaacgctggggctgcattcattaccgctgagacccagagactggctgttcccagagaatggcccagggggaggagggctggtgtggaggggcaacctggactgaggccgaactcccttgggctcaccccacccacccctacctgagcatcagcagtggggggagggcagcatcgcaggggcagggactccctgggtgaggacagaccagccctcccgagcacctggcactcatgggctgaggctgacttctcctggaagaagggcccagagtggaaggaagaggcagagggtagaggtggtggctgggggctcctctgcagagtggggtggccaatggagagggctgcactcacaccgcaacataggactctctctcccttaagaaggcccccttagggtctgggctgccgcccccatcaccctaaaaccagccaaggtagctgaggccccagggcagacaatttcaccagcaggaggaggaggagtccagtgagcttggttgctcacagacagcaagggagctgtcacagaggaagctgatgaatggaccgctgtggggagactttaaagtagaacagtgataagggagggcaggatggtggggatgcagaagcagcagccagagagagacggactggggtgcagacggagtgtggaaaacgcataccttgaaatgaagcatccagcagatggggtgagtggatacagctcaggagattctcccaggaatagcagggaggcgtaaagagagacaacgtacagagatagatgaatggaaatgggtaagggaggtgttcattcacatccatctaactgcaaaatacaaaagtaagaagtcattgacatgaagcaacgacgaccaagacgttctcagatctaaaggtgaatgatctcagtcagcctggaaatgcacaaggtggaaaaataacataaaaaagccataagaccttgaagaacatcaatgtcaaagataaattctaaagtcccagagaaaaaagaatgggaatcaaattgacctcagactatacgtgagaaacacggagagccagaaaactgtgatgttccatcctcagagtttgaaggaaatatttgaaggctgaattttacatccagctaaactatcaaaggcatgcaaagtccatgttattcttaggccttcaaggcctcggccatttttctacagaaaagcctgattttaaaatgctcttagagacgttctccagccagaagagaaagaagccaggagggtgctctgagatattcagtcaccacagttcccaaatggcctaggaattcagagagtcagaatatcaccattactccccaatgggaacccccgacagtctcagcatggtgtgagggtgtggacggggggcctggcaggtaccaatcactcatcccgctcagtgaagacacagtgttcagctacggaagccataaggcaggccgagcttctgcccatccggaggaaatctcagctatccaacggcggtcaggagcagaggaaaataaagcagaataactagaaaacacgctcacagatcctaatgttaacggttacaaatgacgacggaaaaacaaactcctgaccatatattatatagtttcaagcagcaagaaggaggatattgaacattctcaacacacataataaacgcttgagatgatgatatgctcattaccctgatttgatcactagacatcccatgtatcaaaacatcactgtgtatccgatgaatatctacaattattgtcaattaaaaacatcattaaaaacagactagactgcattaaaaataaaaaaaaaaaa

SEQ ID NO: 2 - protein, 1541 aa, Homo sapiens
MSFLEEARAAGRAVVLALVLLLLPAVPVGASVPPRPLLPLQPGMPHVCAEQELTLVGRRQPCVQALSHTVPVWKAGCGWQAWCVGHERRTVYYMGYRQVYTTEARTVLRCCRGWMQQPDEEGCLSAECSASLCFHGGRCVPGSAQPCHCPPGFQGPRCQYDVDECRTHNGGCQHRCVNTPGSYLCECKPGFRLHTDSRTCLAINSCALGNGGCQHHCVQLTITRHRCQCRPGFQLQEDGRHCVRRSPCANRNGSCMHRCQVVRGLARCECHVGYQLAADGKACEDVDECAAGLAQCAHGCLNTQGSFKCVCHAGYELGADGRQCYRIEMEIVNSCEANNGGCSHGCSHTSAGPLCTCPRGYELDTDQRTCIDVDDCADSPCCQQVCTNNPGGYECGCYAGYRLSADGCGCEDVDECASSRGGCEHHCTNLAGSFQCSCEAGYRLHEDRRGCSPLEEPMVDLDGELPFVRPLPHIAVLQDELPQLFQDDDVGADEEEAELRGEHTLTEKFVCLDDSFGHDCSLTCDDCRNGGTCLLGLDGCDCPEGWTGLICNETCPPDTFGKNCSFSCSCQNGGTCDSVTGACRCPPGVSGTNCEDGCPKGYYGKHCRKKCNCANRGRCHRLYGACLCDPGLYGRFCHLTCPPWAFGPGCSEECQCVQPHTQSCDKRDGSCSCKAGFRGERCQAECELGYFGPGCWQACTCPVGVACDSVSGECGKRCPAGFQGEDCGQECPVGTFGVNCSSSCSCGGAPCHGVTGQCRCPPGRTGEDCEADCPEGRWGLGCQEICPACQHAARCDPETGACLCLPGFVGSRCQDVCPAGWYGPSCQTRCSCANDGHCHPATGHCSCAPGWTGFSCQRACDTGHWGPDCSHPCNCSAGHGSCDAISGLCLCEAGYVGPRCEQQCPQGHFGPGCEQRCQCQHGAACDHVSGACTCPAGWRGTFCEHACPAGFFGLDCRSACNCTAGAACDAVNGSCLCPAGRRGPRCAETCPAHTYGHNCSQACACFNGASCDPVHGQCHCAPGWMGPSCLQACPAGLYGDNCRHSCLCQNGGTCDPVSGHCACPEGWAGLACEKECLPRDVRAGCRHSGGCLNGGLCDPHTGRCLCPAGWTGDKCQSPCLRGWFGEACAQRCSCPPGAACHHVTGACRCPPGFTGSGCEQACPPGSFGEDCAQMCQCPGENPACHPATGTCSCAAGYHGPSCQQRCPPGRYGPGCEQLCGCLNGGSCDAATGACRCPTGFLGTDCNLTCPQGRFGPNCTHVCGCGQGAACDPVTGTCLCPPGRAGVRCERGCPQNRFGVGCEHTCSCRNGGLCHASNGSCSCGLGWTGRHCELACPPGRYGAACHLECSCHNNSTCEPATGTCRCGPGFYGQACEHPCPPGFHGAGCQGLCWCQHGAPCDPISGRCLCPAGFHGHFCERGCEPGSFGEGCHQRCDCDGGAPCDPVTGLCLCPPGRSGATCNLDCRRGQFGPSCTLHCDCGGGADCDPVSGQCHCVDGYMGPTCREGGPLRLPENPSLAQGSAGTLPASSRPTSRSGGPARH

SEQ ID NO: 3 - DNA, 2440 bp, Homo sapiens
gggcgcggccgggtggtggcggtggctgcggcgacggcggtcgcgtcggcgtcagggtcggggtcggtaaggggtgcggcaatgctgcaactgcgggactcggtggactcggccggtacgagccccacggcggtgctggcggccggcgaggaggtgggggcaggcggcggcccgggcggggggcggccgggggcggggacgccgctgcgccagacactctggcctctcagcatccacgaccccacgcgccgcgcccgcgtcaaggagtacttcgtgttccggcccggcagcatcgagcaggcagtggaggagatccgcgtggtggtgcggcccgtggaggacggcgagatccagggagtgtggctgcttaccgaggtggatcactggaacaatgagaaggagcggctggtgctggtcacggagcagtccctgcttatctgtaaatacgacttcatcagtctccagtgccagcaggtggtgcggatagcgctcaacgcagtagacaccatttcctacggagaattccagtttccccctaaatcgctcaacaagcgagaaggttttgggattcgaattcagtgggacaagcaaagtcgtccttccttcataaacagatggaatccctggtctaccaacgtgccctatgccactttcacagaacacccgatggctggcgcagatgagaagacagcatctctgtgtcagttggaaagcttcaaggctctgttaatccaagctgtcaaaaaagcccaaaaagaaagccctttgccaggacaggcgaatggcgtgctgatcctggagcgccccctgctcatcgagacctacgtgggactcatgtccttcattaacaacgaggcgaaactgggctactccatgaccaggggcaaaataggcttttagccgctgcgttctgggagctcctcccccttctgggagctcctccccctccccagaaggccaagggatgtgggggctgggggactgggaggcctggcagtcttcatgctgccctgctgctgctggaaggatggggatctttcacctttagggatctcagcacaattagaatcgtaaagtgaattctatctatttaattggatattggactctgctcatataagctacagacaaaagccaaaagactctcgctgtccctgtgctgctggtatttcattctctgtaacttcagttctggtgttttccttgagtatctacttggcttctcgtggtttttcccaccccagctgccccagcacgcgggacccatagcacaccccttagcgcttgcctaggttgctgaaaacagggaggcacctggtatctcgagtgcctgcagttgcaagtatgtttacacctggtgtccaattttgtattttaaaatgtaatccatttttacttcagctcatccaaaagcagccagcagaccggttgactgagaccggtctgtggctgtgggccccttggtgacccgctgctcttttggaaatgggtgacctgaagtgacactttttccacaattaacccaagttgtgttaatacttcaggtctgtttcccagacccagaaagctttacagaaaatcattgtaagacaatttattaatttgagaaagtcaccttgacagttctttgcacacaagttttacacctctctggattcgaagtttgtattgtattcatagttaaagggaatcgggtactttgcttgttgaataatgcactttaaaacaaggaaccgtatcaggccagcatggtggctcatgcctgtaatcccagcattttgggaggctcaggcagacaaatcgctctagctcagaagttgcagagcagcctgggcaacatggtgaaacccgtctctaccaaacagacaaaaagcagccaggcgtggtggcacatctgtggtcccagctacttgagaggctgagccaggaggatcgcttgagcccaggaggcggaggttgcagtgagctgagatggcaccacttattgcactccagcccgggcgacagagcgagactccatctaccagatccttatgacgcagctgatgcctgccttggttcctaccactctggtgtagacagaggactttgtccaagtctcacactaaacatgcccgggcttcgatgtgcctggaggatttccccacagggacccacgcacctccctgtatctgcgcagcttgctcgtgtggctggaagcgctgtcgataagcttcacgcactggcttgccagttcttcagctctaggacttgtagctttaagcaaacggtgtggcatgggttgagtgtggccacctgcaggatgtgcagggctgcctcagaagctggctggggactctagcctctgtgttcataaagacattaagaagtggatggatgttgttccttttttgaagttgtcattaaagtaggtgcaacaaccaagaaaaaaaaaaaaaaa

SEQ ID NO: 4 - protein, 272 aa, Homo sapiens
MLQLRDSVDSAGTSPTAVLAAGEEVGAGGGPGGGRPGAGTPLRQTLWPLSIHDPTRRARVKEYFVFRPGSIEQAVEEIRVVVRPVEDGEIQGVWLLTEVDHWNNEKERLVLVTEQSLLICKYDFISLQCQQVVRIALNAVDTISYGEFQFPPKSLNKREGFGIRIQWDKQSRPSFINRWNPWSTNVPYATFTEHPMAGADEKTASLCQLESFKALLIQAVKKAQKESPLPGQANGVLILERPLLIETYVGLMSFINNEAKLGYSMTRGKIGF

SEQ ID NO: 5 - DNA, 1675 bp, Homo sapiens
gttgcagcctgctgcgcgcccaggggtcccgcgggttttcgggcgcagggtggcgcccgcggcaggcggcggccatgaacttctccgaggtattcaagctctccagcttactctgcaagttctccccggacggcaagtacctggcttcctgtgtccagtaccggttagtggtccgggatgtgaacacccttcagatccttcagctgtacacgtgcctagaccagatccagcacatcgagtggtcggcagactcgctcttcatcctgtgcgccatgtacaagcgagggctggtgcaggtctggtctttagagcagcccgaatggcactgcaaaatagacgagggctcagccgggctggtggcctcgtgctggagcccggacgggcgccacattctcaacaccacggaattccatctgcggataaccgtctggtccttgtgcacaaaatccgtgtcttacatcaaatacccgaaagcttgtctgcagggaatcaccttcaccagggacggccgctacatggcgctggcagaacggcgcgactgcaaagattacgtgagcatcttcgtctgcagtgattggcagctcctgcggcattttgatacggacacccaggatctcacagggattgagtgggccccaaacggctgtgtgctggcagtgtgggacacctgcttggagtacaagattctgctgtactcattggatggccggttgttgtccacgtacagcgcttacgagtggtccctgggcatcaagtctgtggcctggagccccagcagtcagttcctggcagttgggagctatgatggaaaggtgcgcatccttaatcacgtgacttggaaaatgatcacggagtttgggcatcctgcagccattaatgatcccaagatagtggtgtataaggaggccgagaagagcccacagctgggactgggctgcctctccttcccgccgccccgggccggggccggccctctcccgagctcagagagtaaatatgagatcgcctctgtcccagtctccttacagacactgaaacctgttaccgacagagcaaacccgaaaatgggcataggaatgctggcatttagtcctgacagctacttcctggcgacaaggaacgacaacattcccaatgccgtctgggtctgggacattcagaagctgaggctgttcgcggtgctcgagcagctgtccccagtgcgcgcgtttcagtgggacccgcagcagccgcggctggccatctgcacgggaggcagcaggctctacctgtggtccccagcgggctgcatgtcggtgcaggtgcctggggaaggcgactttgcagtgctctctctgtgctggcatttaagcggagactcgatggccctcctcagcaaggatcacttctgcctctgcttcctggagacagaggcagtggtcggcacagcctgcagacagctgggcggccacacgtagcagcggtgcactaacgtgtgcagaaacagggctactctgtgtttccagtgtgggaaaaaacacagcttcaccaggaggttctccactgtggtggtctggattcagtgattgattctatttttctatagcaaagcatttttgtaaatatgtatggtataaaactgtagttttattatttaaaataaatacttgctgatttaaaaaaaaaaaaaaaaaaa

SEQ ID NO: 6 - protein, 460 aa, Homo sapiens
MNFSEVFKLSSLLCKFSPDGKYLASCVQYRLVVRDVNTLQILQLYTCLDQIQHIEWSADSLFILCAMYKRGLVQVWSLEQPEWHCKIDEGSAGLVASCWSPDGRHILNTTEFHLRITVWSLCTKSVSYIKYPKACLQGITFTRDGRYMALAERRDCKDYVSIFVCSDWQLLRHFDTDTQDLTGIEWAPNGCVLAVWDTCLEYKILLYSLDGRLLSTYSAYEWSLGIKSVAWSPSSQFLAVGSYDGKVRILNHVTWKMITEFGHPAAINDPKIVVYKEAEKSPQLGLGCLSFPPPRAGAGPLPSSESKYEIASVPVSLQTLKPVTDRANPKMGIGMLAFSPDSYFLATRNDNIPNAVWVWDIQKLRLFAVLEQLSPVRAFQWDPQQPRLAICTGGSRLYLWSPAGCMSVQVPGEGDFAVLSLCWHLSGDSMALLSKDHFCLCFLETEAVVGTACRQLGGHT

SEQ ID NO: 7 - DNA, 777 bp, Homo sapiens
atgggattcgtctttgggtccccaccccgtgcgcccagcaaacagtgggtgagccatgaagatgtgcgagtcagccggaccctccccgtcaggcgcggacccgctgcggccagagaacccagtctgcgccagcccggctcgctcgcgaagccacgggcttcactgacgcgactttccaagacgtgggggtcaccatgggcagaggacatcggttcggagccagatcacgggccccataagcatcagaccataagcagcgccgccactgagagccgctcggaactcgcccagcatgtcgggtcccctagccagggcctggtgtacgtggtcgagggccctggaagccccgatggcctaggaggagcagagaacaactccaagcgcaccgacgcccgcgagctccttccaaacaccgaacgggatccagagcccgagcccacaggcggcggccgggggagggagcagggtgctggccgccgcccgggagtgttcgcgtcctgggtgacccctggaaggacgtggggcccaaactccggctggggttgggagagcagcccccagaggctctccgcgggatcctctgccgggcgggaccgtggctccacaggagaagtgggtggcaagccctgcttggcggaaagcagccgttcccctcctcctgggcctggggcggcgcccctcacccctgttccccgcccctcacccctgttccccgccggccacatcccctgccccttggattccaagcgccccgcgcgccgaggagcccagcgctag

SEQ ID NO: 8 - protein, 258 aa, Homo sapiens
MGFVFGSPPRAPSKQWVSHEDVRVSRTLPVRRGPAAAREPSLRQPGSLAKPRASLTRLSKTWGSPWAEDIGSEPDHGPHKHQTISSAATESRSELAQHVGSPSQGLVYVVEGPGSPDGLGGAENNSKRTDARELLPNTERDPEPEPTGGGRGREQGAGRRPGVFASWVTPGRTWGPNSGWGWESSPQRLSAGSSAGRDRGSTGEVGGKPCLAESSRSPPPGPGAAPLTPVPRPSPLFPAGHIPCPLDSKRPARRGAQR

SEQ ID NO: 9 - DNA, 2234 bp, Homo sapiens
aggggacgcagcgaaaccggggcccgcgccaggccagccgggacggacgccgatgcccggggctgcgacggctgcagagcgagctgccctcggaggccggcgtggggaagatggcccagtccaccgccacctcccctgatgggggcaccacgtttgagcacctctggagctctctggaaccagacagcacctacttcgaccttccccagtcaagccgggggaataatgaggtggtgggcggaacggattccagcatggacgtcttccacctggagggcatgactacatctgtcatggcccagttcaatctgctgagcagcaccatggaccagatgagcagccgcgcggcctcggccagcccctacaccccagagcacgccgccagcgtgcccacccactcgccctacgcacaacccagctccaccttcgacaccatgtcgccggcgcctgtcatcccctccaacaccgactaccccggaccccaccactttgaggtcactttccagcagtccagcacggccaagtcagccacctggacgtactccccgctcttgaagaaactctactgccagatcgccaagacatgccccatccagatcaaggtgtccaccccgccacccccaggcactgccatccgggccatgcctgtttacaagaaagcggagcacgtgaccgacgtcgtgaaacgctgccccaaccacgagctcgggagggacttcaacgaaggacagtctgctccagccagccacctcatccgcgtggaaggcaataatctctcgcagtatgtggatgaccctgtcaccggcaggcagagcgtcgtggtgccctatgagccaccacaggtggggacggaattcaccaccatcctgtacaacttcatgtgtaacagcagctgtgtagggggcatgaaccggcggcccatcctcatcatcatcaccctggagatgcgggatgggcaggtgctgggccgccggtcctttgagggccgcatctgcgcctgtcctggccgcgaccgaaaagctgatgaggaccactaccgggagcagcaggccctgaacgagagctccgccaagaacggggccgccagcaagcgtgccttcaagcagagcccccctgccgtccccgcccttggtgccggtgtgaagaagcggcggcatggagacgaggacacgtactaccttcaggtgcgaggccgggagaactttgagatcctgatgaagctgaaagagagcctggagctgatggagttggtgccgcagccactggtggactcctatcggcagcagcagcagctcctacagaggccgagtcacctacagcccccgtcctacgggccggtcctctcgcccatgaacaaggtgcacgggggcatgaacaagctgccctccgtcaaccagctggtgggccagcctcccccgcacagttcggcagctacacccaacctggggcccgtgggccccgggatgctcaacaaccatggccacgcagtgccagccaacggcgagatgagcagcagccacagcgcccagtccatggtctcggggtcccactgcactccgccacccccctaccacgccgaccccagcctcgtcagttttttaacaggattggggtgtccaaactgcatcgagtatttcacctcccaagggttacagagcatttaccacctgcagaacctgaccattgaggacctgggggccctgaagatccccgagcagtaccgcatgaccatctggcggggcctgcaggacctgaagcagggccacgactacagcaccgcgcagcagctgctccgctctagcaacgcggccaccatctccatcggcggctcaggggaactgcagcgccagcgggtcatggaggccgtgcacttccgcgtgcgccacaccatcaccatccccaaccgcggcggcccaggcggcggccctgacgagtgggcggacttcggcttcgacctgcccgactgcaaggcccgcaagcagcccatcaaggaggagttcacggaggccgagatccactgagggcctcgcctggctgcagcctgcgccaccgcccagagacccaagctgcctcccctctccttcctgtgtgtccaaaactgcctcaggaggcaggaccttcgggctgtgcccggggaaaggcaaggtccggcccatccccaggcacctcacaggccccaggaaaggcccagccaccgaagccgcctgtggacagcctgagtcacctgcagaacc

SEQ ID NO: 10 - protein, 636 aa, Homo sapiens
MAQSTATSPDGGTTFEHLWSSLEPDSTYFDLPQSSRGNNEVVGGTDSSMDVFHLEGMTTSVMAQFNLLSSTMDQMSSRAASASPYTPEHAASVPTHSPYAQPSSTFDTMSPAPVIPSNTDYPGPHHFEVTFQQSSTAKSATWTYSPLLKKLYCQIAKTCPIQIKVSTPPPPGTAIRAMPVYKKAEHVTDVVKRCPNHELGRDFNEGQSAPASHLIRVEGNNLSQYVDDPVTGRQSVVVPYEPPQVGTEFTTILYNFMCNSSCVGGMNRRPILIIITLEMRDGQVLGRRSFEGRICACPGRDRKADEDHYREQQALNESSAKNGAASKRAFKQSPPAVPALGAGVKKRRHGDEDTYYLQVRGRENFEILMKLKESLELMELVPQPLVDSYRQQQQLLQRPSHLQPPSYGPVLSPMNKVHGGMNKLPSVNQLVGQPPPHSSAATPNLGPVGPGMLNNHGHAVPANGEMSSSHSAQSMVSGSHCTPPPPYHADPSLVSFLTGLGCPNCIEYFTSQGLQSIYHLQNLTIEDLGALKIPEQYRMTIWRGLQDLKQGHDYSTAQQLLRSSNAATISIGGSGELQRQRVMEAVHFRVRHTITIPNRGGPGGGPDEWADFGFDLPDCKARKQPIKEEFTEAEIH

SEQ ID NO: 11 - DNA, 4042 bp, Homo sapiens
ctgcagggcctgcgagctgcccgtgcgcgtgcggagggaccgcatcctggaacacctgtcctcgggcaggcagcacggcctgcggacgcccattctcatgtaaatgtcagtgccaacgctggtgtttcaggagtcatcccagcgggctgcgggctattttaggattctctgccctgcaaacgtttccaaagtacgtggacaggccgcctgatgacactacgtttacgggatctgctagtggcttgcctacttagggagtaaaccctgtgaagtctcgcagttttgttaaagtgtgcgtggccacctgaatgctgccttatcacaagccagatacatactggtctgtagggtaactccccactgttgatcctctgagatgattgtggactgggtgctgtgagtcctgccactttgtttaagtgaatgtgtcttttgtccagctcagccgcctcggatctcgctgccaccagccttactgcacacccgtgccacccgcccttgccccgtcagcctcagcctcagctcattctctcaggcagtcccagcattggcacggtacctcctcccgctgtgggccacacgtctctgctccctgtcaaccctcctgccatcagcaccaccaccagcgacttgtctgcccgggaggatgcaacaccatctgcctccaccggccacctttcagtgtttcctgctttccaagtaaagataccagcagtgccctcagagcagaccagccagagtttttctgaagcctcccacagggtgctccccggaggaggcccgagatgctctcgtgactttggagccggggtggctggccaccttggcctgggcatctttggggtgggcttcgggagcccggcactgctgcagagtgtggtggatgagaacagctgctgcttgctgtacgtggtggaggaccagctgtgtgatgtggagcaagccttcagagctgagcatttgggccaacaccagagtggttcgggaacaggatgcagacattgtcctcaacgaccagcggcactttgatccggttttccagttcttgcacaagcaagtttgtgtcagccacgccctggggaggatccactggatcaccgccgtcactgcctgttcccggcggcctctccggcttccctaaagagagcaggtgggactttctacaacgctgctgtgcacgacgtggatgccgtatgcatgttgctgggggaagccactccggacactgtgttttctctgggacatgtcttctgcccagatatggccgccttaaaagatgcagatgctgttgtgatcagcatgaagtttccctgtgaggccgtggttagcgtggacatcagccagcactgcacagacagctgcgaccaggacgtcagccagcactgcacagacagctgcgaccagagactggaggtgacccttgcccttttccacccttcgccagtccactgtgaaaagctgggttgattgtgcgggttagatagaggtcatcagccgggttgattgtgtgggttagacagaggtcatcagccaggttgattgtgtgggttagatagagatcatcagcctggtagattgtgtgggttagatagaggtcatcagccaggttgattgtgcgggttagatagagatcatcagccgggttgattctacaggttagatagaggtcgtcagccgggttgattgtgcgggttagatagagatcatcagccgggttgattgtgcgggttagatagaggtcatcagctgggttgattgtgtgggttagatagagatcatcagctgggttgattgtgtgggttagatagaggtcgtcagctgggttgattgtgtgggttagatagaggtcatcagctgggttgattgtatgggttagatagaggtcatcagctgggttgattgtacgggttagatagaggtcgtcagccgggttgattccgcaggttagatagaggtcgttagctgggtgtgtgggtcccaaggcgtgctgcagatggagaatcagaattccttgggcatcaccgggcggggcatgtccctgtcccttcgctcccagacccaggctagccgctaccaggactcctatcgagagctcttcagacactttgtcagaacccttaaaggtgggtgacgttttcaggaggaacctgggatgtcctgatgctcaatgggtagatgccttccaggctgcagtcagtgcagatgatatgccaatttcaggtggaaaattgcattccagataccgggttcagatttgaaattgtccatctcagtgatcatttacgttgcgtgtacttgagggagattctgagagatgctcctttggggttctgtgcgtgtaccatgttgcctgacacgtcctgagaaatcttcttaaactctgagtttataaaataactacttctgaactcctgagatctagtggataccatgtatcctggaagataggacactttctaccctctgtcagtcctgggggtgactgggaaccagagaggttgagcagaattcctggacctgggtggggcttgtccaagaggggcaggtgggcctctctaggatcagtgtcccacccagaggccagtggccccttcacatgccccaacaagaggaagactgtctggctccgcagtgttgggttttgtcctgaatctgtgcaaatgtgcagggaaataacctcctgaaatcaccaaagagcagttcctcagggccttccgggtgaccgtggccgtggagcagtcgtggtgaaaccggtcagctgtggacctgccctgcgaatcggcagaggcctccgtggtgaagacagaagctccgtgaaccaactcgaggctggagccaagatcctgcctgatatccagttgcctgtttcacttgttactgttactgggagagggagacaaaacctcatggcaatcttgtcctcactggagactcagaaggggaagcattgggaaaccatgtatgtttcatttctggtttaaccaggcttttcaggatgggacttcagaccaaggacacaagttgggcttgcttaggtgttttgtgttgtgcgcaggcctcagagatgctcttccggtcagagttcccttggcagggccttggaggcctctggttggctctctcaggaagagggcaggtcagggattgggcggtgtaaattgactcagaaacctgcggtttcagcttttctgtggcaaacagggccgagggctggtgaagctgttaaggctaaatgtcgcatgcatgaggcgggctgcaggcctccttaggccttttttggggtaattacaccagtatttaaaaacatttttttttgtttgttttgagatggagtcttgccctgtcacccaggctggagtgcaatggtgcgatctcggctcactgcaacctccgtctcccaggttcaagcgattcttctgcctcagccttctgagtagctgggattacacgcgtgtgccaccacgctcggctaatttttgtatttttagtagagatgggatttcaccatgttggccaggctggtctcgaactactgacctcgtgatccacctgccacggcctcccaaagtgctgggattacaggcgtgagccaccatgctcggcctaaaaaacaattttcttgaagaatccgattttgtgcatagtaatgacacagcaccattcctgagaaataggaaatatatgtgtgtggtatgaaaagcccatattctgttcttgtcacctgaatctaggcttcctctttggatgtgaacgcgggaatgaacagtggctgttttccacccaaaggggcgtggagaccttttggaaacgggctttctcctttccattttgcagccgggggcgggtggaaaccttccttcgaagggtagtgccttggggagcagcagacctgctctgagtccagcttagctttccaaaattctgtgtggaacttactggagatgtttttatatatttgaaaataatggcctgtatttctcacgctatacttaaaaaaaataactaaccttttaaacaaagatattcaaactcaaaaaaaaaa

SEQ ID NO: 12 - protein, 201 aa, Homo sapiens
MCLLSSSAASDLAATSLTAHPCHPPLPRQPQPQLILSGSPSIGTVPPPAVGHTSLLPVNPPAISTTTSDLSAREDATPSASTGHLSVFPAFQVKIPAVPSEQTSQSFSEASHRVLPGGGPRCSRDFGAGVAGHLGLGIFGVGFGSPALLQSVVDENSCCLLYVVEDQLCDVEQAFRAEHLGQHQSGSGTGCRHCPQRPAAL

SEQ ID NO: 13 - DNA, 2177 bp, Homo sapiens
gtgatgccaccactgctcccaggagcccacaggacctggagctctggaagctgatctcctcccactgcaccagccagcaggttcatgttcgaggccatcttcccctccacaccccaagccaggctgaagagagatccacgggaaaagccgggcctgtcctcattcaggtccacattcaggcaacaaagctcacttggtctttgcatcccatgcctcatgttacctaaggaggccagcccgtctgagaggcacagttcgatgtccagctcgatggccagggccctggtgctcctccagagcatggccagccgggacgcccggtgcccagaatggaaaccgcaccaaaagccacgcacgctcagcaagtcggtccagaccatcagccgctactacaggaagacgagtgaacccaaggatgccgccagcctcaccggcttcatgtccaaaatggaacttcgaagggtcttccccacgcatcctgactgcccccagttcagcaccagggccacatccatgtcccactgtggttcacccactgaggccgatttgtccggagagattgacaacagctcggagacctggagaggcacccaggacctgttcttggccaggcggggctcagacacgaacgtggacgggtacctccttcccttcagtaagagcatctgcgagttcgattacttgcggaagaggagaaaatcccagactttgagtccggtcaccagcagctcagtcgcatctcagagctgcctgagaaagaggatgccctggtacctctcagtcatccacgagaaggatcactgcctgtctgagctggagatacaggttcagaagaaagacgaggagatcctgctgctccaggaggagagggaggccctgaagacgcagctgaaatgccttctgaaaggcaaaggccaagagacatccatgtccccaggcaggagggagcagctctcagacgcttcgctgaagctgggcaggctgagcctcctgaaggccttctccagacatgaggaggagctgcagcactggtggcagatgcaggaggagtctgcggcaccggagaggggcaaggagcccgacctgggaggtggcgaggaggacgagggcctggaaggggagcccgatggggtggaggacacgggtgcctggggaggtgtgagccagatgggatccgtgcatgaggagggaagcgaggaggaggaagaggaggaaggggacaaggatgaggactcagaggaaagggagctgccggaggaagaggagatccccaggagaagggcctcctccctggccgagtcgtttgaggaggagctgctggcccagctggaggagtacgagcaggtcatcctggacttccagttcaacctggaggccaccaggaccagatactcccttgcaacaggagtgattgcgtctttacaacaacaagtggatttccaagaaacccagctgcgaaagatcaatacggaaaatgagacgctgcagaaggagctccgagagcggaggcagcagctacaagccatgaccgacaagttctccaacctccgagaagataagaaacaccaagagatgatggggctcattgaaaaggacaaccagctcctccgacagcaagtgtcggaactggagagaaagctcaccaagcgggactgtgtcatctcagagttggacaccaaggtcagccagctgcaggagcaggtggaactggaccagaaccacctgcagaggtggaagcagctgcaggaggatttgcagagcaagaaggagatgattcagcaggcagagcagcacacccgcgtggccctggagagctcccagtccaggctcgagaggttaaggaataagatcatccaggccacctttagcatctccgggaccaagtccttggccaacgagatctctgacaatgacatcctggaagccctgcagagaattatctcagagagaagcgactactataatcagctgaagcagaaaggcgtcaaagtgccccccctgcaacagtcagaggccttcctgaccagcaaatccaagaaggggacctccaagtaggcccagccaggcccccaaatacggtcagcccagcagaggccggggcccagctccagaaccacccgcccccaccatgcgtcctgctctcagactcagaattaaaccccggtgttggcactgtc

SEQ ID NO: 14 - protein, 656 aa, Homo sapiens
MFEAIFPSTPQARLKRDPREKPGLSSFRSTFRQQSSLGLCIPCLMLPKEASPSERHSSMSSSMARALVLLQSMASRDARCPEWKPHQKPRTLSKSVQTISRYYRKTSEPKDAASLTGFMSKMELRRVFPTHPDCPQFSTRATSMSHCGSPTEADLSGEIDNSSETWRGTQDLFLARRGSDTNVDGYLLPFSKSICEFDYLRKRRKSQTLSPVTSSSVASQSCLRKRMPWYLSVIHEKDHCLSELEIQVQKKDEEILLLQEEREALKTQLKCLLKGKGQETSMSPGRREQLSDASLKLGRLSLLKAFSRHEEELQHWWQMQEESAAPERGKEPDLGGGEEDEGLEGEPDGVEDTGAWGGVSQMGSVHEEGSEEEEEEEGDKDEDSEERELPEEEEIPRRRASSLAESFEEELLAQLEEYEQVILDFQFNLEATRTRYSLATGVIASLQQQVDFQETQLRKINTENETLQKELRERRQQLQAMTDKFSNLREDKKHQEMMGLIEKDNQLLRQQVSELERKLTKRDCVISELDTKVSQLQEQVELDQNHLQRWKQLQEDLQSKKEMIQQAEQHTRVALESSQSRLERLRNKIIQATFSISGTKSLANEISDNDILEALQRIISERSDYYNQLKQKGVKVPPLQQSEAFLTSKSKKGTSK

SEQ ID NO: 15 - DNA, 324 bp, Homo sapiens
atggccccgcccaccactctagccccgccaccttccggaccagacacctccccgctgctggctccagcccttccccgcgtggccccgcccccgccctcgccccctgcccaggcccggcccctgcggagcccagagacgcggggacacaggggagtggctgctgtgcctttaggcctctgtgccgatgacctgggaggaaggtcagccttccccgctggagggggcccagcaaagcctcagctcctagaaggcctccccaaggccttgaatccaccccggccccgtgctcagtgcatcatgccccccaagccccagccctcctag

SEQ ID NO: 16 - protein, 107 aa, Homo sapiens
MAPPTTLAPPPSGPDTSPLLAPALPRVAPPPPSPPAQARPLRSPETRGHRGVAAVPLGLCADDLGGRSAFPAGGGPAKPQLLEGLPKALNPPRPRAQCIMPPKPQPS

SEQ ID NO: 17 - DNA, 730 bp, Homo sapiens
gcggccgcagtgggcaggtgcgactgtgcgcggcctcgctggctgagaactggcgggggtgggggcgtgccctggactgacccccaccggcctaacccgcggtgcggggccagggccggaactgcccgcccggctccttgcccggctccttgtggctgctggggacccccgacaccagccactttcccttcccggcccttagcaagatcggcttctccggtcacctttatttttttaggctcgaggcgtctgccgcacctcagcccacgacctgccccgctgggaggtgcgggccgctggccaggccctgaccgcaacctggcccagaggccccagccctcaggcaaggttctccggtgaagccacagcctggccacctgtcttgatctccccaccgagaaggccccgcccctcccgctgcagccccacagcatgcagccccaggagagccacgtccactatagtaggtgggaggacggcagcagggacggagtcagcctaggggctgtgtccagcacagaagaggcctcacgctgccgcaggatctcccagaggctgtgcacgggcaagctgggcatcgccatgaaggtgctgggcggcgtggccctcttctggatcatcttcatcctgggctacctcacaggctactatgtgcacaagtgcaaataaatgctgccccgcatgcacgcggggggctggccgcacacgtgagagcacaggcctggagaca

SEQ ID NO: 18 - protein, 78 aa, Homo sapiens
MQPQESHVHYSRWEDGSRDGVSLGAVSSTEEASRCRRISQRLCTGKLGIAMKVLGGVALFWIIFILGYLTGYYVHKCK

SEQ ID NO: 19 - DNA, 2693 bp, Homo sapiens
gtgggtgcctgccagcagctgaggcgccatggcggcggcagcggtgtcagagtcttggccggagctggagctggctgagcgcgagcggcggcgggagctgctgctgacggggcccgggctggaggagcgagtgcgggcggcgggtgggcagctgccgccgcggcttttcaccctgccgctgctgcactacttggaagtgagcggctgcgggagcttgcgcgcgccggggcctggcctggcgcagggcctgccgcagctgcacagcctcgtgctgcggcgcaacgcgctggggcccggcctgagccccgagctcgggccgctgcctgcccttcgggtgctcgacctgtcgggcaacgcgctggaggcgctgccgccgggccaaggcctgggccccgccgagccgccgggccttccgcagctgcagagcctcaacctcagcggcaaccggctgcgcgagctgccagccgacctggcgcgctgcgccccgcgcctgcagagcctcaacctcaccggcaattgcctagactcctttcccgccgagctctttcgccccggcgcgctgcccctgctcagtgaactggcggctgctgacaactgcctccgagaactcagccccgacatcgcccacctggcctcgctcaagacgttggacctctcgaacaaccagctgagcgagatccctgcagagcttgcggactgccccaagctcaaggagatcaatttccgtgggaacaagctgagggacaagcgcctggagaagatggtcagcggctgccagaccagatccatcctggagtacctgcgcgtcggaggccgtggtggcgggaagggcaagggccgtgccgagggctcggagaaggaagagagccggaggaagaggagggagaggaagcagaggcgggaaggtggtgatggggaggagcaggacgtgggagatgccggccggctgctgctcagggtcctgcacgtctctgaaaaccccgtacctctgacagtcagagtgagccccgaggtccgggatgtgcggccctacattgtgggggccgtggtgcgaggcatggacctgcagccagggaatgcactcaagcgcttcctcacctcgcagaccaagctccacgaagatctctgtgagaagaggacggctgccacccttgccacccacgagctccgtgccgtcaaagggcccctgctgtactgcgcccggcccccacaggacctcaagattgtccccttggggcggaaagaagccaaggccaaggagctggtgcggcagctgcagctggaggccgaggagcagaggaagcagaagaagcggcagagtgtgtcgggcctgcacagataccttcacttgctggatggaaatgaaaattacccgtgtcttgtggatgcagacggtgatgtgatttccttcccaccaataaccaacagtgagaagacaaaggttaagaaaacgacttctgatttgtttttggaagtaacaagtgccaccagtctgcagatttgcaaggatgtcatggatgccctcattctgaaaatggcagaaatgaaaaagtacactttagaaaataaagaggaaggatcactctcagatactgaagccgatgcagtctctggacaacttccagatcccacaacgaatcccagtgctggaaaggacgggccctcccttctggtggtggagcaggtccgggtggtggatctggaagggagcctgaaggtggtgtacccgtccaaggccgacctggccactgcccctccccacgtgactgtcgtgcgctgacgccagggccgcctgtccgcgtttgtttggccggttttgcggaggtttctatgcggcaatgctgaattatccgttagattttcaccccagtttttttgttggttttttttttgagatggagtctcgctctgtcgccaggctggagtgcagtggcgtgatctcgagtcactgcagcctgtgtctcctgggttcaagcgattctcctgcctcagcctcccaagtagctgggactacaggtgtgtgccactaagctcagctaatttttgtatttttagtagagacggggtttcaccattttgaccaggatggtcttgatctcttgacctcatgatctgtccacctctgcccctcaaagtgctgggattacgtgatccacccgcctcagcctcccaaagtgctgggattacaggcgtgagctgtgcctggcccaccccagcattttttaagatgtatgtattcgttgttctgtttttccagatgattctgtcgtaaagtgatgctatgttgtcgttaaaacatcaaagtgattttacggtttttgatgggattattcaagtgtcagaattaactgttcaaaatgttctgaatcatgtagatacatggcaggtaactgtttatgggagaaaagtacagtgctgttacgtggcactgtacagtcatgtgccacgtaacagcgtctgggtcagtgacggacacttacctgacagcggatccacaatattctcgtgcagtgtgtttggaatcctggtctgggctctcgtcgttggccttgtagatcaagtaggggaagtgagtgatgttcagtcatgctgctgggacacttggttttccagatgaaaacacataaataaaactacatgcaccatcaaaaaaaaaaaaaaaaaaaaaaaaaaaaaaaaaaaaaaaaaaaaaa

SEQ ID NO: 20 - protein, 583 aa, Homo sapiens
MAAAAVSESWPELELAERERRRELLLTGPGLEERVRAAGGQLPPRLFTLPLLHYLEVSGCGSLRAPGPGLAQGLPQLHSLVLRRNALGPGLSPELGPLPALRVLDLSGNALEALPPGQGLGPAEPPGLPQLQSLNLSGNRLRELPADLARCAPRLQSLNLTGNCLDSFPAELFRPGALPLLSELAAADNCLRELSPDIAHLASLKTLDLSNNQLSEIPAELADCPKLKEINFRGNKLRDKRLEKMVSGCQTRSILEYLRVGGRGGGKGKGRAEGSEKEESRRKRRERKQRREGGDGEEQDVGDAGRLLLRVLHVSENPVPLTVRVSPEVRDVRPYIVGAVVRGMDLQPGNALKRFLTSQTKLHEDLCEKRTAATLATHELRAVKGPLLYCARPPQDLKIVPLGRKEAKAKELVRQLQLEAEEQRKQKKRQSVSGLHRYLHLLDGNENYPCLVDADGDVISFPPITNSEKTKVKKTTSDLFLEVTSATSLQICKDVMDALILKMAEMKKYTLENKEEGSLSDTEADAVSGQLPDPTTNPSAGKDGPSLLVVEQVRVVDLEGSLKVVYPSKADLATAPPHVTVVR

SEQ ID NO: 21 - DNA, 3770 bp, Homo sapiens
gcacgcgcagaggccctggcccagggctgggcttggttgtcatgagagtggaggctgcggccggggctatgggcagaggcggccgggtctgcttcttccctgtcactgccgcagcagcttggggtgcaaggcggcctggggcggcggaaggggcgccccccgagttccgtctgaggaagcggcggctgccgaggaagtccacgagagccgggtcccgcacgcccctggggtccgggtgctgaggcgccgcctggccgcctccccgggccgcggcaccgctccgacccagccgccctctccaccggggccgcggcagcgccagtcggggcccttccctctaagcagcccaaacgtgcagaatgccccacaagattggatttgtagtcgtcagctcatctggacacgaagacggcttcagtgcccgggagctcatgatccacgcgccaactgtcagtgggtggcggtcacctagattttgccagtttccacaagaaattgtccttcaaatggtggagagatgtcgaataaggaaactgcagttacttgctcaccagtatatgatttcaagtaaaattgagttctacattagtgaaagcttgcctgaatattttgcaccctatcaagcagagcggtttcgaagacttggctacgtgtctctctgtgataatgaaaagacaggttgcaaagcccgggaactaaaatcagtttatgtggatgcagtaggacaatttcttaaactgatttttcaccaaaaccatgtcaacaaatacaacatatataatcaggttgctttggttgccataaatatcattggagaccctgcagatttcagtgatgaaagcaatactgcctctcgagagaagttgattgaccactaccttgggcacaacagcgaggaccctgctctagaaggaacgtacgccaggaaatctgactatatctctccgctagatgacttagcttttgatatgtaccaagatccagaagttgcacagatcatacgaaaattagatgaaagaaaacgggaagctgtccaaaaggaacgctatgattatgccaagaaactaaaacaagccattgctgatttgcaaaaggttggtgaacgccttgggaggtatgaggtagagaaacgctgtgccgtggagaaggaagactacgatctcgccaaggagaagaagcagcagatggagcagtatcgtgccgaggtgtacgagcagctggagctgcacagcctcctggatgccgagctgatgcgaagaccttttgatttgcccctccagcccctcgctcgttctggcagtccttgccaccaaaagccaatgccctcactaccacaactggaagaaagaggaacagaaaaccagtttgcagaacctttccttcaggaaaagccttcatcatattctctaactatttctcctcagcattctgcagtagacccgttactccctgccacagatcctcatccaaagatcaatgcagagtccctgccctacgatgagcggcctcttccagctattcgtaagcattatggggaggcagtggtggagccggaaatgagtaatgcagacatcagcgatgctcggaggggaggcatgttaggggagccagagcccttaaccgagaaggccttgagagaagccagctctgccatcgatgtgttgggagaaaccttggttgctgaggcctattgtaagacgtggtcctaccgagaggatgcactgcttgccttgtctaagaagttaatggaaatgcctgttggaaccccaaaagaagatttaaagaacacactgagagcatccgtctttctcgttagaagagccataaaggacattgtgacctccgtttttcaggcttctttgaaattgttgaaaatgatcattacacaatatattcctaaacataaactgagtaaacttgaaacagctcactgtgtggagaggaccattcccgttttgctcaccagaactggagattcttctgcccgcctccgcgtcacagctgcaaattttattcaggaaatggccttgtttaaagaagttaagtctctccaaattattccatcctacctggtgcagccattgaaagcaaactcttcagttcacctggcaatgagtcagatgggcctcctggcccggctgctgaaagacctgggcactggcagctcgggcttcaccattgacaacgtgatgaagttttcagtgagtgccctggagcatagagtgtatgaggtccgcgagacggcggttcgaattattttggacatgtacagacagcaccaggcttccatcctggagtaccttcctccagacgacagcaacacacgcaggaacattctctacaaaacaatttttgagggatttgctaaaatagatggcagagctacagatgctgagatgagggcacggagaaaagcggctacagaagaagcagaaaaacaaaagaaagaagaaataaaagctttacaagggcagctggcagcactgaaagaaattcaggctgaagttcaggaaaaagaaagtgatgctgtgaagccaaagaatcaggacattcaaggagggaaagcagcccctgctgaagctctgggaatcccggatgagcactatctagataatttgtgtattttttgtggggaaaggagtgaatccttcacagaggaaggtctggatctccactactggaagcactgtctcatgctgacaagatgtgaccactgcaaacaggtggtcgagatatccagtctgacggagcacttgctgacggaatgtgacaaaaaagacgggtttggaaagtgttaccgttgcagtgaggctgttttcaaggaagagctgcccagacacataaaacacaaggattgcaaccctgccaaaccggagaagctggcaaaccggtgtcccctgtgtcatgagaacttcagccctggagaagaggcatggaaagctcacctgatgggcccagccggctgcacgatgaacctgcgcaagacacacattctgcagaaggccccggcactgcagccagggaaaagctcagctgtggccgcatcaggccccttggggtcaaaggccggaagcaagatccccaccccgaagggcggactgagcaagagctccagcaggacgtacgccaagcgctgacgcggcgctcgggctccttggtctctgtgagggatggagcgggtctcctgattctacaccatctctccagaactctctggccttggtggccccatgctctggctgctgtccccagctccccgccgtgcacgcctcttacgcgtctgtgccgtcagctctcgtgcaaacgatatggatgcagctaaccaaagatcctgcgtgcagtgccaggacctggccgcactgtacattaagccttcagggctgtctcaggccttccttagaatcagagaaggaagcgtcctgtttggagagagccagagagcaccgccgggaggcgctcgcgcaaggccacggtcagcacaggcacggtcccgctttccttagtgcttggagcaatttccataaaacattcaccagaaaccttttgcacatcggtctctgccacacgcagtagaatttccgcagggctgtggctcggccagcagcggttccaggagagtggcggtgcgcacgggcctccagccgtgccttccccctgcaggccccgtctgctgggcctgctgcccagtgcactcagccccaggtagcagaactcacgttcccactatagcaagaaataaaggcaaaagagaacatctttaaaaaaaaaaa

SEQ ID NO: 22 - protein, 925 aa, Homo sapiens
MPHKIGFVVVSSSGHEDGFSARELMIHAPTVSGWRSPRFCQFPQEIVLQMVERCRIRKLQLLAHQYMISSKIEFYISESLPEYFAPYQAERFRRLGYVSLCDNEKTGCKARELKSVYVDAVGQFLKLIFHQNHVNKYNIYNQVALVAINIIGDPADFSDESNTASREKLIDHYLGHNSEDPALEGTYARKSDYISPLDDLAFDMYQDPEVAQIIRKLDERKREAVQKERYDYAKKLKQAIADLQKVGERLGRYEVEKRCAVEKEDYDLAKEKKQQMEQYRAEVYEQLELHSLLDAELMRRPFDLPLQPLARSGSPCHQKPMPSLPQLEERGTENQFAEPFLQEKPSSYSLTISPQHSAVDPLLPATDPHPKINAESLPYDERPLPAIRKHYGEAVVEPEMSNADISDARRGGMLGEPEPLTEKALREASSAIDVLGETLVAEAYCKTWSYREDALLALSKKLMEMPVGTPKEDLKNTLRASVFLVRRAIKDIVTSVFQASLKLLKMIITQYIPKHKLSKLETAHCVERTIPVLLTRTGDSSARLRVTAANFIQEMALFKEVKSLQIIPSYLVQPLKANSSVHLAMSQMGLLARLLKDLGTGSSGFTIDNVMKFSVSALEHRVYEVRETAVRIILDMYRQHQASILEYLPPDDSNTRRNILYKTIFEGFAKIDGRATDAEMRARRKAATEEAEKQKKEEIKALQGQLAALKEIQAEVQEKESDAVKPKNQDIQGGKAAPAEALGIPDEHYLDNLCIFCGERSESFTEEGLDLHYWKHCLMLTRCDHCKQVVEISSLTEHLLTECDKKDGFGKCYRCSEAVFKEELPRHIKHKDCNPAKPEKLANRCPLCHENFSPGEEAWKAHLMGPAGCTMNLRKTHILQKAPALQPGKSSAVAASGPLGSKAGSKIPTPKGGLSKSSSRTYAKR

SEQ ID NO: 23 - DNA, 8207 bp, Homo sapiens
agacgctcgcgagcaaccctccgcgctccggagcctcctcagcctcccgcacaccccgagacgctcgccccgctgggcctcggtccccgcctcctcccccgtccttttcccctctctcgctccccacattgtctctgcctcattttctctcctagttgaggattaaaaaaaaaaaaaaatcaccatcatcctcagggagccccctcgccctcggaaaacaaaaccagacatgatcctgggctcctgcttctgaaagatctgcccgaccgaggaggagggagcctaggttcaagtcgcaggaaaggtcacggcagggaagccccctcagcccctccgcgtcgcctccccgcgggccgcccctctcggccctgcgccccgcggccccgcagcctccgcgcggcctcccgccccatccccgccactttccccggagctgggccgcgaacacctcactattgatggtgtagcgctttaggggaaggaggtgattgtctaggagtaactgtatgtgcgctcagcaccgggtcacaaccaccgtgggatccacttacagagaagatttgtggagagcttcagcctgtttatggtgttactgagaaaggaattgtggccatttgatataattctggatggaagacctcttatttgtattacattgaattagagcatttttgaaacgttggggttgttggagtggttggattttccctggaattgagtgagaaattcagaagactgaagcccaggcttactgtctacctttcacggaggcctagccgtgagaggacagaagaaggcacgtggcgaatcatgacagcggacaaagacaaagacaaagacaaagagaaggaccgggaccgagaccgggaccgagagagagagaaaagagacaaagcaagagagagtgagaattcaaggccacgccggagctgtaccttggaaggaggagccaaaaattatgctgagagtgatcacagtgaagacgaggacaatgacaacaatagtgccaccgcagaggagtccacgaagaagaataagaagaaaccaccgaaaaaaaagtctcgttatgaaaggacagataccggtgagataacatcctacatcactgaagatgatgtggtctacagaccaggagactgtgtgtatatcgagagtcggaggccaaacacaccgtatttcatctgtagcattcaagacttcaaactggtccacaactcccaggcctgttgcagatctccaactcctgctttgtgtgaccccccagcatgctctctgccggtggcatcacagccaccacagcatctttctgaagccgggagagggcctgtagggagtaagagggaccatctcctcatgaacgtcaaatggtactaccgtcaatctgaggttccagattctgtgtatcagcatttggttcaggatcgacataatgaaaatgactctggaagagaacttgtcattacagacccagttatcaagaaccgagagctcttcatttctgattacgttgacacttaccatgctgctgcccttagagggaagtgtaacatctcccatttttctgacatatttgctgctagagagtttaaagcccgagtggattcatttttctacatattaggatataaccctgagacaaggaggctgaacagtacccagggggagattcgtgtcggtcctagtcatcaggccaaacttccagatctgcaaccatttccttctccagatggtgatacagtgacccaacatgaggaactggtctggatgcctggagttaacgactgtgacctccttatgtacttgagggcagcaaggagcatggcggcatttgcaggaatgtgtgatggaggctctacagaggacggctgtgtcgcagcctctcgggatgacaccactctgaatgcactgaacacactgcatgaaagcggttacgatgctggcaaagccctgcagcgcctggtgaagaagcctgtgcccaagctcatcgagaagtgctggaccgaggacgaagtgaaacgcttcgttaagggactcaggcagtacgggaagaacttcttcagaattagaaaggagctgcttcccaataaggaaacaggggagctgatcaccttctattactattggaagaagacccccgaagcagccagctcccgagcccatcgtaggcaccgcaggcaggccgtgttcaggaggattaagactcgcaccgcgtccacacccgtcaacacaccctccagacccccgtccagtgaattcttggacctaagttcagccagtgaagatgacttcgacagtgaggacagtgagcaggagctgaaggggtacgcctgccgccactgcttcaccaccacctccaaagattggcaccacggaggccgggagaacatcctgctttgcaccgactgtcgcatccacttcaagaaatacggtgagctcccgcccattgagaagcccgtggacccgccaccgtttatgttcaaacccgtcaaggaagaggatgatgggctcagtgggaagcatagcatgaggacacggcggagtcggggctcgatgtcgacactacgcagtggtcggaagaagcagccagccagccctgatggtcgcacctcacccatcaatgaagacatccgctccagcggccggaactcccccagcgctgccagtacctccagcaatgacagtaaagcagagacagtgaagaagtcggccaagaaggtgaaggaggaagcctcttcccctcttaagagtaacaaacgccagcgggagaaggtggcctctgatacggaggaggctgacaggaccagctccaagaagacaaaaacgcaggagatcagcaggcccaactcgccatctgaaggtgagggagagagttcagacagtcgcagcgtcaacgatgagggtagcagtgaccccaaagacatcgaccaggacaatcgcagcacgtccccgagcatccccagcccccaggacaatgagagtgactcggactcgtcagcccagcagcagatgctgcaggcccagcccccagccttgcaggctcccactggggtcaccccagctccctcctcagctcctccagggacccctcagctgcccacgccagggcccacgccctctgccactgcagttcccccacagggctcccccacggcctcccaggcccctaaccagccacaggctcccacagcgcctgttccccacacccacatccaacaggcaccggccttgcacccccagcggccgccctcaccgcatcccccgccgcatccctcgccacatcccccgctgcagcctctgactgggtcggcgggccagccttctgcaccctctcatgcccagcccccactgcacggtcagggcccacccggccctcacagcctgcaggctgggcccctgctgcagcacccaggccccccacagccctttggcctccctccccaggcctcccaaggccaggcccctctggggacctccccagcagcagcgtaccctcacacctccctgcagctgccagcctctcagtcagcgctgcagtcccaacagcctccacgggagcagcccctgccaccagcgcccttggccatgccccacatcaagcccccgcctaccactcccatcccccagctgccggcgccacaggcccacaagcaccctccccacctctcggggccctcacccttctccatgaatgccaacctgcctccccctccagccctgaagcccctgagctccctgtccacacatcaccccccgtcggctcaccccccacccctgcaactcatgcctcagagccagccattgccctcctcgcccgcccagccccccgggctgacccagagccagaacctgcccccgccccctgcctcccacccccctacaggcctccaccaggtggccccccaacccccgtttgctcagcacccctttgtccctggaggccctcctcccatcacccctccgacctgcccctccacctctaccccaccggcgggacctggcacctcggcccagccaccctgctctggtgcggcggcttcaggaggcagcatagcgggggggtcgtcctgcccactccccaccgtccagatcaaggaggaggctctggacgacgctgaggagcctgagagcccccctcccccaccaaggagcccgtccccggagcccactgtggtggacacccccagtcacgccagccagtcagctaggttctacaaacacctggaccggggctacaactcgtgtgcccggacagacctgtacttcatgcctctggccgggtccaagctggccaagaagagggaggaggccattgagaaggccaagcgcgaggctgagcagaaagcccgagaggagcgagagcgggagaaggagaaggagaaggagcgggagcgggagcgagagcgggagcgcgaggcagagcgggcggctaaggcgtccagctcagcgcatgaaggtcgcctcagtgacccacagctcagtggtcctggccacatgcggccatccttcgagccaccaccaaccaccattgctgctgtgcccccctacatcgggcccgacacacctgcccttcggactctgagcgagtacgcccggccccacgtcatgtcgcccaccaaccgcaaccaccccttctacatgccccttaaccccacggaccccctgctggcctaccacatgcctggcctctacaacgtcgaccccaccatccgcgagcgggagctccgggagcgggagatccgagagcgggagatccgagagcgggagctgcgggagaggatgaagccgggcttcgaggtgaagcccccagagctggaccccctgcacccagccgccaaccccatggagcactttgcccggcacagcgccctcaccatccccccgaccgccgggccccacccttttgcttctttccacccgggcctgaaccccttggagagggagagactggccctggcgggcccccagctgcggcccgagatgagctaccctgacagactggcagccgagcgtatccacgcagagcgcatggcatcgctgaccagcgatcccctggcccgactgcagatgttcaacgtgactccgcaccatcaccagcactctcacattcactcccacctccacctccaccagcaggaccccctccaccaaggttcagcaggccccgttcacccgctggtcgaccccctgactgccggtccccacctggctcgcttcccctacccgcctggcactctccccaaccctctgcttggacagcccccacacgagcacgagatgcttcgccacccagttttcggcaccccctacccccgtgacctgcctggggccatcccaccccccatgtcagcagcccaccagctgcaggccatgcatgcccagtcggccgagctgcagagactggccatggagcagcagtggctgcatggacacccccacatgcatggtggccacctaccaagtcaggaagattattacagtcgactgaagaaagaaggtgacaagcagttataagttatttatttgttaacgctggctgtggaaaccccagttcttggggggagaaacaggactttttacataaaataggagctgcaaaagcaaaaagaatatcttctaaagatttctttatatatttaaaaacccacaactaaaaatgtatccacatagtagtgttcgtttgtcgagaggatttcctgagactggtttggatctccctgcatgacagtcccccagaaacttagtgagtcctggactggactgaacatccagaaagcttccctgcaatcttggggtttggctttagttttcttttccttgatttctcagtaggtgctagaatccagttcacacccttcactgtgcgtgcagacacactgacacactccgccacgagtgctccagagcccacgaggcttgcagatcgggggcataggaatttggaatccaagagctataatttttaaaaaaaaaaatcttttattttaatacattgtaggaaatcttcataattggagaaagttctgcagcatggctttttacgtctgtaaataaataattttagaacagcctttttttcttccataaactactattgtgatctattttttccagccatgtcactaattgtgaattcctaccaactattgacagaatacagagttgattttttaataaaaagttatatataattatccctttaattaaagggagcaaaggggcgttccacatggacagaggcttggaccgaggcctggtcacagcagcgagcatccagggtttgcagggacgatgttacagactctgttttctgcctggcgtttcacttgtgtctgctcctagcctgtgctctgccagcagcacagacatctgctccatcagacctcttccattttgcacagggagtgcaggaggtgaatgttcactttctgttctccagtgtcactgttctgtttccacgggatggaaagcgcatgggcctgtgtccattgtagatttccttctagatttctgtgtacacacacttgattgttctggatgaatgtcttttttaatactccgaaaatttcatcatctaagaaaatgattccatacaaataactcagcacacaagtgacccaggacatatgcctgccaaagggatgtgttagaaggctgccttctcatgcgcattgtcacttggatcttgtggtgaggacggccccatctttcttgccacagattgaggccacttttgagcaagggagatcctggagttaagacaggtgttgggggcagcctgtattttaccctaggggcaggtctgcatggtgaccccacattgcactggtaaaccatttgagtcccactcttcatcctggaagtgggaactggagtcccacccacagtgcattcagaaagcatgctgtgtgggggctgcttctcaggaggccaggcccttctgagcggaaccgtcctggagagagcctgccctcgtttccaggctgcagccgtaacgcactttctcccaggctgagggcgggtgttctggggtgtctgccctctgtcggccctgcttcctgccaggacgtggcctcttccgatccttttctctcagacactggaggtctcttctgccattgtgctggtcccatcccaagaattgtaggacagagaccacactgggtcggcggacacaaagtccatccaggacccaggccgcagagggagcaggaagagatgctgatagtttgatctagaaaccagcagctactggctcaaattcaggttctggcgtcaaatagcgacatttccagtttctcttaaaaaccgtgtttggtttcagttgggataggcttgttttgtctgttgaaaatgtttctagttttttttctttcatttttctctcattccatttctgccttaactttagtttgttcacagggaggcaaagctgacatgaaccttttgtcgtgggacttcaggccacattggcttgaaggcattcgtttccttctggggtggggacaggccctcatggcaggcttgttcccgtggctctgagcgaggcctcttcctgctgggctcccagactcctgcatccaggcccccaccttctcggcttctggtttttctttctttttggtagaacacaacatctaccattcagttaaaccttctttatctcctcctttggcatccatttttccaaagaagagtcgagtcctctgaggtctgtgcttgaaagccgtccgaaggcattcttgttagctttgcttttctccccatatcccaaggcgaagcgctgagattcttccatctaaaaaaccctcgacccgaaaccctcaccagataaactacagtttgtttaggaggccctgaccttcatggtgtctttgaagcccaaccactcggtttccttcggattttcctccctttgttcggggtttggtttggctcctctgtgtgtgtccgtatcttgttcggtgtcctcgaggttgagcttcactccactgcggcagaggcagcgtgcacactcggatttgctacgtttctatatatcttgaagctaaatgtatatatgagtagtttgccatgagataacacagtgtaaacagtagacacccagaaatcgtgacttctgtgttctctccatttgagtattttgtaatttttttgaaatatttgtggacataaataaaaccaagctacactacaaaaaaaaaaaaaaa

SEQ ID NO: 24 - protein, 1566 aa, Homo sapiens
MTADKDKDKDKEKDRDRDRDREREKRDKARESENSRPRRSCTLEGGAKNYAESDHSEDEDNDNNSATAEESTKKNKKKPPKKKSRYERTDTGEITSYITEDDVVYRPGDCVYIESRRPNTPYFICSIQDFKLVHNSQACCRSPTPALCDPPACSLPVASQPPQHLSEAGRGPVGSKRDHLLMNVKWYYRQSEVPDSVYQHLVQDRHNENDSGRELVITDPVIKNRELFISDYVDTYHAAALRGKCNISHFSDIFAAREFKARVDSFFYILGYNPETRRLNSTQGEIRVGPSHQAKLPDLQPFPSPDGDTVTQHEELVWMPGVNDCDLLMYLRAARSMAAFAGMCDGGSTEDGCVAASRDDTTLNALNTLHESGYDAGKALQRLVKKPVPKLIEKCWTEDEVKRFVKGLRQYGKNFFRIRKELLPNKETGELITFYYYWKKTPEAASSRAHRRHRRQAVFRRIKTRTASTPVNTPSRPPSSEFLDLSSASEDDFDSEDSEQELKGYACRHCFTTTSKDWHHGGRENILLCTDCRIHFKKYGELPPIEKPVDPPPFMFKPVKEEDDGLSGKHSMRTRRSRGSMSTLRSGRKKQPASPDGRTSPINEDIRSSGRNSPSAASTSSNDSKAETVKKSAKKVKEEASSPLKSNKRQREKVASDTEEADRTSSKKTKTQEISRPNSPSEGEGESSDSRSVNDEGSSDPKDIDQDNRSTSPSIPSPQDNESDSDSSAQQQMLQAQPPALQAPTGVTPAPSSAPPGTPQLPTPGPTPSATAVPPQGSPTASQAPNQPQAPTAPVPHTHIQQAPALHPQRPPSPHPPPHPSPHPPLQPLTGSAGQPSAPSHAQPPLHGQGPPGPHSLQAGPLLQHPGPPQPFGLPPQASQGQAPLGTSPAAAYPHTSLQLPASQSALQSQQPPREQPLPPAPLAMPHIKPPPTTPIPQLPAPQAHKHPPHLSGPSPFSMNANLPPPPALKPLSSLSTHHPPSAHPPPLQLMPQSQPLPSSPAQPPGLTQSQNLPPPPASHPPTGLHQVAPQPPFAQHPFVPGGPPPITPPTCPSTSTPPAGPGTSAQPPCSGAAASGGSIAGGSSCPLPTVQIKEEALDDAEEPESPPPPPRSPSPEPTVVDTPSHASQSARFYKHLDRGYNSCARTDLYFMPLAGSKLAKKREEAIEKAKREAEQKAREEREREKEKEKEREREREREREAERAAKASSSAHEGRLSDPQLSGPGHMRPSFEPPPTTIAAVPPYIGPDTPALRTLSEYARPHVMSPTNRNHPFYMPLNPTDPLLAYHMPGLYNVDPTIRERELREREIREREIRERELRERMKPGFEVKPPELDPLHPAANPMEHFARHSALTIPPTAGPHPFASFHPGLNPLERERLALAGPQLRPEMSYPDRLAAERIHAERMASLTSDPLARLQMFNVTPHHHQHSHIHSHLHLHQQDPLHQGSAGPVHPLVDPLTAGPHLARFPYPPGTLPNPLLGQPPHEHEMLRHPVFGTPYPRDLPGAIPPPMSAAHQLQAMHAQSAELQRLAMEQQWLHGHPHMHGGHLPSQEDYYSRLKKEGDKQL

SEQ ID NO: 25 - DNA, 790 bp, Homo sapiens
atggagggtgttgaagagaagaagaaggttcctgttgtgccagaaacccttaagaaaaagcaaaggaatttcacagagctgaagatcaagctcctgagaaagaagtttgcccaaaacatgctttgaaaggcaaggagggagcttatttatgaaaaagcatagtgctatcacaaggaatataggcagatgtacagaactgaaattcgaatggcaaggatggcaagaaaagctggcaacttctgtgtacctgcagaacccaaattggcctttgtcatcaggaccagaggtgccaatggtgtgagcccagaggtctgaaaggtgttgcagcttcttcgcctttatcaaatcttcagtggaacctttgtgaagctcaacaaggcttcagttaacatgctgaggattgtagagccatatattacatgggggaacccaaatctgaagtcagtaaatgaactaatctacaagcgtggttatggcaagatgaataaacaaattgctttgacagataacgctttgattgctctatctcttggtaaatatggcatcatctgcatggaggatctgattcatgacatctatactgttggaaaacgctttaaagaagcaaataacttcctgtggcccttcaaattattttctccacaagatagaatgaagaaaaaccacccattttgtagaaggtggagatgctggcaacagggaggaccagatccacaggcttcttagaagaatgaaccgaggtgtttaccacaattatttttctagtctgatcagtttaaataaacagtag

SEQ ID NO: 26 - DNA, 1812 bp, Homo sapiens
tagctaggcaggaagtcggcgcgggcggcgcggacagtatctgtgggtacccggagcacggagatctcgccggctttacgttcacctcggtgtctgcagcaccctccgcttcctctcctaggcgacgagacccagtggctagaagttcaccatgtctattctcaagatccatgccagggagatctttgactctcgcgggaatcccactgttgaggttgatctcttcacctcaaaaggtctcttcagagctgctgtgcccagtggtgcttcaactggtatctatgaggccctagagctccgggacaatgataagactcgctatatggggaagggtgtctcaaaggctgttgagcacatcaataaaactattgcgcctgccctggttagcaagaaactgaacgtcacagaacaagagaagattgacaaactgatgatcgagatggatggaacagaaaataaatctaagtttggtgcgaacgccattctgggggtgtcccttgccgtctgcaaagctggtgccgttgagaagggggtccccctgtaccgccacatcgctgacttggctggcaactctgaagtcatcctgccagtcccggcgttcaatgtcatcaatggcggttctcatgctggcaacaagctggccatgcaggagttcatgatcctcccagtcggtgcagcaaacttcagggaagccatgcgcattggagcagaggtttaccacaacctgaagaatgtcatcaaggagaaatatgggaaagatgccaccaatgtgggggatgaaggcgggtttgctcccaacatcctggagaataaagaaggcctggagctgctgaagactgctattgggaaagctggctacactgataaggtggtcatcggcatggacgtagcggcctccgagttcttcaggtctgggaagtatgacctggacttcaagtctcccgatgaccccagcaggtacatctcgcctgaccagctggctgacctgtacaagtccttcatcaaggactacccagtggtgtctatcgaagatccctttgaccaggatgactggggagcttggcagaagttcacagccagtgcaggaatccaggtagtgggggatgatctcacagtgaccaacccaaagaggatcgccaaggccgtgaacgagaagtcctgcaactgcctcctgctcaaagtcaaccagattggctccgtgaccgagtctcttcaggcgtgcaagctggcccaggccaatggttggggcgtcatggtgtctcatcgttcgggggagactgaagataccttcatcgctgacctggttgtggggctgtgcactgggcagatcaagactggtgccccttgccgatctgagcgcttggccaagtacaaccagctcctcagaattgaagaggagctgggcagcaaggctaagtttgccggcaggaacttcagaaaccccttggccaagtaagctgtgggcaggcaagcccttcggtcacctgttggctacacagacccctcccctcgtgtcagctcaggcagctcgaggcccccgaccaacacttgcaggggtccctgctagttagcgccccaccgccgtggagttcgtaccgcttccttagaacttctacagaagccaagctccctggagccctgttggcagctctagctttgcagtcgtgtaattggcccaagtcattgtttttctcgcctcactttccaccaagtgtctagagtcatgtgagcctcgtgtcatctccggggtggccacaggctagatccccggtggttttgtgctcaaaataaaaagcctcagtgacccatgag

SEQ ID NO: 27 - protein, 434 aa, Homo sapiens
MSILKIHAREIFDSRGNPTVEVDLFTSKGLFRAAVPSGASTGIYEALELRDNDKTRYMGKGVSKAVEHINKTIAPALVSKKLNVTEQEKIDKLMIEMDGTENKSKFGANAILGVSLAVCKAGAVEKGVPLYRHIADLAGNSEVILPVPAFNVINGGSHAGNKLAMQEFMILPVGAANFREAMRIGAEVYHNLKNVIKEKYGKDATNVGDEGGFAPNILENKEGLELLKTAIGKAGYTDKVVIGMDVAASEFFRSGKYDLDFKSPDDPSRYISPDQLADLYKSFIKDYPVVSIEDPFDQDDWGAWQKFTASAGIQVVGDDLTVTNPKRIAKAVNEKSCNCLLLKVNQIGSVTESLQACKLAQANGWGVMVSHRSGETEDTFIADLVVGLCTGQIKTGAPCRSERLAKYNQLLRIEEELGSKAKFAGRNFRNPLAK

SEQ ID NO: 28 - DNA, 903 bp, Homo sapiens
atggaaaagcaacttccactcccaactcccgctgtgctaagcagctcgcgtaaatcgggggcccagcacgtgcgcctggcattgcgcccccgccccgggcctcggggtgagcgggggcgccagttcccacccagggaggcggcttgcacgtgcccccgaccccgccacgctgggcctgcgggcgcgccgcctccctcggagggaaaagagccccacaagcccagaaaagccctgcgccgcctgcccgttgctcagcccttccccaatcattacctagccactgggtctcgtcgcctaggagaggaagcggagggtgctgcagacaccgaggtgaacgtaaagccggcgagatctccgtgctccgggtacccacagatactgtccgcgccgcccgcgccgacttcctgcctagctaaggcgagccccacccacttcccgcctccggggcacgccccctcagctccgcctcgccattcgtcgggagagccgtcactcattccctcacctcccggaaaggggtgggactgcgacggctgcagtagcgtggaaaggggggtgacgtcccgcggacttgaggcgggcagatctggggggccccgactccccagcggccctgtagtggtgcgggcgaaactctggccccagataggaccggtgagccgaactggggtgtgcggagccggggctccgggggatggcccggggcggcgtggcgggcatgagagctcggggctccgtcacgtactccgagtcccgcacgcactcagcgtcgctctggggccccacgtccggccctcgaccttgctgacaactttggcggcccgggcctgccgcggccctcctgccccgcccctcctgcctcgcgccgcgatccgagagaccccgttggcgtcgagtcgttga

SEQ ID NO: 29 - protein, 300 aa, Homo sapiens
MEKQLPLPTPAVLSSSRKSGAQHVRLALRPRPGPRGERGRQFPPREAACTCPRPRHAGPAGAPPPSEGKEPHKPRKALRRLPVAQPFPNHYLATGSRRLGEEAEGAADTEVNVKPARSPCSGYPQILSAPPAPTSCLAKASPTHFPPPGHAPSAPPRHSSGEPSLIPSPPGKGWDCDGCSSVERGVTSRGLEAGRSGGPRLPSGPVVVRAKLWPQIGPVSRTGVCGAGAPGDGPGRRGGHESSGLRHVLRVPHALSVALGPHVRPSTLLTTLAARACRGPPAPPLLPRAAIRETPLASSR

SEQ ID NO: 30 - DNA, 1339 bp, Homo sapiens
tcttcattacagatgtgcagcaccatgagggccctggtgcttctgctgtccctgttcctgctgggtggccaggcccagcatgtgtctgactggacctactcagaaggggcactggacgaagcgcactggccacagcactaccccgcctgtgggggccagagacagtcgcctatcaacctacagaggacgaaggtgcggtacaacccctccttgaaggggctcaatatgacaggctatgagacccaggcaggggagttccccatggtcaacaatggccacacagtgcagatcagcctgccctccaccatgcgcatgacagtggctgacggcactgtatacatagcccagcagatgcactttcactggggaggtgcgtcctcggagatcagcggctctgagcacaccgtggacgggatcagacatgtgatcgagattcacattgttcactacaattctaaatacaagagctatgatatagcccaagatgcgccggatggtttggctgtactggcagccttcgttgaggtgaagaattaccctgaaaacacttattacagcaacttcatttctcatctggccaacatcaagtacccaggacaaagaacaaccctgactggccttgacgttcaggacatgctgcccaggaacctccagcactactacacctaccatggctcactcaccacgcctccctgcactgagaacgtccactggtttgtgctggcagattttgtcaagctctccaggacacaggtttggaagctggagaattccttactggatcaccgcaacaagaccatccacaacgattaccgcaggacccagcccctgaaccacagagtggtggaatccaacttcccgaatcaggaatacactctaggctctgaattccagttttacctacataagattgaggaaattcttgactacttaagaagagcattgaactgaggaaagctaagaggaagattcaatattaactagcttgaagcctgacctagccagaagtgcctgtccgctgcagccgcaccctaccttgtctaagaaaccatgtgtgtctggaacacgctgctccccctggggcagctgttgggattctgattaaaagaggggaaacgatcatcctggacaggaagtgagatggcttcagttcatgagacgggatctgagttagacatcaccagtggaaattgattggaatagaaacttaaaggaaatggaaccctaactattctcccatcaaatcatatatgttgacctgtctgaattataaaccagcctgacctttcctttagcattagatgtaataaaataactttggaaatttgtcatttaaaaa

SEQ ID NO: 31 - protein, 308 aa, Homo sapiens
MRALVLLLSLFLLGGQAQHVSDWTYSEGALDEAHWPQHYPACGGQRQSPINLQRTKVRYNPSLKGLNMTGYETQAGEFPMVNNGHTVQISLPSTMRMTVADGTVYIAQQMHFHWGGASSEISGSEHTVDGIRHVIEIHIVHYNSKYKSYDIAQDAPDGLAVLAAFVEVKNYPENTYYSNFISHLANIKYPGQRTTLTGLDVQDMLPRNLQHYYTYHGSLTTPPCTENVHWFVLADFVKLSRTQVWKLENSLLDHRNKTIHNDYRRTQPLNHRVVESNFPNQEYTLGSEFQFYLHKIEEILDYLRRALN

SEQ ID NO: 32 - DNA, 545 bp, Homo sapiens
agcatccaggcaggacggcagcagctgagcagaggagagaggaggaatgagtcccccgttctcaccccggggagcggttgcctcgtgagtccaaggagaatccgccctttcgttttgcgcaggtggagatctcgcgggcccagttcggagtcctgcaaactgtggaggagatgccgctgtcccgtcggtctggggacagcccagctccccggatcccgggctggagagacgcgtcgcggccccggggcctggtggcacgagcaggaaggaggacccggcggcgggctctgcctgggcttgcctgggcttgttccgagccgggctgcttctcggtgaccacgcagatcgggggcatttggagattttgcgggagtcctgcagccaagctccggggcaggagaggcctggaagcctgcactacctgctcgccccgtcccagcatgcacccaggctggagtgccgtggtgcgatctcggctcactgcagccttgacctccccaggctcaagtgatcctcccacctcagccttccaagtagctgggact

SEQ ID NO: 33 - protein, 13 aa, Homo sapiens
MSPPFSPRGAVAS

SEQ ID NO: 34 - DNA, 9117 bp, Homo sapiens
tgaggcctgaggcctggggcggggtggcggccgggctggccttggcctcgcgccttcccctgcggccgccgcgggctccgcgggcggtatcggagtgtcgtgcggcgcgtggccgcgtgacacgcgcacttgtcggagtgacgggccctgcggaagaggaggtgcggcccagggcgcaggggagccctcgggagcgggcccggccctcagcgccgccccggccgtgtcccggaggagcggcctgcgccgccgcgcgagaggaagcacccaggcatgtggaatatgctcatagtggcgatgtgcttggcccttctgggctgcctgcaagcccaggagctccagggacatgtctccataatcctgctgggagcaactggggacctggctaagaagtacttatggcagggactgttccagctgtacctggatgaagcggggaggggtcacagttttagcttccatggagctgctctgacagcccccaagcagggtcaagagctcatggccaaggccctggaatccctctcctgccccaaggacatggcacccagtcactgtgcagagcacaaggatcagttcctgcagctgagccagtaccgccaactgaagacggccgaggactatcaggccctgaacaaggacatcgaggcacagctccagcacgcaggcctccgggaggctggcaggatcttctacttctcagtgccacccttcgcctatgaagacattgcccgcaacatcaacagtagctgccggccaggcccgggcgcctggctgcgggttgtccttgagaaaccctttggccatgaccacttctcagcccagcagctggccacagaactcgggacctttttccaggaggaggagatgtaccgggtggaccattacttaggcaagcaggctgtggcgcagatcctgcctttccgagaccagaaccgcaaggctttggacggcctctggaaccggcaccatgtggagcgggtggagatcatcatgaaagagaccgtggatgctgaaggccgcaccagcttctatgaggagtacggtgtcattcgcgacgtcctccagaaccatctgacggaggtcctcaccctcgtggccatggagctgccccacaatgtcagcagtgcggaggctgtgctgcggcacaagcttcaggtcttccaggcgctgcggggcctgcagaggggcagtgccgtcgtgggccagtaccagtcttacagtgagcaggtgcgcagagagctgcagaagccagacagcttccacagcctgacgccgaccttcgcagccgtcctagtgcacattgacaaccttcgctgggagggcgtgcctttcatcctgatgtctggcaaagccttggacgagagagtgggctacgctcggatcttgttcaagaaccaggcctgctgtgtgcagagcgaaaagcactgggccgcggcgcagagccagtgcctgccccggcagctcgtcttccacatcggccatggcgacctgggcagccctgccgtgctggtcagcaggaacctgttcaggccctccctgccctccagctggaaggaaatggagggaccacctgggctccgccttttcggcagccctctgtccgattactacgcctacagccctgtgcgggagcgggacgcccactccgtcctcttatcccatatcttccatggccggaagaatttcttcatcaccacagagaacttgctggcctcctggaacttctggacccctctgctggagagcctggcccataaggccccacgcctctaccctggaggagctgagaatggccgtctgttggactttgagttcagtagcggccggttgttcttttcccagcagcagccggagcagctggtgccagggccagggccggccccaatgcccagtgacttccaggtcctcagggccaagtaccgagagagcccgctggtctccgcctggtccgaggagctgatctctaagctggctaatgacatcgaggccaccgctgtgcgagccgtgcggcgctttggccagttccacctggcactgtcggggggctcgagccccgtggccctgttccagcagctggccacggcgcactatggcttcccctgggcccacacgcacctgtggctggttgacgagcgctgcgtcccactctcagacccggagtccaacttccagggcctgcaggcccacctgctgcagcacgtccggatcccctactacaacatccaccccatgcctgtgcacctgcagcagcggctctgcgccgaggaggaccagggcgcccagatctatgccagggagatctcagccctggtggccaacagcagcttcgacctggtgctgctgggcatgggtgccgacgggcacacagcctccctcttcccacagtcacccactggcctggatggcgagcagctggtcgtgctgaccacgagcccctcccagccacaccgccgcatgagccttagcctgcctctcatcaaccgcgccaagaaggtggcagtcctggtcatgggcaggatgaagcgtgagatcaccacgctggtgagccgggtgggccatgagcccaagaagtggcccatctcgggtgtcctgccgcactccggccagctggtgtggtacatggactacgacgccttcctgggatgagggcgcctgtgccccttgcccgcttcgctcctgtgctttccttcgcccgtgtcttccctcccttctcggccccgccacctgcccagcgtgccctggctctccagaaccttctatcccacagtcaggccccagagagggcaggacaagccttgtcccgatgcctttgaccggcagctctgtgtattggtggatagatgcagaaacaaggaagaaatggagtctgctcctgagaagcttcaaattcaggccaggagagaagtcttaagaaaagacctccagcagttacacattcatatcaaccagcacaacacgggatggcgcccaaactccggcgttcacaagaggagacgtgacgtggtgggctgaggttaatcagggaaggtttcctgggggaggtgatccttgaactggctcccggggaacattcagagcatgattggtagacagaagggtgcagaggcgcccaggggagtacattgccccgtgcaaagcaggggcattggggactgtcttgagaccctgagggggtcaagcccctccttccccagctgcccctccttctagaacctctgcacatctagcctctggccctcctcttcactgcctccacctgctcccgcttgccatccctgtctcctccatcctggctgtgcagtaggaattccaggctcctccctgtgtctttgctgttcttcagactccatttatagagaatgagggctgataacaggaatacagtggcaaagactagactgtggaaagggttccagaaatcttttttcttttttaattaaaaaaaatatttgcagagatgagctcttgctatgttgcccaggctggtctcaaactcctgggctcaagcgatcctcccatctcagcctcccagagtgctgggattacaggtgtgagctactgcgcccagccccagaaatctcagtgctgtttggagctccatttctcatttgatgacttgctctgcgtggggaggtggggtctcattcccccaacttcctcagggaggacccctgccctccgctgctcctctgtcctgctagccttcctccaggaagcacactgggtgcagataatcaggacattccagagatccccaatttaagagggtcatttccatctcaggggactcccggatgggtgtttccgctctcaatagcccctcttgttttaccaggaaagatccagttaaatcacccactgaggtgacagctcattagcggggagagagatggagcatcgagtgacactgggccatccaggcggctctgctcccaccagacaggagctaggcctcactggcaggggggctgcccacagccttttcaggggctcgcttggcgggtgacggggccgcagccaggccttctctccctgccccttggtgaccccgtggcttcctgtctgctggcctctcctgctacttatcacttcaccacgaactctctgcctgagactggggaagtaagcgggtatcttctcagtgagcataggttggggactgtgatcttgagaagccatgggccagcaatacctgcttttctgaagcccccaaggagggctctgacattctttttaaaaacaccacaaagcaaaattcccaggacatgtgtagttttgtttgttcagtatcccacaacttaaggctgggagatggaactcttggttaaggtcgatttttctgtctggcttctccgcaccttccacttgctctctggatcaggcagatataaactttctagcgcattttgagagagggctttcttgggtgagggagcatggcaaagtcggtttctctctggactgtttacacttcaaggcggtggatttagaggaatcctggctttcattttcaatgccagtctgagacatgttcccaagccggggctcttgttcacaccacttactctggccaccaacaacaacccaggccagacagagcatctcttttttttttttttgagacagagtctctgtcgcccaggctggagcccagtggcgagatcttggctcactacaacctccacctcccgggttcaggcaattctcgtgcctaagcctcccgagtagctgcgactacaggcgccggccagcatgcctgtctaatttttgtattttagtagagacagggtttcaccatgttgcccaggctggtctcgaactcctgagctcaggcagtctacccacctcagcctcccaaagtgctgggattacaggcgtgagccaccgcgcccagccagaacatctgtttttacacccagagagcgcccctcgttaggacagaaccacggtgcccagagccaggaagccgccctcctggcgcccagcatctgagcttctacacgtgatgggcgggctcaggagaggacagggagtcgtggtggaagttccacagctggccgcgtgggggggcccttgcaccgcactgccgcctcctgactgcccctatccccgcagcccctgtgccggatttcatttccctcctctctcccagggtacctggccccagcactctcccatctgttcttcaggaaccgactcctctccagttgcaacaccagggagaaaggggcctccacatgcccaagtacccctgcaggatgaagggcaggccggcccttgatgtgccatttctgaataatagtcactgccgccgagtctaggatgtcctgttctaactcagccctgcctcggatgcaccaccgatctgtgcagagtgggtgtgggagtgtgggtgagggtcgaaatgccaaaggtctactttccagaatcaagtgccttctgcaaatcatgttggaaaagtccaaacctggagatgtccctgtgcctccgcccctacccaccccttttccttcagctgtgttaggaaggagaagttttcagaaccctctaggctggtggctttcaaacttcagaccatgatctgcagcaagaaacgtgccttccatcataaatcagtccatttgtttacaactgtgttccaagcaggtttcataaagaaattcttaaccttagaacctcggatatcctctatgttttagttttcatttttttaaaatgcttcttaaaattcactaaattgggctaggtgtggctcatgcctgtaatcccagcactatgggaggctgaggtgagaggatcacttgagcccagaaggttgaaaccagcctgggcaacatagtgagaccccatctctacaaaaagttttaaaaccaggtatggtggtgccctcctgtggtcccagctactcgggagtctgaggtgggaggatcacctgagcccaggagactgaggctgcagtaaggtgtgattgcactattgctctctagcctggaaaacagagtgagaccctatctcaaaaaaaaaaaaaaaaaaaaaggaaagagtgatgacaacagcccagggagcagccccgctcagaacccaagtcccaagttccagcactgtgttcccaggcaggctgtttgcctcttcctggtctggaagcccttgggtcctatggtggcggcagctcccacagtccaggttccctggtggggaccaatgattccatccgcatggaagcccacgtgtgcacttaggggcccataaatggcagaagggcccctcctttgggagaccttgtcagtcagcatctctagggcaaccgtgattgccatttgtagaggggaaggaatcaagggactttaagctagatcaaaatctggggacaaattctcctgctaactgcaagttaaaataggcccttcttactgaatttccctgtttgtttctctgcagacaatgctttagccctactcttgggcccccaagttagcagagtaatcaaagcttcctaccgtttggcctactattccagactagtccctcgaggggttcccttccaaaatatgcagggctcaggctcccaattccgggcctgtctgctttgcttgtgtttctcctgtccctgttctcccggagggcccaggtggaactcacgacagggagggagacgcttcccaaaaacctgcagggctatttcccagaatttggttttcaagtacaaaactttttgtcctgtaagatatatgcagcctcacagaagcagcctctgcctccactttaccagctacgtttttatcttaagcacatggggctcccttagaacttactccactgatttaaaaaaaaaaaactgcctggcagcatctcagtgtcagagtgagcacggcacaggaaaggcccgtggtgacgagggtgaggtggccacagtgaccggacgacaaatgagactctgcaaatgagactccagagggtgaagatctgcggtctccagacatcataggccatgtgacccactaggggccgcttacccctggccgtccgctggctgaactgaacgcattccctctctccgcaactctcccgtgaggctgcacccgtgtgggtagcactggaagcggcactgtttgcattgtacataggaaggaaggaagttcttccagcctcaccagcacctggcagcgagtcagagcctgtgagggcatccgaagcagtgatgcagtgtcaacctcccagctggtgccactctgccctcgggggctccaagcattgtaactcagtcatgggagctgcctctttggaagtgcagatttattcctgtaataatcctgcctgcttttacctctcgtccactgaccagcaagtgtgagtcccggtgtcagtcggcacagtccagtgtccatctgcatttgctcatgcagagggggtgagttgggcactccctgttgttggttttccttttgcagcacactgggcagtctccctataaaacaaaaaccccaccttctgtgccttctgctttagagcagagctccccctcccatttcctcagtcttccctgcaaaatctgtccaccggggaaggcagcaggaaccctgggcagcgggtgttctgggaaggctagtgacagcagatgtcatccaggaacagccacacacggttctccaggccgccgtcagcagctcaaggtggggtatgagtgagaagctgaggatctcgcagcttgttgctgagcaaggtgcaaccgggctcatgctgtcatcagcacaagacgggatggcaagggctttcagacgcatttccaagagtccagcaagccagggggaagatgatccctttgccgaagtgtaccctctagccaacttttgggagcgcttctgtttgcaaagcgctggggatgtgcctgtctctgtgtgacccacgaacgggaagggagagcactggagtaatgacacttctgctgctgctttgattctcaaggctgatctttaaaaccctcgccttgctgacaggtgctttaaaggcagtctgcatcttttcttcccttggtgtgggagaggtaaacactttgatttgctgaaagctgtatggagtatatttgaacagctagtagttagctttgaaagtggaagtgtgaacagacactacttgtgtcgctttgggtccttcactttacccccacagaagtctagaggcgtctgttataaagcgttacggggcgcctgcatgcaggaggaaggacctgtattagctggaaatcatcaggaacccagcttgcctccatctctctgagatgtgctgggtacagcctgcccctcctagttctgtccaccgggaagagccggctggcggcagatccccaggggcagagcccctgctggatcctgggagctcatctttacctgtgccggagtgggaactgtgattccagccgggcaggtcagagtggagcagtgctaagaggctgttgcaggagaactagacgggcggggcctgctgcatctggatcatgtttctgtgctctgccccgcgctagggactcagggtctgggcttctgccaggtgaggagcagagagactgttcccttgggtggagaggtgtgggcatgagagccacccattgccaagcagcaagaatgttcgtgcttttttccagagaggggaaccccactggtttttgtggaaacaatggaaacttacagatgcctgcctgggatgatgaggcacattcagaacaaatgcttttttttttttgagacagagtctcgctctgacgcccaggctggagtgcagtggcgcgatctcggctcactgcaaactttgcctcccaggttcaagtgattctcctacctcagcctcccgagtagctgggattacaccaccatgcccagcaaatttttgtgtttttagtagagacggagtttcaccatgttggccaggctggtctcgaactcctgacctcaggtgatccatccgccttggcctcccaaagtgctgggattacaggcgggagccaccatgcctggccagaacaaatgcctttttaaaccttttaagaacatttttaaaatgtctttttctatgtcaaatgtaacgtttatttttttaaacaataaaattgatttgccaaaa

SEQ ID NO: 35 - protein, 791 aa, Homo sapiens
MWNMLIVAMCLALLGCLQAQELQGHVSIILLGATGDLAKKYLWQGLFQLYLDEAGRGHSFSFHGAALTAPKQGQELMAKALESLSCPKDMAPSHCAEHKDQFLQLSQYRQLKTAEDYQALNKDIEAQLQHAGLREAGRIFYFSVPPFAYEDIARNINSSCRPGPGAWLRVVLEKPFGHDHFSAQQLATELGTFFQEEEMYRVDHYLGKQAVAQILPFRDQNRKALDGLWNRHHVERVEIIMKETVDAEGRTSFYEEYGVIRDVLQNHLTEVLTLVAMELPHNVSSAEAVLRHKLQVFQALRGLQRGSAVVGQYQSYSEQVRRELQKPDSFHSLTPTFAAVLVHIDNLRWEGVPFILMSGKALDERVGYARILFKNQACCVQSEKHWAAAQSQCLPRQLVFHIGHGDLGSPAVLVSRNLFRPSLPSSWKEMEGPPGLRLFGSPLSDYYAYSPVRERDAHSVLLSHIFHGRKNFFITTENLLASWNFWTPLLESLAHKAPRLYPGGAENGRLLDFEFSSGRLFFSQQQPEQLVPGPGPAPMPSDFQVLRAKYRESPLVSAWSEELISKLANDIEATAVRAVRRFGQFHLALSGGSSPVALFQQLATAHYGFPWAHTHLWLVDERCVPLSDPESNFQGLQAHLLQHVRIPYYNIHPMPVHLQQRLCAEEDQGAQIYAREISALVANSSFDLVLLGMGADGHTASLFPQSPTGLDGEQLVVLTTSPSQPHRRMSLSLPLINRAKKVAVLVMGRMKREITTLVSRVGHEPKKWPISGVLPHSGQLVWYMDYDAFLG

SEQ ID NO: 36 - DNA, 2834 bp, Homo sapiens
gtctcctcggccgacaagctctcgcgagacgagccgtgcaggctgaaaaaatggcgccacccagtacccgggagcccagggtcctgtcggcgaccagcgcaaccaaatccgacggagagatggtgctgccaggcttcccggacgccgacagctttgtgaagtttgctcttgggtccgtggtggcagtcaccaaggcatctgggggcctaccacagtttggcgatgagtatgatttttaccgaagttttcctggcttccaagcattttgcgaaacacagggagacaggttgcttcagtgcatgagcagagtaatgcagtaccatgggtgtcgcagcaacattaaggatcgaagtaaagtgactgagctggaagacaagtttgatttactagttgatgccaatgatgtaattctggagagagtgggtattttactggatgaagcctcaggtgtaaacaagaatcaacagcctgtcctccctgccggcttgcaggtccccaaaacggtagtgtccagctggaaccgtaaggcagcagaatatggcaaaaaagcaaaatctgaaactttccggctgcttcatgcaaaaaatatcatccgacctcagctcaagtttcgagagaagattgacaattccaacacaccatttcttcctaaaatcttcatcaaacccaatgctcagaaacctctccctcaagctctctctaaggaaaggcgggaacgcccacaggatcgtcctgaggacttggacgtcccccctgcactggctgatttcatccatcagcagagaacccagcaggttgagcaagacatgtttgcacatccttatcaatatgaactaaatcactttaccccagcagatgcagtgcttcaaaagccacaaccccagttatacagacctatagaagagacaccatgccatttcatatcctccctggatgaactcgtggaactcaacgaaaagctcttgaattgtcaggaatttgcagttgacttggagcaccactcttacaggagcttcctgggactgacctgcctgatgcaaatttctactcggacggaagacttcatcattgacaccctcgagcttcgaagtgacatgtacattctcaatgagagcctcacagacccagccatcgttaaggtctttcatggtgctgattcagacatagaatggctacagaaagactttgggttgtatgtagtaaacatgtttgatactcatcaggcagcacgccttcttaacctgggcaggcactcactcgatcatctcctgaaactctactgcaacgtggactcaaacaagcaatatcagctggctgattggagaatacgccctctgcccgaggagatgctcagctacgcccgggatgacacccattacctgctatatatctatgacaaaatgaggctggagatgtgggagcgcggcaacgggcagccggtgcagctgcaggtggtgtggcaacggagcagggacatctgcctcaagaaattcatcaaacctatcttcacggatgagtcctaccttgaactctataggaagcagaagaagcaccttaacacacagcagttgacagcctttcagctgctgtttgcctggagggataaaacagctcgcagggaagatgaaagttacggatatgtactgccaaaccacatgatgctgaaaatagctgaagaactgcctaaggaacctcagggcatcatagcttgctgcaacccagtaccgccccttgtgcggcagcagatcaacgaaatgcaccttttaatccagcaggcccgagagatgcccctgctcaagtctgaagttgcagccggagtgaagaagagcggaccgctgcccagtgctgagagattggagaatgttctctttggacctcacgactgctcccatgcccctccggatggctatccaatcatcccaaccagtggatctgtgccagttcagaagcaggcgagcctcttccctgatgaaaaagaagataacttgctgggtaccacatgcctgattgccacagctgtcatcacgttatttaatgaacctagtgctgaagacagtaaaaagggtccattgacagttgcacagaaaaaagcccagaacatcatggagtcctttgaaaatccatttaggatgtttctgccctcactgggacaccgtgctcccgtctctcaggcagcgaagttcgatccatcaaccaaaatctatgaaatcagcaaccgctggaagctggcccaggtacaagtacaaaaagactctaaagaagctgtcaagaagaaggcagctgagcaaacagctgcccgggaacaggcaaaggaggcgtgcaaagctgcagcagaacaggccatctccgtccgacagcaggtcgtgctagaaaatgctgcaaagaagagagagcgagcaacaagcgacccaaggaccacagaacagaaacaagagaagaaacgactcaaaatttccaagaagccaaaggacccagagccaccagaaaaagagtttacgccttacgactacagccagtcagacttcaaggcttttgctggaaacagcaaatccaaagtttcttctcagtttgatccaaataaacagaccccgtctggcaagaaatgcattgcagccaaaaaaattaaacagtcggtgggaaacaaaagcatgtcctttccaactggaaagtcagacagaggcttcaggtacaactggccacagagatagtcctggaagacacgtggcgcctgtggaccggaagcaccaaatgctggtgctgcttttgtacatacatatttttaaaccattaaaattcttcctgaagaaaaaaaaaaaaaaaaaaaaaaaaaaaaa

SEQ ID NO: 37 - protein, 885 aa, Homo sapiens
MAPPSTREPRVLSATSATKSDGEMVLPGFPDADSFVKFALGSVVAVTKASGGLPQFGDEYDFYRSFPGFQAFCETQGDRLLQCMSRVMQYHGCRSNIKDRSKVTELEDKFDLLVDANDVILERVGILLDEASGVNKNQQPVLPAGLQVPKTVVSSWNRKAAEYGKKAKSETFRLLHAKNIIRPQLKFREKIDNSNTPFLPKIFIKPNAQKPLPQALSKERRERPQDRPEDLDVPPALADFIHQQRTQQVEQDMFAHPYQYELNHFTPADAVLQKPQPQLYRPIEETPCHFISSLDELVELNEKLLNCQEFAVDLEHHSYRSFLGLTCLMQISTRTEDFIIDTLELRSDMYILNESLTDPAIVKVFHGADSDIEWLQKDFGLYVVNMFDTHQAARLLNLGRHSLDHLLKLYCNVDSNKQYQLADWRIRPLPEEMLSYARDDTHYLLYIYDKMRLEMWERGNGQPVQLQVVWQRSRDICLKKFIKPIFTDESYLELYRKQKKHLNTQQLTAFQLLFAWRDKTARREDESYGYVLPNHMMLKIAEELPKEPQGIIACCNPVPPLVRQQINEMHLLIQQAREMPLLKSEVAAGVKKSGPLPSAERLENVLFGPHDCSHAPPDGYPIIPTSGSVPVQKQASLFPDEKEDNLLGTTCLIATAVITLFNEPSAEDSKKGPLTVAQKKAQNIMESFENPFRMFLPSLGHRAPVSQAAKFDPSTKIYEISNRWKLAQVQVQKDSKEAVKKKAAEQTAAREQAKEACKAAAEQAISVRQQVVLENAAKKRERATSDPRTTEQKQEKKRLKISKKPKDPEPPEKEFTPYDYSQSDFKAFAGNSKSKVSSQFDPNKQTPSGKKCIAAKKIKQSVGNKSMSFPTGKSDRGFRYNWPQR

SEQ ID NO: 38 - DNA, 2759 bp, Homo sapiens
gtctcctcggccgacaagctctcgcgagacgagccgtgcaggctgaaaaaatggcgccacccagtacccgggagcccagggtcctgtcggcgaccagcgcaaccaaatccgacggagagatggtgctgccaggcttcccggacgccgacagctttgtgaagtttgctcttgggtccgtggtggcagtcaccaaggcatctgggggcctaccacagtttggcgatgagtatgatttttaccgaagttttcctggcttccaagcattttgcgaaacacagggagacaggttgcttcagtgcatgagcagagtaatgcagtaccatgggtgtcgcagcaacattaaggatcgaagtaaagtgactgagctggaagacaagtttgatttactagttgatgccaatgatgtaattctggagagagtgggtattttactggatgaagcctcaggtgtaaacaagaatcaacagcctgtcctccctgccggcttgcaggtccccaaaacggtagtgtccagctggaaccgtaaggcagcagaatatggcaaaaaagcaaaatctgaaactttccggctgcttcatgcaaaaaatatcatccgacctcagctcaagtttcgagagaagattgacaattccaacacaccatttcttcctaaaatcttcatcaaacccaatgctcagaaacctctccctcaagctctctctaaggaaaggcgggaacgcccacaggatcgtcctgaggacttggacgtcccccctgcactggctgatttcatccatcagcagagaacccagcaggttgagcaagacatgtttgcacatccttatcaatatgaactaaatcactttaccccagcagatgcagtgcttcaaaagccacaaccccagttatacagacctatagaagagacaccatgccatttcatatcctccctggatgaactcgtggaactcaacgaaaagctcttgaattgtcaggaatttgcagttgacttggagcaccactcttacaggagcttcctgggactgacctgcctgatgcaaatttctactcggacggaagacttcatcattgacaccctcgagcttcgaagtgacatgtacattctcaatgagagcctcacagacccagccatcgttaaggtctttcatggtgctgattcagacatagaatggctacagaaagactttgggttgtatgtagtaaacatgtttgatactcatcaggcagcacgccttcttaacctgggcaggcactcactcgatcatctcctgaaactctactgcaacgtggactcaaacaagcaatatcagctggctgattggagaatacgccctctgcccgaggagatgctcagctacgcccgggatgacacccattacctgctatatatctatgacaaaatgaggctggagatgtgggagcgcggcaacgggcagccggtgcagctgcaggtggtgtggcaacggagcagggacatctgcctcaagaaattcatcaaacctatcttcacggatgagtcctaccttgaactctataggaagcagaagaagcaccttaacacacagcagttgacagcctttcagctgctgtttgcctggagggataaaacagctcgcagggaagatgaaagttacggatatgtactgccaaaccacatgatgctgaaaatagctgaagaactgcctaaggaacctcagggcatcatagcttgctgcaacccagtaccgccccttgtgcggcagcagatcaacgaaatgcaccttttaatccagcaggcccgagagatgcccctgctcaagtctgaagttgcagccggagtgaagaagagcggaccgctgcccagtgctgagagattggagaatgttctctttggacctcacgactgctcccatgcccctccggatggctatccaatcatcccaaccagtggatctgtgccagttcagaagcaggcgagcctcttccctgatgaaaaagaagataacttgctgggtaccacatgcctgattgccacagctgtcatcacgttatttaatgaacctagtgctgaagacagtaaaaagggtccattgacagttgcacagaaaaaagcccagaacatcatggagtcctttgaaaatccatttaggatgatcagcaaccgctggaagctggcccaggtacaagtacaaaaagactctaaagaagctgtcaagaagaaggcagctgagcaaacagctgcccgggaacaggcaaaggaggcgtgcaaagctgcagcagaacaggccatctccgtccgacagcaggtcgtgctagaaaatgctgcaaagaagagagagcgagcaacaagcgacccaaggaccacagaacagaaacaagagaagaaacgactcaaaatttccaagaagccaaaggacccagagccaccagaaaaagagtttacgccttacgactacagccagtcagacttcaaggcttttgctggaaacagcaaatccaaagtttcttctcagtttgatccaaataaacagaccccgtctggcaagaaatgcattgcagccaaaaaaattaaacagtcggtgggaaacaaaagcatgtcctttccaactggaaagtcagacagaggcttcaggtacaactggccacagagatagtcctggaagacacgtggcgcctgtggaccggaagcaccaaatgctggtgctgcttttgtacatacatatttttaaaccattaaaattcttcctgaagaaaaaaaaaaaaaaaaaaaaaaaaaaaaa

SEQ ID NO: 39 - protein, 860 aa, Homo sapiens
MAPPSTREPRVLSATSATKSDGEMVLPGFPDADSFVKFALGSVVAVTKASGGLPQFGDEYDFYRSFPGFQAFCETQGDRLLQCMSRVMQYHGCRSNIKDRSKVTELEDKFDLLVDANDVILERVGILLDEASGVNKNQQPVLPAGLQVPKTVVSSWNRKAAEYGKKAKSETFRLLHAKNIIRPQLKFREKIDNSNTPFLPKIFIKPNAQKPLPQALSKERRERPQDRPEDLDVPPALADFIHQQRTQQVEQDMFAHPYQYELNHFTPADAVLQKPQPQLYRPIEETPCHFISSLDELVELNEKLLNCQEFAVDLEHHSYRSFLGLTCLMQISTRTEDFIIDTLELRSDMYILNESLTDPAIVKVFHGADSDIEWLQKDFGLYVVNMFDTHQAARLLNLGRHSLDHLLKLYCNVDSNKQYQLADWRIRPLPEEMLSYARDDTHYLLYIYDKMRLEMWERGNGQPVQLQVVWQRSRDICLKKFIKPIFTDESYLELYRKQKKHLNTQQLTAFQLLFAWRDKTARREDESYGYVLPNHMMLKIAEELPKEPQGIIACCNPVPPLVRQQINEMHLLIQQAREMPLLKSEVAAGVKKSGPLPSAERLENVLFGPHDCSHAPPDGYPIIPTSGSVPVQKQASLFPDEKEDNLLGTTCLIATAVITLFNEPSAEDSKKGPLTVAQKKAQNIMESFENPFRMISNRWKLAQVQVQKDSKEAVKKKAAEQTAAREQAKEACKAAAEQAISVRQQVVLENAAKKRERATSDPRTTEQKQEKKRLKISKKPKDPEPPEKEFTPYDYSQSDFKAFAGNSKSKVSSQFDPNKQTPSGKKCIAAKKIKQSVGNKSMSFPTGKSDRGFRYNWPQR

SEQ ID NO: 40 - DNA, 8680 bp, Homo sapiens
acggggcctgaagcggcggtaccggtgctggcggcggcagctgaggccttggccgaagccgcgcgaacctcagggcaagatgcttggaaccggacctgccgccgccaccaccgctgccaccacatctagcaatgtgagcgtcctgcagcagtttgccagtggcctaaagagccggaatgaggaaaccagggccaaagccgccaaggagctccagcactatgtcaccatggaactccgagagatgagtcaagaggagtctactcgcttctatgaccaactgaaccatcacatttttgaattggtttccagctcagatgccaatgagaggaaaggtggcatcttggccatagctagcctcataggagtggaaggtgggaatgccacccgaattggcagatttgccaactatcttcggaacctcctcccctccaatgacccagttgtcatggaaatggcatccaaggccattggccgtcttgccatggcaggggacacttttaccgctgagtacgtggaatttgaggtgaagcgagccctggaatggctgggtgctgaccgcaatgagggccggagacatgcagctgtcctggttctccgtgagctggccatcagcgtccctaccttcttcttccagcaagtgcaacccttctttgacaacatttttgtggccgtgtgggaccccaaacaggccatccgtgagggagctgtagccgcccttcgtgcctgtctgattctcacaacccagcgtgagccgaaggagatgcagaagcctcagtggtacaggcacacatttgaagaagcagagaagggatttgatgagaccttggccaaagagaagggcatgaatcgggatgatcggatccatggagccttgttgatccttaacgagctggtccgaatcagcagcatggagggagagcgtctgagagaagaaatggaagaaatcacacagcagcagctggtacacgacaagtactgcaaagatctcatgggcttcggaacaaaacctcgtcacattacccccttcaccagtttccaggctgtacagccccagcagtcaaatgccttggtggggctgctggggtacagctctcaccaaggcctcatgggatttgggacctcccccagtccagctaagtccaccctggtggagagccggtgttgcagagacttgatggaggagaaatttgatcaggtgtgccagtgggtgctgaaatgcaggaatagcaagaactcgctgatccaaatgacaatccttaatttgttgccccgcttggctgcattccgaccttctgccttcacagatacccagtatctccaagataccatgaaccatgtcctaagctgtgtcaagaaggagaaggaacgtacagcggccttccaagccctggggctactttctgtggctgtgaggtctgagtttaaggtctatttgcctcgcgtgctggacatcatccgagcggccctgcccccaaaggacttcgcccataagaggcagaaggcaatgcaggtggatgccacagtcttcacttgcatcagcatgctggctcgagcaatggggccaggcatccagcaggatatcaaggagctgctggagcccatgctggcagtgggactaagccctgccctcactgcagtgctctacgacctgagccgtcagattccacagctaaagaaggacattcaagatgggctactgaaaatgctgtccctggtccttatgcacaaaccccttcgccacccaggcatgcccaagggcctggcccatcagctggcctctcctggcctcacgaccctccctgaggccagcgatgtgggcagcatcactcttgccctccgaacgcttggcagctttgaatttgaaggccactctctgacccaatttgttcgccactgtgcggatcatttcctgaacagtgagcacaaggagatccgcatggaggctgcccgcacctgctcccgcctgctcacaccctccatccacctcatcagtggccatgctcatgtggttagccagaccgcagtgcaagtggtggcagatgtgcttagcaaactgctcgtagttgggataacagatcctgaccctgacattcgctactgtgtcttggcgtccctggacgagcgctttgatgcacacctggcccaggcggagaacttgcaggccttgtttgtggctctgaatgaccaggtgtttgagatccgggagctggccatctgcactgtgggccgactcagtagcatgaaccctgcctttgtcatgcctttcctgcgcaagatgctcatccagattttgacagagttggagcacagtgggattggaagaatcaaagagcagagtgcccgcatgctggggcacctggtctccaatgccccccgactcatccgcccctacatggagcctattctgaaggcattaattttgaaactgaaagatccagaccctgatccaaacccaggtgtgatcaataatgtcctggcaacaataggagaattggcacaggttagtggcctggaaatgaggaaatgggttgatgaactttttattatcatcatggacatgctccaggattcctctttgttggccaaaaggcaggtggctctgtggaccctgggacagttggtggccagcactggctatgtagtagagccctacaggaagtaccctactttgcttgaggtgctactgaattttctgaagactgagcagaaccagggtacacgcagagaggccatccgtgtgttagggcttttaggggctttggatccttacaagcacaaagtgaacattggcatgatagaccagtcccgggatgcctctgctgtcagcctgtcagaatccaagtcaagtcaggattcctctgactatagcactagtgaaatgctggtcaacatgggaaacttgcctctggatgagttctacccagctgtgtccatggtggccctgatgcggatcttccgagaccagtcactctctcatcatcacaccatggttgtccaggccatcaccttcatcttcaagtccctgggactcaaatgtgtgcagttcctgccccaggtcatgcccacgttccttaacgtcattcgagtctgtgatggggccatccgggaatttttgttccagcagctgggaatgttggtgtcctttgtgaagagccacatcagaccttatatggatgaaatagtcaccctcatgagagaattctgggtcatgaacacctcaattcagagcacgatcattcttctcattgagcaaattgtggtagctcttgggggtgaatttaagctctacctgccccagctgatcccacacatgctgcgtgtcttcatgcatgacaacagcccaggccgcattgtctctatcaagttactggctgcaatccagctgtttggcgccaacctggatgactacctgcatttactgctgcctcctattgttaagttgtttgatgcccctgaagctccactgccatctcgaaaggcagcgctagagactgtggaccgcctgacggagtccctggatttcactgactatgcctcccggatcattcaccctattgttcgaacactggaccagagcccagaactgcgctccacagccatggacacgctgtcttcacttgtttttcagctggggaagaagtaccaaattttcattccaatggtgaataaagttctggtgcgacaccgaatcaatcatcagcgctatgatgtgctcatctgcagaattgtcaagggatacacacttgctgatgaagaggaggatcctttgatttaccagcatcggatgcttaggagtggccaaggggatgcattggctagtggaccagtggaaacaggacccatgaagaaactgcacgtcagcaccatcaacctccaaaaggcctggggcgctgccaggagggtctccaaagatgactggctggaatggctgagacggctgagcctggagctgctgaaggactcatcatcgccctccctgcgctcctgctgggccctggcacaggcctacaacccgatggccagggatctcttcaatgctgcatttgtgtcctgctggtctgaactgaatgaagatcaacaggatgagctcatcagaagcatcgagttggccctcacctcacaagacatcgctgaagtcacacagaccctcttaaacttggctgaattcatggaacacagtgacaagggccccctgccactgagagatgacaatggcattgttctgctgggtgagagagctgccaagtgccgagcatatgccaaagcactacactacaaagaactggagttccagaaaggccccacccctgccattctagaatctctcatcagcattaataataagctacagcagccggaggcagcggccggagtgttagaatatgccatgaaacactttggagagctggagatccaggctacctggtatgagaaactgcacgagtgggaggatgcccttgtggcctatgacaagaaaatggacaccaacaaggacgacccagagctgatgctgggccgcatgcgctgcctcgaggccttgggggaatggggtcaactccaccagcagtgctgtgaaaagtggaccctggttaatgatgagacccaagccaagatggcccggatggctgctgcagctgcatggggtttaggtcagtgggacagcatggaagaatacacctgtatgatccctcgggacacccatgatggggcattttatagagctgtgctggcactgcatcaggacctcttctccttggcacaacagtgcattgacaaggccagggacctgctggatgctgaattaactgcgatggcaggagagagttacagtcgggcatatggggccatggtttcttgccacatgctgtccgagctggaggaggttatccagtacaaacttgtccccgagcgacgagagatcatccgccagatctggtgggagagactgcagggctgccagcgtatcgtagaggactggcagaaaatccttatggtgcggtcccttgtggtcagccctcatgaagacatgagaacctggctcaagtatgcaagcctgtgcggcaagagtggcaggctggctcttgctcataaaactttagtgttgctcctgggagttgatccgtctcggcaacttgaccatcctctgccaacagttcaccctcaggtgacctatgcctacatgaaaaacatgtggaagagtgcccgcaagatcgatgccttccagcacatgcagcattttgtccagaccatgcagcaacaggcccagcatgccatcgctactgaggaccagcagcataagcaggaactgcacaagctcatggcccgatgcttcctgaaacttggagagtggcagctgaatctacagggcatcaatgagagcacaatccccaaagtgctgcagtactacagcgccgccacagagcacgaccgcagctggtacaaggcctggcatgcgtgggcagtgatgaacttcgaagctgtgctacactacaaacatcagaaccaagcccgcgatgagaagaagaaactgcgtcatgccagcggggccaacatcaccaacgccaccactgccgccaccacggccgccactgccaccaccactgccagcaccgagggcagcaacagtgagagcgaggccgagagcaccgagaacagccccaccccatcgccgctgcagaagaaggtcactgaggatctgtccaaaaccctcctgatgtacacggtgcctgccgtccagggcttcttccgttccatctccttgtcacgaggcaacaacctccaggatacactcagagttctcaccttatggtttgattatggtcactggccagatgtcaatgaggccttagtggagggggtgaaagccatccagattgatacctggctacaggttatacctcagctcattgcaagaattgatacgcccagacccttggtgggacgtctcattcaccagcttctcacagacattggtcggtaccacccccaggccctcatctacccactgacagtggcttctaagtctaccacgacagcccggcacaatgcagccaacaagattctgaagaacatgtgtgagcacagcaacaccctggtccagcaggccatgatggtgagcgaggagctgatccgagtggccatcctctggcatgagatgtggcatgaaggcctggaagaggcatctcgtttgtactttggggaaaggaacgtgaaaggcatgtttgaggtgctggagcccttgcatgctatgatggaacggggcccccagactctgaaggaaacatcctttaatcaggcctatggtcgagatttaatggaggcccaagagtggtgcaggaagtacatgaaatcagggaatgtcaaggacctcacccaagcctgggacctctattatcatgtgttccgacgaatctcaaagcagctgcctcagctcacatccttagagctgcaatatgtttccccaaaacttctgatgtgccgggaccttgaattggctgtgccaggaacatatgaccccaaccagccaatcattcgcattcagtccatagcaccgtctttgcaagtcatcacatccaagcagaggccccggaaattgacacttatgggcagcaacggacatgagtttgttttccttctaaaaggccatgaagatctgcgccaggatgagcgtgtgatgcagctcttcggcctggttaacacccttctggccaatgacccaacatctcttcggaaaaacctcagcatccagagatacgctgtcatccctttatcgaccaactcgggcctcattggctgggttccccactgtgacacactgcacgccctcatccgggactacagggagaagaagaagatccttctcaacatcgagcatcgcatcatgttgcggatggctccggactatgaccacttgactctgatgcagaaggtggaggtgtttgagcatgccgtcaataatacagctggggacgacctggccaagctgctgtggctgaaaagccccagctccgaggtgtggtttgaccgaagaaccaattatacccgttctttagcggtcatgtcaatggttgggtatattttaggcctgggagatagacacccatccaacctgatgctggaccgtctgagtgggaagatcctgcacattgactttggggactgctttgaggttgctatgacccgagagaagtttccagagaagattccatttagactaacaagaatgttgaccaatgctatggaggttacaggcctggatggcaactacagaatcacatgccacacagtgatggaggtgctgcgagagcacaaggacagtgtcatggccgtgctggaagcctttgtctatgaccccttgctgaactggaggctgatggacacaaataccaaaggcaacaagcgatcccgaacgaggacggattcctactctgctggccagtcagtcgaaattttggacggtgtggaacttggagagccagcccataagaaaacggggaccacagtgccagaatctattcattctttcattggagacggtttggtgaaaccagaggccctaaataagaaagctatccagattattaacagggttcgagataagctcactggtcgggacttctctcatgatgacactttggatgttccaacgcaagttgagctgctcatcaaacaagcgacatcccatgaaaacctctgccagtgctatattggctggtgccctttctggtaactggaggcccagatgtgcccatcacgttttttctgaggcttttgtactttagtaaatgcttccactaaactgaaaccatggtgagaaagtttgactttgttaaatattttgaaatgtaaatgaaaagaactactgtatattaaaagttggtttgaaccaactttctagctgctgttgaagaatatattgtcagaaacacaaggcttgatttggttcccaggacagtgaaacaatagtaataccacgtaaatcaagccattcattttggggaacagaagatccataactttagaaatacgggttttgacttaactcacaagagaactcatcataagtacttgctgatggaagaatgacctagttgctcctctcaacatgggtacagcaaactcagcacagccaagaagcctcaggtcgtggagaacatggattaggatcctagactgtaaagacacagaagatgctgacctcacccctgccacctatcccaagacctcactggtctgtggacagcagcagaaatgtttgcaagataggccaaaatgagtacaaaaggtctgtcttccatcagacccagtgatgctgcgactcacacgcttcaattcaagacctgaccgctagtagggaggtttattcagatcgctggcagcctcggctgagcagatgcacagaggggatcactgtgcagtgggaccaccctcactggccttctgcagcagggttctgggatgttttcagtggtcaaaatactctgtttagagcaagggctcagaaaacagaaatactgtcatggaggtgctgaacacagggaaggtctggtacatattggaaattatgagcagaacaaatactcaactaaatgcacaaagtataaagtgtagccatgtctagacaccatgttgtatcagaataatttttgtgccaataaatgacatcagaattttaaacata

SEQ ID NO: 41 - protein, 2549 aa, Homo sapiens
MLGTGPAAATTAATTSSNVSVLQQFASGLKSRNEETRAKAAKELQHYVTMELREMSQEESTRFYDQLNHHIFELVSSSDANERKGGILAIASLIGVEGGNATRIGRFANYLRNLLPSNDPVVMEMASKAIGRLAMAGDTFTAEYVEFEVKRALEWLGADRNEGRRHAAVLVLRELAISVPTFFFQQVQPFFDNIFVAVWDPKQAIREGAVAALRACLILTTQREPKEMQKPQWYRHTFEEAEKGFDETLAKEKGMNRDDRIHGALLILNELVRISSMEGERLREEMEEITQQQLVHDKYCKDLMGFGTKPRHITPFTSFQAVQPQQSNALVGLLGYSSHQGLMGFGTSPSPAKSTLVESRCCRDLMEEKFDQVCQWVLKCRNSKNSLIQMTILNLLPRLAAFRPSAFTDTQYLQDTMNHVLSCVKKEKERTAAFQALGLLSVAVRSEFKVYLPRVLDIIRAALPPKDFAHKRQKAMQVDATVFTCISMLARAMGPGIQQDIKELLEPMLAVGLSPALTAVLYDLSRQIPQLKKDIQDGLLKMLSLVLMHKPLRHPGMPKGLAHQLASPGLTTLPEASDVGSITLALRTLGSFEFEGHSLTQFVRHCADHFLNSEHKEIRMEAARTCSRLLTPSIHLISGHAHVVSQTAVQVVADVLSKLLVVGITDPDPDIRYCVLASLDERFDAHLAQAENLQALFVALNDQVFEIRELAICTVGRLSSMNPAFVMPFLRKMLIQILTELEHSGIGRIKEQSARMLGHLVSNAPRLIRPYMEPILKALILKLKDPDPDPNPGVINNVLATIGELAQVSGLEMRKWVDELFIIIMDMLQDSSLLAKRQVALWTLGQLVASTGYVVEPYRKYPTLLEVLLNFLKTEQNQGTRREAIRVLGLLGALDPYKHKVNIGMIDQSRDASAVSLSESKSSQDSSDYSTSEMLVNMGNLPLDEFYPAVSMVALMRIFRDQSLSHHHTMVVQAITFIFKSLGLKCVQFLPQVMPTFLNVIRVCDGAIREFLFQQLGMLVSFVKSHIRPYMDEIVTLMREFWVMNTSIQSTIILLIEQIVVALGGEFKLYLPQLIPHMLRVFMHDNSPGRIVSIKLLAAIQLFGANLDDYLHLLLPPIVKLFDAPEAPLPSRKAALETVDRLTESLDFTDYASRIIHPIVRTLDQSPELRSTAMDTLSSLVFQLGKKYQIFIPMVNKVLVRHRINHQRYDVLICRIVKGYTLADEEEDPLIYQHRMLRSGQGDALASGPVETGPMKKLHVSTINLQKAWGAARRVSKDDWLEWLRRLSLELLKDSSSPSLRSCWALAQAYNPMARDLFNAAFVSCWSELNEDQQDELIRSIELALTSQDIAEVTQTLLNLAEFMEHSDKGPLPLRDDNGIVLLGERAAKCRAYAKALHYKELEFQKGPTPAILESLISINNKLQQPEAAAGVLEYAMKHFGELEIQATWYEKLHEWEDALVAYDKKMDTNKDDPELMLGRMRCLEALGEWGQLHQQCCEKWTLVNDETQAKMARMAAAAAWGLGQWDSMEEYTCMIPRDTHDGAFYRAVLALHQDLFSLAQQCIDKARDLLDAELTAMAGESYSRAYGAMVSCHMLSELEEVIQYKLVPERREIIRQIWWERLQGCQRIVEDWQKILMVRSLVVSPHEDMRTWLKYASLCGKSGRLALAHKTLVLLLGVDPSRQLDHPLPTVHPQVTYAYMKNMWKSARKIDAFQHMQHFVQTMQQQAQHAIATEDQQHKQELHKLMARCFLKLGEWQLNLQGINESTIPKVLQYYSAATEHDRSWYKAWHAWAVMNFEAVLHYKHQNQARDEKKKLRHASGANITNATTAATTAATATTTASTEGSNSESEAESTENSPTPSPLQKKVTEDLSKTLLMYTVPAVQGFFRSISLSRGNNLQDTLRVLTLWFDYGHWPDVNEALVEGVKAIQIDTWLQVIPQLIARIDTPRPLVGRLIHQLLTDIGRYHPQALIYPLTVASKSTTTARHNAANKILKNMCEHSNTLVQQAMMVSEELIRVAILWHEMWHEGLEEASRLYFGERNVKGMFEVLEPLHAMMERGPQTLKETSFNQAYGRDLMEAQEWCRKYMKSGNVKDLTQAWDLYYHVFRRISKQLPQLTSLELQYVSPKLLMCRDLELAVPGTYDPNQPIIRIQSIAPSLQVITSKQRPRKLTLMGSNGHEFVFLLKGHEDLRQDERVMQLFGLVNTLLANDPTSLRKNLSIQRYAVIPLSTNSGLIGWVPHCDTLHALIRDYREKKKILLNIEHRIMLRMAPDYDHLTLMQKVEVFEHAVNNTAGDDLAKLLWLKSPSSEVWFDRRTNYTRSLAVMSMVGYILGLGDRHPSNLMLDRLSGKILHIDFGDCFEVAMTREKFPEKIPFRLTRMLTNAMEVTGLDGNYRITCHTVMEVLREHKDSVMAVLEAFVYDPLLNWRLMDTNTKGNKRSRTRTDSYSAGQSVEILDGVELGEPAHKKTGTTVPESIHSFIGDGLVKPEALNKKAIQIINRVRDKLTGRDFSHDDTLDVPTQVELLIKQATSHENLCQCYIGWCPFW

SEQ ID NO: 42 - DNA, 2255 bp, Homo sapiens
cttgtggagcattcgggcttggaaggaaagctataggctacccattcagctcccctgtcagagactcaagctttgagaaaggctagcaaagagcaaggaaagagagaaaacaacaaagtggcgaggccctcagagtgaaagcgtaaggttcagtcagcctgctgcagctttgcagacctcagctgggcatctccagactcccctgaaggaagagccttcctcacccaaacccacaaaagatgctgaaaaagcctctctcagctgtgacctggctctgcattttcatcgtggcctttgtcagccacccagcgtggctgcagaagctctctaagcacaagacaccagcacagccacagctcaaagcggccaactgctgtgaggaggtgaaggagctcaaggcccaagttgccaaccttagcagcctgctgagtgaactgaacaagaagcaggagagggactgggtcagcgtggtcatgcaggtgatggagctggagagcaacagcaagcgcatggagtcgcggctcacagatgctgagagcaagtactccgagatgaacaaccaaattgacatcatgcagctgcaggcagcacagacggtcactcagacctccgcagatgccatctacgactgctcttccctctaccagaagaactaccgcatctctggagtgtataagcttcctcctgatgacttcctgggcagccctgaactggaggtgttctgtgacatggagacttcaggcggaggctggaccatcatccagagacgaaaaagtggccttgtctccttctaccgggactggaagcagtacaagcagggctttggcagcatccgtggggacttctggctggggaacgaacacatccaccggctctccagacagccaacccggctgcgtgtagagatggaggactgggagggcaacctgcgctacgctgagtatagccactttgttttgggcaatgaactcaacagctatcgcctcttcctggggaactacactggcaatgtggggaacgacgccctccagtatcataacaacacagccttcagcaccaaggacaaggacaatgacaactgcttggacaagtgtgcacagctccgcaaaggtggctactggtacaactgctgcacagactccaacctcaatggagtgtactaccgcctgggtgagcacaataagcacctggatggcatcacctggtatggctggcatggatctacctactccctcaaacgggtggagatgaaaatccgcccagaagacttcaagccttaaaaggaggctgccgtggagcacggatacagaaactgagacacgtggagactggatgagggcagatgaggacaggaagagagtgttagaaagggtaggactgagaaacagcctataatctccaaagaaagaataagtctccaaggagcacaaaaaaatcatatgtaccaaggatgttacagtaaacaggatgaactatttaaacccactgggtcctgccacatccttctcaaggtggtagactgagtggggtctctctgcccaagatccctgacatagcagtagcttgtcttttccacatgatttgtctgtgaaagaaaataattttgagatcgttttatctattttctctacggcttaggctatgtgagggcaaaacacaaatccctttgctaaaaagaaccatattattttgattctcaaaggataggcctttgagtgttagagaaaggagtgaaggaggcaggtgggaaatggtatttctatttttaaatccagtgaaattatcttgagtctacacattatttttaaaacacaaaaattgttcggctggaactgacccaggctggacttgcggggaggaaactccagggcactgcatctggcgatcagactctgagcactgcccctgctcgccttggtcatgtacagcactgaaaggaatgaagcaccagcaggaggtggacagagtctctcatggatgccggcacaaaactgccttaaaatattcatagttaatacaggtatatctatttttatttactttgtaagaaacaagctcaaggagcttccttttaaattttgtctgtaggaaatggttgaaaactgaaggtagatggtgttatagttaataataaatgctgtaaataagcatctcactttgtaaaaataaaatattgtggttttgttttaaacattcaacgtttcttttccttctacaataaacactttcaaaatgtgaaaaaaaaaaaaaaaaaa

SEQ ID NO: 43 - protein, 346 aa, Homo sapiens
MLKKPLSAVTWLCIFIVAFVSHPAWLQKLSKHKTPAQPQLKAANCCEEVKELKAQVANLSSLLSELNKKQERDWVSVVMQVMELESNSKRMESRLTDAESKYSEMNNQIDIMQLQAAQTVTQTSADAIYDCSSLYQKNYRISGVYKLPPDDFLGSPELEVFCDMETSGGGWTIIQRRKSGLVSFYRDWKQYKQGFGSIRGDFWLGNEHIHRLSRQPTRLRVEMEDWEGNLRYAEYSHFVLGNELNSYRLFLGNYTGNVGNDALQYHNNTAFSTKDKDNDNCLDKCAQLRKGGYWYNCCTDSNLNGVYYRLGEHNKHLDGITWYGWHGSTYSLKRVEMKIRPEDFKP

SEQ ID NO: 44 - DNA, 1520 bp, Homo sapiens
gcggccgcgaattcggcacgagcggcgcacaagatggcggctctggcggcctaaagaaggcggccgcggctcagccgtgggctctaacgcggggctgggggccggagacagacttcgcccaggtgacgggtagtaggggcggcgccgcttggcctcgtggggtgtaagacccacttgctgttgcccccggaccttgccgccacaccagccctgtcctggggcggaaccgaaggaaggtcgggccctgctgccccgccccgtccttcctccttcccgggcggtcactgtgcgtggctcacttttagagtttacttcaaccacgtggagcttccatggcggcctctcaggtcctgggggagaagattaacatcctgtcgggagagactgtcaaagctggggacagggacccgctggggaacgactgtcccgagcaagataggctcccccagcgctcctggaggcagaagtgtgcctcctacgtgttggccctgaggccctggagcttcagtgcctcactcacaccggtggccctgggcagtgcccttgcctacagatcccacggtgtcctggatcccaggctcttggtgggttgtgccgtggctgtcctggctgtgcacggggccggtaatttggtcaacacttactatgacttttccaagggcattgaccacaaaaagagtgatgacaggacacttgtggaccgaatcttggagccgcaggatgtcgtccggttcggagtcttcctctacacgttgggctgcgtctgtgccgcttgcctctactacctgtcccctctgaaactggagcacttggctcttatctactttggaggcctgtctggctcctttctctacacaggaggaattggattcaagtacgtggctctgggagacctcatcatcctcatcacttttggcccgctggctgtgatgttcgcctacgccatccaggtggggtccctggccatcttcccactggtctatgccatccccctcgccctcagcaccgaggccattctccattccaacaacaccagggacatggagtccgaccgggaggctggtatcgtcacgctggccatcctcatcggccccacgttctcctacattctctacaacacactgctcttcctgccctacctggtcttcagcatcctggccacacactgcaccatcagcctggcactccccctgcttaccattcccatggccttctcccttgagagacagtttcgaagccaggccttcaacaaactgccccagaggactgccaagctcaacctcctgctgggacttttctatgtctttggcatcattctggcaccagcaggcagtctgcccaaaatttaaggggacaagtagctccccccacgacatgtctccctttcttagaatatattaaagtcagagtctctgaggaaggaatgtgatttggcagtcagggtactaagcatgggtgggaactcctgccttataaaaattgtttttgtgttcttaaagataaaaaaaaaaaaaaaaaaa

SEQ ID NO: 45 - protein, 338 aa, Homo sapiens
MAASQVLGEKINILSGETVKAGDRDPLGNDCPEQDRLPQRSWRQKCASYVLALRPWSFSASLTPVALGSALAYRSHGVLDPRLLVGCAVAVLAVHGAGNLVNTYYDFSKGIDHKKSDDRTLVDRILEPQDVVRFGVFLYTLGCVCAACLYYLSPLKLEHLALIYFGGLSGSFLYTGGIGFKYVALGDLIILITFGPLAVMFAYAIQVGSLAIFPLVYAIPLALSTEAILHSNNTRDMESDREAGIVTLAILIGPTFSYILYNTLLFLPYLVFSILATHCTISLALPLLTIPMAFSLERQFRSQAFNKLPQRTAKLNLLLGLFYVFGIILAPAGSLPKI

SEQ ID NO: 46 - DNA, 1943 bp, Homo sapiens
aggaggggggtgctcgcgccgccgggagaggcgagcgcgaggcagagagcgcgattcggctccaaactccggcgctgcagccgatcggactctgggccgcggtgggcaccgcgcgcagctagggagccgagaaccgcggcgagccccgaggacgcccagagcgcgagggtcgctgcgcctcgcagagccggagccgagtcgagccgggcgcccgggctgcctggccgcggcggcatgggggcgcccccgcggctctccgcgctgcccgccaccgcctcggccagtggccggaggcaggagcgcgtctgagcccatggcgaggggacccgccgccaccgcctccacccccgccgccccgccaccgccgccagctcccgggcaccatgcgaaccgccccgagcctccgccgctgcgtctgcctgctgctcgccgcgatcctggacctggcgcgcggctacctgacagtcaacattgagcctctcccccctgtggtggctggagacgccgtgactttgaagtgtaacttcaagacagatgggcgcatgcgggagatcgtgtggtaccgggtgacggatggtggcaccatcaagcaaaagatcttcaccttcgacgccatgttctccaccaactactcacacatggagaactaccgcaagcgagaggacctggtgtaccagtccactgtgaggctgcccgaggtccggatctcagacaatggtccctatgagtgccatgtgggcatctacgaccgcgccaccagggagaaggtggtcctggcatcaggcaacatcttcctcaacgtcatggctcctcccacctccattgaagtggtggctgctgacacaccagcccccttcagccgctaccaagcccagaacttcacgctggtctgcatcgtgtctggaggaaaaccagcacccatggtttatttcaaacgagatggggaaccaatcgacgcagtgcccctatcagagccaccagctgcgagctccggccccctacaggacagcaggcccttccgcagccttctgcaccgtgacctggatgacaccaagatgcagaagtcactgtccctcctggacgccgagaaccggggtgggcgaccctacacggagcgcccctcccgtggcctgaccccagatcccaacatcctcctccagccaaccacagagaacataccagagacggtcgtgagccgtgagtttccccgctgggtccacagcgccgagcccacctacttcctgcgccacagccgcaccccgagcagtgacggcactgtggaagtacgtgccctgctcacctggaccctcaacccacagatcgacaacgaggccctcttcagctgcgaggtcaagcacccagctctgtcgatgcccatgcaggcagaggtcacgctggttgcccccaaaggacccaaaattgtgatgacgcccagcagagcccgggtaggggacacagtgaggattctggtccatgggtttcagaacggagtcttcccggagcccatgttcacgtggacgcgggttgggagccgcctcctggacggcagcgctgagttcgacgggaaggagctggtgctggagcgggttcccgccgagctcaatggctccatgtatcgctgcaccgcccagaacccactgggctccaccgacacgcacacccggctcatcgtgtttgaaaacccaaatatcccaagaggaacggaggactctaatggttccattggccccactggtgcccggctcaccttggtgctcgccctgacagtgattctggagctgacgtgaaggcacccgccccggccactccatcaggcactgacatctccgcgaccggttttcatttcttttctaaactatttccagtcttgttcttagtctctttccatctgtgtcttggcttcttcagtcggtttaattaaaacaaacagaacaattttcccc

SEQ ID NO: 47 - protein, 467 aa, Homo sapiens
MRTAPSLRRCVCLLLAAILDLARGYLTVNIEPLPPVVAGDAVTLKCNFKTDGRMREIVWYRVTDGGTIKQKIFTFDAMFSTNYSHMENYRKREDLVYQSTVRLPEVRISDNGPYECHVGIYDRATREKVVLASGNIFLNVMAPPTSIEVVAADTPAPFSRYQAQNFTLVCIVSGGKPAPMVYFKRDGEPIDAVPLSEPPAASSGPLQDSRPFRSLLHRDLDDTKMQKSLSLLDAENRGGRPYTERPSRGLTPDPNILLQPTTENIPETVVSREFPRWVHSAEPTYFLRHSRTPSSDGTVEVRALLTWTLNPQIDNEALFSCEVKHPALSMPMQAEVTLVAPKGPKIVMTPSRARVGDTVRILVHGFQNGVFPEPMFTWTRVGSRLLDGSAEFDGKELVLERVPAELNGSMYRCTAQNPLGSTDTHTRLIVFENPNIPRGTEDSNGSIGPTGARLTLVLALTVILELT

SEQ ID NO: 48 - DNA, 6193 bp, Homo sapiens
gccccggcggggcaaagtggcaggaacctcttaaagggcgagagcggcgcggagccagaacgcggtcggcccggtccccgccgcacccagcccagagaagagtttagtgactgaggccgaaaattcacagcaccaacagaaggaagagggtgaggaagccataaactcaggccaacaagaacctcagcaggaggaatcttgtcaaacagcagctgaaggagataattggtgtgaacagaagctgaaagcttctaatggagacactcctacacatgaagacttgaccaagaacaaggagcggacatcagaaagcagaggactttcacgactattctcctcgtttctcaaaaggcccaaatctcaggtgtccgaggaagaaggcaaagaagtagagtcagataaagaaaaaggtgaaggaggtcagaaagagatagaatttggaaccagtcttgatgaagagatcattttaaaggccccaattgcagctcctgaaccggaactcaaaacagacccatctttggatcttcattcattaagcagtgcagaaacacagcctcaccattacaattaagaattattttcagagtcttcttatttctgaagcatgtgaatattatctgcatcgttaaaagtcctgctcaggaagaactcagagaagatccagattttgaaattaaggaaggagaaggacttgaagagtgctccaaaatagaagtaaaagaagaaagccctcaatcaaaagcagaaacagaattaaaagcttcccaaaaaccaatcagaaaacacaggaacatgcactgcaaggtttctttgttggatgacacagtttatgaatgtgttgtggagaaacatgctaagggacaagatttgcttaaacgagtatgtgagcatctcaatcttttggaagaagactattttggtctagccatttgggataacgcaacctctaagacatggctggattccgccaaagaaataaaaaagcaggttcgtggtgtcccttggaattttacatttaatgtaaagttttatccacctgacccagcacagttaacagaagacataacaagatattatttatgtcttcagcttcggcaggacatagttgcaggacgtctgccctgttcctttgcaaccttagcattattaggttcttacaccatccagtctgaactgggagactacgacccagaactccatggcgtggattatgttagtgattttaaactggccccgaatcagaccaaggaacttgaagagaaggtcatggaactgcataagtcatacaggtccatgactccagctcaggctgacttggagtttcttgagaatgccaaaaagttgtctatgtatggagttgatcttcataaagcaaaggacttggaaggagtagatatcatcctaggtgtctgctctagtggccttctggtttacaaagataagctgagaattaaccgcttcccttggcccaaagtgctgaagatttcttataaacgtagtagctttttcatcaagattcggcctggagagcaagagcagtatgaaagtaccatcggattcaaacttcccagttaccgagcagctaagaaattatggaaagtctgtgtagaacatcacacgtttttcagattgacatctacagacaccattcccaaaagcaaatttcttgcgctaggatccaaatttcgatacagtggccggactcaagctcagaccaggcaagctagtgctctaattgacaggcctgccccacacttcgagcgtacagcaagtaaacgggcgtcccggagcctcgatggagcagcagctgtcgattcggcagaccgaagtcctcggcccacttctgcacctgccattactcagggtcaggttgcagaaggtggcgtcctagatgcctctgctaaaaaaacagtggtccctaaagcacagaaggaaacagtgaaggctgaagtgaaaaaggaagacgagccacctgagcaagctgagccagagcccacagaagcatggaagaaaaagagagaaagactagatggtgaaaacatttatatcagacatagcaatttaatgttggaggatttagacaagagtcaagaggagatcaaaaaacatcatgccagcatcagtgagctgaaaaagaacttcatggagtctgtaccagaaccacggcctagtgaatgggataaacgcttatccactcactcacccttccgaactcttaacatcaatgggcaaatccccacaggagaaggacctcccctggtgaagacacaaactgtcaccatctcagataatgccaatgctgtgaaaagtgaaatcccaaccaaagacgtccctattgtccacactgagaccaagaccatcacttatgaggctgcccagactgtaaaaggtgggatttcagagacacgtattgaaaagagaattgtgatcacaggagatgctgatattgaccatgatcaggtccttgtacaagccatcaaggaggcaaaggagcagcacccagacatgtcagtgaccaaggtggtcgtccaccaggagaccgagattgctgatgagtgagctcaggaactaacctaccccaactctgcccttctcccatccaagagaaaccagcaaaatgataaagaagctaacctgccatagtcagacttcagactttcaagattattctaaatcaccagaaaattaatttcagtttctattgggagtttataccaagagattcttctagatctcattgatccttttgaagagctttttctatattaggatatcagaattgttcaacttttcactctatagactgttttaagagttttggggtttttttaattgggtggtttgtaaccccttcagcctagcctctctgcccatttatttccaaccccaacagacactgacagggtccatggaattcttcgggaaatcctccaaggactcttgtcagctgtgttggaagccaaagccagcttagtgggacttccgcgtctctccctagtcttatcccctttggatgatggcagaaacttcatgaaccagccctttctcagagccagtgatgtgagtgtatcagaatgccagggagggcaccagccctgatccacagacctcggaaagatgcccctgttcctttgttgcgggtggttttggtaaggcagagccctctgctgagaatgtagtattgtttttcccctctccctcctgctttctttttggagcttctttgggtcaaagacatggaagttgcttcagatatctgatactgtgaatgtttgaacatatccgtggccttcacctctccagctacccttttacctcatcagaagcagtggctcagctaagtgctccccctagctcccatctcaggagaccaaatctcacagaaaaataggcactttgggccaaaagctctaatggaacatttttagtggtgatttggggaaggaaagttaatgaggtttttaaaataaggttttctagttttgagagtgtgcacttcacacaggggaatggggttacttctgtctgatcctgggcctttctttcatcccaaatgacaaggaatgtggctcagagaagggtttttcttttttgacctttcttctctcaacaggaacctgcctgaggacacccttctagagcaaggaattgacttttaggagccgttctccccacaagacaccacatgacaaggggtataagccccagccctgctcattcccactcaccagctgaggtctgtcaggttttgaaggcttgattttgtggtgggtttggggcttagttttcctttttttcattttgatttttgaaagtgaagatgatgccctaattcctggtaaggatttggggcatagttttttgtttttttgagacggagtttcgctcttgttgcccaagctggagtgcagtggcgcgatctcggctcactgcaacctccgcctcctgggttcaagcagttctcttgcctcagcctcccaagtagctgggatgacaggcgcacaccaccacgcccagcaaattttttgtatttttagtagaaacgggatttcaccttgttaggctggtctcgaactcctgacctcaggtgatccacccaccttggcctcccaaagtgctgggattacaggtgtgagccaccacgcccggccgatttggggcatttttatttaacagaacttctctaaccttccaactgcttcccacaaacacattggcctcaaggctccttagaatcccagttccagcttcctaaaatagacagtgggtatcgggcagcagtcactggggctcaagggcagtgagcaagagaaatgtctaaagctgcttctcccaacaccgtccaaagtctccactgcctgagttttgtttcggctggtttgaactcatttcgggtgtgtgcatttttcttttggtacccatgtgagacatgaacaacaggagggagggaaagagcccaggtgggacgtgggacaggcttaggggaaagagcttgtcctatctcaggaacaaaattataggctgtgggcagagggtctgaaaggtgggctttggggtagtgcccaagcctggtcgtgttgccaggagtggtgacaagaaatgcagcttacatcaaacgaacatgtagtgcatgcccactgcctgatggccagatggcctgtaggaagagctaccagggcttccagacctgtggaacgaagaggatggggaaaaggcagagggcactgagtgtccctttaaaaactaacccactgaatattccgtgtgatctagaacagtgtggcagctttcacagcacaggaccgttcatcgggggcctaaacgtttccctcagctctgtcaccaactcacttctctcggcttcgttgtctgtaaattggatgaaaagagctctaatgcctttcaggctcttagaagccatagatttggacaagcccagcaagatgggtgtccttccaggcctcttcccctttcctccatctctggcaacagttcttggggtttggcaattgtttggattttttttctttctgcagttgtgtgtatgtgtgtttgtgtgaagaaaaacagactctgtccaggtagaaatggtgaggagggggaagagaattacatttccagggtcagaaacttggcaacagttttcctagagtgactcagacacaccacagtaacaactctcgctgcaattttattttaatttgagaaataaagatttcctccaagccacatgaggactctggcacccacccacaaagcaagacctgtatttataagccgagggctcagggagcctaactgcgggacccgtcagggccccgtgacccatccccgtccccacccccccctccaccgctgggcccatcagtgtgtgttggggggatgcttggcagctgggggtgaggagacaacaaacctcgggaactggagccagagctgcggcctgactgacgccttttgatgctcacgggaaatttctgcccaggatctcagccccaggctggttgtttctacaaatctctctcaaatgtattattttggtgacaaaaatgaaggagctttgtaaattttttttaaaattatgaatcatatcaagtagttgtttacatttcttgaaaaaataggaactcgggcagcagaatcagattggcagaatctttagactacacaggcaataatcaagtctgctgttttggcctttcgtagtagaagtggttgtagtgtttagatatctgtttggtcttgcttcttgtattgcatttttttcaataaacaacaacaaaaagaactctctctgtgaggattgatccacttttaaatttctcttctaccagcaacttgggaaaaattaaatatgggtgggggagacctaaactcaagtcattttctaaagtaagttacccacattgaccaaaatgcagcttcaacgttgagtaaagggatttctgagagctggccaatgccttttgccagctgcagtgagattctgcagcataggccacgataaaggaaggagagaaggggcttctcagacttatttgcagaagggcccagaactcagtatgaaggcattggcagtagtgtagctctagagggatataccccagatggctgagggaagaaagggattgaggtggtaggagttcaaggctcagtccccgtcccagatggcagtggagagtctcatcccgtg

SEQ ID NO: 49 - protein, 588 aa, Homo sapiens
MHCKVSLLDDTVYECVVEKHAKGQDLLKRVCEHLNLLEEDYFGLAIWDNATSKTWLDSAKEIKKQVRGVPWNFTFNVKFYPPDPAQLTEDITRYYLCLQLRQDIVAGRLPCSFATLALLGSYTIQSELGDYDPELHGVDYVSDFKLAPNQTKELEEKVMELHKSYRSMTPAQADLEFLENAKKLSMYGVDLHKAKDLEGVDIILGVCSSGLLVYKDKLRINRFPWPKVLKISYKRSSFFIKIRPGEQEQYESTIGFKLPSYRAAKKLWKVCVEHHTFFRLTSTDTIPKSKFLALGSKFRYSGRTQAQTRQASALIDRPAPHFERTASKRASRSLDGAAAVDSADRSPRPTSAPAITQGQVAEGGVLDASAKKTVVPKAQKETVKAEVKKEDEPPEQAEPEPTEAWKKKRERLDGENIYIRHSNLMLEDLDKSQEEIKKHHASISELKKNFMESVPEPRPSEWDKRLSTHSPFRTLNINGQIPTGEGPPLVKTQTVTISDNANAVKSEIPTKDVPIVHTETKTITYEAAQTVKGGISETRIEKRIVITGDADIDHDQVLVQAIKEAKEQHPDMSVTKVVVHQETEIADE

SEQ ID NO: 50 - DNA, 6369 bp, Homo sapiens
gccccggcggggcaaagtggcaggaacctcttaaagggcgagagcggcgcggagccagaacgcggtcggcccggtccccgccgcacccagcccagcaacatcatgacaacagagaagagtttagtgactgaggccgaaaattcacagcaccaacagaaggaagagggtgaggaagccataaactcaggccaacaagaacctcagcaggaggaatcttgtcaaacagcagctgaaggagataattggtgtgaacagaagctgaaagcttctaatggagacactcctacacatgaagacttgaccaagaacaaggagcggacatcagaaagcagaggactttcacgactattctcctcgtttctcaaaaggcccaaatctcaggtgtccgaggaagaaggcaaagaagtagagtcagataaagaaaaaggtgaaggaggtcagaaagagatagaatttggaaccagtcttgatgaagagatcattttaaaggccccaattgcagctcctgaaccggaactcaaaacagacccatctttggatcttcattcattaagcagtgcagaaacacagcctcaccattacaattaagaattattttcagagtcttcttatttctgaagcatgtgaatattatctgcatcgttaaaagtcctgctcaggaagaactcagagaagatccagattttgaaattaaggaaggagaaggacttgaagagtgctccaaaatagaagtaaaagaagaaagccctcaatcaaaagcagaaacagaattaaaagcttcccaaaaaccaatcagaaaacacaggaacatgcactgcaaggtttctttgttggatgacacagtttatgaatgtgttgtggagaaacatgctaagggacaagatttgcttaaacgagtatgtgagcatctcaatcttttggaagaagactattttggtctagccatttgggataacgcaacctctaagacatggctggattccgccaaagaaataaaaaagcaggttcgtggtgtcccttggaattttacatttaatgtaaagttttatccacctgacccagcacagttaacagaagacataacaagatattatttatgtcttcagcttcggcaggacatagttgcaggacgtctgccctgttcctttgcaaccttagcattattaggttcttacaccatccagtctgaactgggagactacgacccagaactccatggcgtggattatgttagtgattttaaactggccccgaatcagaccaaggaacttgaagagaaggtcatggaactgcataagtcatacaggtccatgactccagctcaggctgacttggagtttcttgagaatgccaaaaagttgtctatgtatggagttgatcttcataaagcaaaggacttggaaggagtagatatcatcctaggtgtctgctctagtggccttctggtttacaaagataagctgagaattaaccgcttcccttggcccaaagtgctgaagatttcttataaacgtagtagctttttcatcaagattcggcctggagagcaagagcagtatgaaagtaccatcggattcaaacttcccagttaccgagcagctaagaaattatggaaagtctgtgtagaacatcacacgtttttcagattgacatctacagacaccattcccaaaagcaaatttcttgcgctaggatccaaatttcgatacagtggccggactcaagctcagaccaggcaagctagtgctctaattgacaggcctgccccacacttcgagcgtacagcaagtaaacgggcgtcccggagcctcgatggagcagcagctgtcgattcggcagaccgaagtcctcggcccacttctgcacctgccattactcagggtcaggttgcagaaggtggcgtcctagatgcctctgctaaaaaaacagtggtccctaaagcacagaaggaaacagtgaaggctgaagtgaaaaaggaagacgagccacctgagcaagctgagccagagcccacagaagcatggaaggtggaaaaaacccacatcgaggtgacagtacccacctcaaatggtgaccaaacacagaaaaagagagaaagactagatggtgaaaacatttatatcagacatagcaatttaatgttggaggatttagacaagagtcaagaggagatcaaaaaacatcatgccagcatcagtgagctgaaaaagaacttcatggagtctgtaccagaaccacggcctagtgaatgggataaacgcttatccactcactcacccttccgaactcttaacatcaatgggcaaatccccacaggagaaggacctcccctggtgaagacacaaactgtcaccatctcagataatgccaatgctgtgaaaagtgaaatcccaaccaaagacgtccctattgtccacactgagaccaagaccatcacttatgaggctgcccagactgacgacaacagtggagacttggacccaggagtcttgctgacagctcaaactatcacatctgagaccccaagcagcaccaccacaactcaaattaccaagactgtaaaaggtgggatttcagagacacgtattgaaaagagaattgtgatcacaggagatgctgatattgaccatgatcaggtccttgtacaagccatcaaggaggcaaaggagcagcacccagacatgtcagtgaccaaggtggtcgtccaccaggagaccgagattgctgatgagtgagctcaggaactaacctaccccaactctgcccttctcccatccaagagaaaccagcaaaatgataaagaagctaacctgccatagtcagacttcagactttcaagattattctaaatcaccagaaaattaatttcagtttctattgggagtttataccaagagattcttctagatctcattgatccttttgaagagctttttctatattaggatatcagaattgttcaacttttcactctatagactgttttaagagttttggggtttttttaattgggtggtttgtaaccccttcagcctagcctctctgcccatttatttccaaccccaacagacactgacagggtccatggaattcttcgggaaatcctccaaggactcttgtcagctgtgttggaagccaaagccagcttagtgggacttccgcgtctctccctagtcttatcccctttggatgatggcagaaacttcatgaaccagccctttctcagagccagtgatgtgagtgtatcagaatgccagggagggcaccagccctgatccacagacctcggaaagatgcccctgttcctttgttgcgggtggttttggtaaggcagagccctctgctgagaatgtagtattgtttttcccctctccctcctgctttctttttggagcttctttgggtcaaagacatggaagttgcttcagatatctgatactgtgaatgtttgaacatatccgtggccttcacctctccagctacccttttacctcatcagaagcagtggctcagctaagtgctccccctagctcccatctcaggagaccaaatctcacagaaaaataggcactttgggccaaaagctctaatggaacatttttagtggtgatttggggaaggaaagttaatgaggtttttaaaataaggttttctagttttgagagtgtgcacttcacacaggggaatggggttacttctgtctgatcctgggcctttctttcatcccaaatgacaaggaatgtggctcagagaagggtttttcttttttgacctttcttctctcaacaggaacctgcctgaggacacccttctagagcaaggaattgacttttaggagccgttctccccacaagacaccacatgacaaggggtataagccccagccctgctcattcccactcaccagctgaggtctgtcaggttttgaaggcttgattttgtggtgggtttggggcttagttttcctttttttcattttgatttttgaaagtgaagatgatgccctaattcctggtaaggatttggggcatagttttttgtttttttgagacggagtttcgctcttgttgcccaagctggagtgcagtggcgcgatctcggctcactgcaacctccgcctcctgggttcaagcagttctcttgcctcagcctcccaagtagctgggatgacaggcgcacaccaccacgcccagcaaattttttgtatttttagtagaaacgggatttcaccttgttaggctggtctcgaactcctgacctcaggtgatccacccaccttggcctcccaaagtgctgggattacaggtgtgagccaccacgcccggccgatttggggcatttttatttaacagaacttctctaaccttccaactgcttcccacaaacacattggcctcaaggctccttagaatcccagttccagcttcctaaaatagacagtgggtatcgggcagcagtcactggggctcaagggcagtgagcaagagaaatgtctaaagctgcttctcccaacaccgtccaaagtctccactgcctgagttttgtttcggctggtttgaactcatttcgggtgtgtgcatttttcttttggtacccatgtgagacatgaacaacaggagggagggaaagagcccaggtgggacgtgggacaggcttaggggaaagagcttgtcctatctcaggaacaaaattataggctgtgggcagagggtctgaaaggtgggctttggggtagtgcccaagcctggtcgtgttgccaggagtggtgacaagaaatgcagcttacatcaaacgaacatgtagtgcatgcccactgcctgatggccagatggcctgtaggaagagctaccagggcttccagacctgtggaacgaagaggatggggaaaaggcagagggcactgagtgtccctttaaaaactaacccactgaatattccgtgtgatctagaacagtgtggcagctttcacagcacaggaccgttcatcgggggcctaaacgtttccctcagctctgtcaccaactcacttctctcggcttcgttgtctgtaaattggatgaaaagagctctaatgcctttcaggctcttagaagccatagatttggacaagcccagcaagatgggtgtccttccaggcctcttcccctttcctccatctctggcaacagttcttggggtttggcaattgtttggattttttttctttctgcagttgtgtgtatgtgtgtttgtgtgaagaaaaacagactctgtccaggtagaaatggtgaggagggggaagagaattacatttccagggtcagaaacttggcaacagttttcctagagtgactcagacacaccacagtaacaactctcgctgcaattttattttaatttgagaaataaagatttcctccaagccacatgaggactctggcacccacccacaaagcaagacctgtatttataagccgagggctcagggagcctaactgcgggacccgtcagggccccgtgacccatccccgtccccacccccccctccaccgctgggcccatcagtgtgtgttggggggatgcttggcagctgggggtgaggagacaacaaacctcgggaactggagccagagctgcggcctgactgacgccttttgatgctcacgggaaatttctgcccaggatctcagccccaggctggttgtttctacaaatctctctcaaatgtattattttggtgacaaaaatgaaggagctttgtaaattttttttaaaattatgaatcatatcaagtagttgtttacatttcttgaaaaaataggaactcgggcagcagaatcagattggcagaatctttagactacacaggcaataatcaagtctgctgttttggcctttcgtagtagaagtggttgtagtgtttagatatctgtttggtcttgcttcttgtattgcatttttttcaataaacaacaacaaaaagaactctctctgtgaggattgatccacttttaaatttctcttctaccagcaacttgggaaaaattaaatatgggtgggggagacctaaactcaagtcattttctaaagtaagttacccacattgaccaaaatgcagcttcaacgttgagtaaagggatttctgagagctggccaatgccttttgccagctgcagtgagattctgcagcataggccacgataaaggaaggagagaaggggcttctcagacttatttgcagaagggcccagaactcagtatgaaggcattggcagtagtgtagctctagagggatataccccagatggctgagggaagaaagggattgaggtggtaggagttcaaggctcagtccccgtcccagatggcagtggagagtctcatcccgtg

SEQ ID NO: 51 - protein, 641 aa, Homo sapiens
MHCKVSLLDDTVYECVVEKHAKGQDLLKRVCEHLNLLEEDYFGLAIWDNATSKTWLDSAKEIKKQVRGVPWNFTFNVKFYPPDPAQLTEDITRYYLCLQLRQDIVAGRLPCSFATLALLGSYTIQSELGDYDPELHGVDYVSDFKLAPNQTKELEEKVMELHKSYRSMTPAQADLEFLENAKKLSMYGVDLHKAKDLEGVDIILGVCSSGLLVYKDKLRINRFPWPKVLKISYKRSSFFIKIRPGEQEQYESTIGFKLPSYRAAKKLWKVCVEHHTFFRLTSTDTIPKSKFLALGSKFRYSGRTQAQTRQASALIDRPAPHFERTASKRASRSLDGAAAVDSADRSPRPTSAPAITQGQVAEGGVLDASAKKTVVPKAQKETVKAEVKKEDEPPEQAEPEPTEAWKVEKTHIEVTVPTSNGDQTQKKRERLDGENIYIRHSNLMLEDLDKSQEEIKKHHASISELKKNFMESVPEPRPSEWDKRLSTHSPFRTLNINGQIPTGEGPPLVKTQTVTISDNANAVKSEIPTKDVPIVHTETKTITYEAAQTDDNSGDLDPGVLLTAQTITSETPSSTTTTQITKTVKGGISETRIEKRIVITGDADIDHDQVLVQAIKEAKEQHPDMSVTKVVVHQETEIADE

SEQ ID NO: 52 - DNA, 6064 bp, Homo sapiens
gccccggcggggcaaagtggcaggaacctcttaaagggcgagagcggcgcggagccagaacgcggtcggcccggtccccgccgcacccagcccagcaacatcatgacaacagagaagagtttagtgactgaggccgaaaattcacagcaccaacagaaggaagagggtgaggaagccataaactcaggccaacaagaacctcagcaggaggaatcttgtcaaacagcagctgaaggagataattggtgtgaacagaagctgaaagcttctaatggagacactcctacacatgaagacttgaccaagaacaaggagcggacatcagaaagcagaggactttcacgactattctcctcgtttctcaaaaggcccaaatctcaggtgtccgaggaagaaggcaaagaagtagagtcagataaagaaaaaggtgaaggaggtcagaaagagatagaatttggaaccagtcttgatgaagagatcattttaaaggccccaattgcagctcctgaaccggaactcaaaacagacccatctttggatcttcattcattaagcagtgcagaaacacagcctgctcaggaagaactcagagaagatccagattttgaaattaaggaaggagaaggacttgaagagtgctccaaaatagaagtaaaagaagaaagccctcaatcaaaagcagaaacagaattaaaagcttcccaaaaaccaatcagaaaacacaggaacatgcactgcaaggtttctttgttggatgacacagtttatgaatgtgttgtggagacatggctggattccgccaaagaaataaaaaagcaggttcgtggtgtcccttggaattttacatttaatgtaaagttttatccacctgacccagcacagttaacagaagacataacaagatattatttatgtcttcagcttcggcaggacatagttgcaggacgtctgccctgttcctttgcaaccttagcattattaggttcttacaccatccagtctgaactgggagactacgacccagaactccatggcgtggattatgttagtgattttaaactggccccgaatcagaccaaggaacttgaagagaaggtcatggaactgcataagtcatacaggtccatgactccagctcaggctgacttggagtttcttgagaatgccaaaaagttgtctatgtatggagttgatcttcataaagcaaaggacttggaaggagtagatatcatcctaggtgtctgctctagtggccttctggtttacaaagataagctgagaattaaccgcttcccttggcccaaagtgctgaagatttcttataaacgtagtagctttttcatcaagattcggcctggagagcaagagcagtatgaaagtaccatcggattcaaacttcccagttaccgagcagctaagaaattatggaaagtctgtgtagaacatcacacgtttttcagattgacatctacagacaccattcccaaaagcaaatttcttgcgctaggatccaaatttcgatacagtggccggactcaagctcagaccaggcaagctagtgctctaattgacaggcctgccccacacttcgagcgtacagcaagtaaacgggcgtcccggagcctcgatggagcagcagctgtcgattcggcagaccgaagtcctcggcccacttctgcacctgccattactcagggtcaggttgcagaaggtggcgtcctagatgcctctgctaaaaaaacagtggtccctaaagcacagaaggaaacagtgaaggctgaagtgaaaaaggaagacgagccacctgagcaagctgagccagagcccacagaagcatggaaggatttagacaagagtcaagaggagatcaaaaaacatcatgccagcatcagtgagctgaaaaagaacttcatggagtctgtaccagaaccacggcctagtgaatgggataaacgcttatccactcactcacccttccgaactcttaacatcaatgggcaaatccccacaggagaaggacctcccctggtgaagacacaaactgtcaccatctcagataatgccaatgctgtgaaaagtgaaatcccaaccaaagacgtccctattgtccacactgagaccaagaccatcacttatgaggctgcccagactgacgacaacagtggagacttggacccaggagtcttgctgacagctcaaactatcacatctgagaccccaagcagcaccaccacaactcaaattaccaagactgtaaaaggtgggatttcagagacacgtattgaaaagagaattgtgatcacaggagatgctgatattgaccatgatcaggtccttgtacaagccatcaaggaggcaaaggagcagcacccagacatgtcagtgaccaaggtggtcgtccaccaggagaccgagattgctgatgagtgagctcaggaactaacctaccccaactctgcccttctcccatccaagagaaaccagcaaaatgataaagaagctaacctgccatagtcagacttcagactttcaagattattctaaatcaccagaaaattaatttcagtttctattgggagtttataccaagagattcttctagatctcattgatccttttgaagagctttttctatattaggatatcagaattgttcaacttttcactctatagactgttttaagagttttggggtttttttaattgggtggtttgtaaccccttcagcctagcctctctgcccatttatttccaaccccaacagacactgacagggtccatggaattcttcgggaaatcctccaaggactcttgtcagctgtgttggaagccaaagccagcttagtgggacttccgcgtctctccctagtcttatcccctttggatgatggcagaaacttcatgaaccagccctttctcagagccagtgatgtgagtgtatcagaatgccagggagggcaccagccctgatccacagacctcggaaagatgcccctgttcctttgttgcgggtggttttggtaaggcagagccctctgctgagaatgtagtattgtttttcccctctccctcctgctttctttttggagcttctttgggtcaaagacatggaagttgcttcagatatctgatactgtgaatgtttgaacatatccgtggccttcacctctccagctacccttttacctcatcagaagcagtggctcagctaagtgctccccctagctcccatctcaggagaccaaatctcacagaaaaataggcactttgggccaaaagctctaatggaacatttttagtggtgatttggggaaggaaagttaatgaggtttttaaaataaggttttctagttttgagagtgtgcacttcacacaggggaatggggttacttctgtctgatcctgggcctttctttcatcccaaatgacaaggaatgtggctcagagaagggtttttcttttttgacctttcttctctcaacaggaacctgcctgaggacacccttctagagcaaggaattgacttttaggagccgttctccccacaagacaccacatgacaaggggtataagccccagccctgctcattcccactcaccagctgaggtctgtcaggttttgaaggcttgattttgtggtgggtttggggcttagttttcctttttttcattttgatttttgaaagtgaagatgatgccctaattcctggtaaggatttggggcatagttttttgtttttttgagacggagtttcgctcttgttgcccaagctggagtgcagtggcgcgatctcggctcactgcaacctccgcctcctgggttcaagcagttctcttgcctcagcctcccaagtagctgggatgacaggcgcacaccaccacgcccagcaaattttttgtatttttagtagaaacgggatttcaccttgttaggctggtctcgaactcctgacctcaggtgatccacccaccttggcctcccaaagtgctgggattacaggtgtgagccaccacgcccggccgatttggggcatttttatttaacagaacttctctaaccttccaactgcttcccacaaacacattggcctcaaggctccttagaatcccagttccagcttcctaaaatagacagtgggtatcgggcagcagtcactggggctcaagggcagtgagcaagagaaatgtctaaagctgcttctcccaacaccgtccaaagtctccactgcctgagttttgtttcggctggtttgaactcatttcgggtgtgtgcatttttcttttggtacccatgtgagacatgaacaacaggagggagggaaagagcccaggtgggacgtgggacaggcttaggggaaagagcttgtcctatctcaggaacaaaattataggctgtgggcagagggtctgaaaggtgggctttggggtagtgcccaagcctggtcgtgttgccaggagtggtgacaagaaatgcagcttacatcaaacgaacatgtagtgcatgcccactgcctgatggccagatggcctgtaggaagagctaccagggcttccagacctgtggaacgaagaggatggggaaaaggcagagggcactgagtgtccctttaaaaactaacccactgaatattccgtgtgatctagaacagtgtggcagctttcacagcacaggaccgttcatcgggggcctaaacgtttccctcagctctgtcaccaactcacttctctcggcttcgttgtctgtaaattggatgaaaagagctctaatgcctttcaggctcttagaagccatagatttggacaagcccagcaagatgggtgtccttccaggcctcttcccctttcctccatctctggcaacagttcttggggtttggcaattgtttggattttttttctttctgcagttgtgtgtatgtgtgtttgtgtgaagaaaaacagactctgtccaggtagaaatggtgaggagggggaagagaattacatttccagggtcagaaacttggcaacagttttcctagagtgactcagacacaccacagtaacaactctcgctgcaattttattttaatttgagaaataaagatttcctccaagccacatgaggactctggcacccacccacaaagcaagacctgtatttataagccgagggctcagggagcctaactgcgggacccgtcagggccccgtgacccatccccgtccccacccccccctccaccgctgggcccatcagtgtgtgttggggggatgcttggcagctgggggtgaggagacaacaaacctcgggaactggagccagagctgcggcctgactgacgccttttgatgctcacgggaaatttctgcccaggatctcagccccaggctggttgtttctacaaatctctctcaaatgtattattttggtgacaaaaatgaaggagctttgtaaattttttttaaaattatgaatcatatcaagtagttgtttacatttcttgaaaaaataggaactcgggcagcagaatcagattggcagaatctttagactacacaggcaataatcaagtctgctgttttggcctttcgtagtagaagtggttgtagtgtttagatatctgtttggtcttgcttcttgtattgcatttttttcaataaacaacaacaaaaagaactctctctgtgaggattgatccacttttaaatttctcttctaccagcaacttgggaaaaattaaatatgggtgggggagacctaaactcaagtcattttctaaagtaagttacccacattgaccaaaatgcagcttcaacgttgagtaaagggatttctgagagctggccaatgccttttgccagctgcagtgagattctgcagcataggccacgataaaggaaggagagaaggggcttctcagacttatttgcagaagggcccagaactcagtatgaaggcattggcagtagtgtagctctagagggatataccccagatggctgagggaagaaagggattgaggtggtaggagttcaaggctcagtccccgtcccagatggcagtggagagtctcatcccgtg

SEQ ID NO: 53 - protein, 775 aa, Homo sapiens
MTTEKSLVTEAENSQHQQKEEGEEAINSGQQEPQQEESCQTAAEGDNWCEQKLKASNGDTPTHEDLTKNKERTSESRGLSRLFSSFLKRPKSQVSEEEGKEVESDKEKGEGGQKEIEFGTSLDEEIILKAPIAAPEPELKTDPSLDLHSLSSAETQPAQEELREDPDFEIKEGEGLEECSKIEVKEESPQSKAETELKASQKPIRKHRNMHCKVSLLDDTVYECVVETWLDSAKEIKKQVRGVPWNFTFNVKFYPPDPAQLTEDITRYYLCLQLRQDIVAGRLPCSFATLALLGSYTIQSELGDYDPELHGVDYVSDFKLAPNQTKELEEKVMELHKSYRSMTPAQADLEFLENAKKLSMYGVDLHKAKDLEGVDIILGVCSSGLLVYKDKLRINRFPWPKVLKISYKRSSFFIKIRPGEQEQYESTIGFKLPSYRAAKKLWKVCVEHHTFFRLTSTDTIPKSKFLALGSKFRYSGRTQAQTRQASALIDRPAPHFERTASKRASRSLDGAAAVDSADRSPRPTSAPAITQGQVAEGGVLDASAKKTVVPKAQKETVKAEVKKEDEPPEQAEPEPTEAWKDLDKSQEEIKKHHASISELKKNFMESVPEPRPSEWDKRLSTHSPFRTLNINGQIPTGEGPPLVKTQTVTISDNANAVKSEIPTKDVPIVHTETKTITYEAAQTDDNSGDLDPGVLLTAQTITSETPSSTTTTQITKTVKGGISETRIEKRIVITGDADIDHDQVLVQAIKEAKEQHPDMSVTKVVVHQETEIADE

SEQ ID NO: 54 - DNA, 2491 bp, Homo sapiens
gcggactgggacccggacccgcgcggcgctgcggcgccagagcgcccagacgacggcgagatgacggccgggagccccgaagaatgcggggaggtgcggaggagccccgagggccgcgtctctcgcttgggccgccgcctgggccgccgccggcgcccgcgctccccgcccgagcctctgcgggtgcgggcgcggctgcggctgcgctcgccgtcgggggcgttcgcggcgctgggggcgctcgtggtactggtgggtatgggcattgcagtggccggctactggccgcaccgggccggggccccagggtcccgggccgccaatgccagctcgccccagatgagcgagctgcgacgcgagggtcgcggcgggggccgggctcacggcccgcacgagcggctgcggctcctcgggccggtgatcatgggcgtcggcctgttcgtgttcatctgcgccaacacactgctgtatgagaaccgagacttggagacgcgacggctccgccagggggtgctgcgggcccaggcgctccggccccccgacggcccgggctgggactgcgccctccttcccagccccggccctaggagtccccgagccgtaggctgcgcagagccagaaatctgggacccgtccccgcgtcggggtacttcacccgtcccgtcagtgcggagtctgcgttcagagcccgctaatcctcgcttggggttacctgccttgctcaacagctacccgctgaagggccccgggctgcccccaccctggggtccacggacgcagactggccatgtgatcatcaccgtgcagccgtctggctcctgcattgaacattccaagtctctggatctgggccttggggagctcctccttggggccccagcagctcgggactgtgctcaccgaagctggccacggctggaccgcctcagtcttgggggctatgccaaattgggaggaggaggggacttgggggcccgggtctgaagagaggggagacagcctgctctgaggctgcagcatggaccatgctaataggaccaaaggaccaggagtcccaacgtctaatagatgtttcagtcacatcccaggctggggatggatgctctgaccacagcagctgtgaagggcatcctgacctgcatgcgggcagagaaatgccagctgcaccagggctcagtgagctggagagggtgcgtttcactgtggggtgtggaggactcgcctcaggaatttcttcagcctctgtaagtggccttagccctaacagggctggaggtccaggccagggtgactgggagatgtacccagtgtcttggcaaacccaagaaagtggtgggcaagggcccctaagactgggaggtaggttgggatgttacaggctggggcaggctccctccaaggcggcactggtgatggagtgtggggcctctgggaagatggaccacgggatgagactctccactgccatctgggacggggactgagccttgaactcctaccacctcaatccctttcttccctcagccatctggggtatatccctctagagctacactactgccaatgccttcatactgagttctgggcccttctgcaaataagtctgagaagccccttctctccttcctttatcgtggcctatgctgcagaatctcactgcagctggcaaaaggcattggccagctctcagaaatccctttactcaacgttgaagctgcattttggtcaatgtgggtaacttactttagaaaatgacttgagtttaggtctcccccacccatatttaatttttcccaagttgctggtagaagagaaatttaaaagtggatcaatcctcacagagagagttctttttgttgttgtttattgaaaaaaatgcaatacaagaagcaagaccaaacagatatctaaacactacaaccacttctactacgaaaggccaaaacagcagacttgattattgcctgtgtagtctaaagattctgccaatctgattctgctgcccgagttcctattttttcaagaaatgtaaacaactacttgatatgattcataattttaaaaaaaatttacaaagctccttcatttttgtcaccaaaataatacatttgagagagatttgtagaaacaaccagcctggggctgagatcctgggcagaaatttcccgtgagcatcaaaaggcgtcagtcaggccgcagctctggctccagttcccgaggtttgttgtctcctcacccccagctgccaagcatccccccaacacacactgatgggcccagcggtggaggggggggtggggacggggatgggtcacggggccctgacgggtcccgcagttaggctccctgagccctcggcttataaatacaggtcttgctttgtgggtgggtgccagagtcctcatgtggcttggaggaaatctttatttctcaaattaaaataaaattgcagcgagagttgaaaaaaaaaaaaaaaaaaaaaaaaaaaaaa

SEQ ID NO: 55 - protein, 307 aa, Homo sapiens
MTAGSPEECGEVRRSPEGRVSRLGRRLGRRRRPRSPPEPLRVRARLRLRSPSGAFAALGALVVLVGMGIAVAGYWPHRAGAPGSRAANASSPQMSELRREGRGGGRAHGPHERLRLLGPVIMGVGLFVFICANTLLYENRDLETRRLRQGVLRAQALRPPDGPGWDCALLPSPGPRSPRAVGCAEPEIWDPSPRRGTSPVPSVRSLRSEPANPRLGLPALLNSYPLKGPGLPPPWGPRTQTGHVIITVQPSGSCIEHSKSLDLGLGELLLGAPAARDCAHRSWPRLDRLSLGGYAKLGGGGDLGARV

SEQ ID NO: 56 - DNA, 2158 bp, Homo sapiens
ccgttgccgccgccgccgctgccgccgtgctctcgctttgcccgccgccgcctaaggggggctggggccggggccagccatcactgccgttgccgggatgccgcgggtgtacatcggccgcctgagctaccaggcccgggagcgcgatgtggagcgcttctttaagggctacgggaagatcctggaggtggatctgaagaacggatatggttttgtggagtttgatgatctgcgtgatgcagatgatgctgtttatgaactgaatggcaaagacctttgtggtgagcgagtaattgttgagcatgcccgcggcccacggcgagatggcagttacggttctggacgcagtggatatggttatagaagaagtggccgagataaatatggccctcctactcgcacagagtacagacttattgtggagaatttgtcaagtcggtgcagctggcaagacctaaaggattatatgcgtcaggcaggagaagtgacttatgcagatgctcacaagggacgcaaaaatgaaggggtgattgaatttgtatcttattctgatatgaaaagagctttggaaaagttggatggaactgaagtcaatgggagaaaaatcagattagttgaagacaagccaggttccagacgacgccggtcctactccagaagccggagtcattcaaggtctcgctctcgaagcagacattcccgtaagagcagaagccgaagtggcagcagcaaaagcagtcattctaagagtagatctcggtccaggtcgggctcccgctcccggagcaagagccggagccggagccagagtcggagccggagcaagaaagagaaaagcaggagccccagcaaggaaaagagccgcagccgcagccatagcgctggcaagagccgcagcaagagcaaagaccaagctgaagagaagatccaaaacaatgacaatgtcgggaaacccaagagccggagtcctagcaggcataaaagtaagagcaaaagtcggagcaggagtcaggagaggagagtggaggaggagaagcgagggagtgtgagcaggggcaggagccaggagaagagcctccgccagagtcggagccggagcaggagcaaagggggcagcaggagccggagcaggagccgcagcaagagcaaggacaagaggaagggcaggaagagaagcagagaggagagccgcagtcgcagtcgcagccgcagcaagagtgagaggagcagaaagcgaggcagcaagcgagacagcaaggcgggcagcagcaagaagaagaagaaggaagacactgaccgctcccagtccagatctccatcccgctccgtgtcaaaggagcgggaacatgccaagtctgaatccagccagagggaaggtcgaggagagagtgagaatgctggcaccaatcaggagacccggtccaggtcgagatccaattccaaatcgaaaccaaaccttccatcagaatcacgctccagatcaaagtcagcttcaaaaacccgatctcggtccaagtctagatccaggtctgcttccagatcgccctcccgatctagatctaggtcccactcaaggtcctaactggctatggccacagctggaactacccgagaagtcttttgtacatgtttggtagccgtagcacaagtgattggagtagaacatgtcactgctgtacatttttaactcccctaatggtgtgtctataattgttaaatctaagtgcttcctctcagtaaagcctcctggcaccaggccttcctgctcgactgaaaaaaattttctctttgaaaatccccttttactcatggcccacagtagaatatccaaaacgccttggctttcaggcctggcctttcctacagggagctcagtaacctggacggctctaaggctggaatgaccacataggtaggtatggtgagttcaaccatttttgctcttgaattgatgcccttcgatgtatgccatttagtgaaagtgctaagtcttaagtttcctaccactttggtttcatatttttggacttaacaaagttgtgaatagcacagtcgaggaaaattgatacctgcagtaacccataggaaataaactgtagagttccatattctggtattgtgattatattgttttatattaaaaaaaaaaaaaaaaaaa

SEQ ID NO: 57 - protein, 494 aa, Homo sapiens
MPRVYIGRLSYQARERDVERFFKGYGKILEVDLKNGYGFVEFDDLRDADDAVYELNGKDLCGERVIVEHARGPRRDGSYGSGRSGYGYRRSGRDKYGPPTRTEYRLIVENLSSRCSWQDLKDYMRQAGEVTYADAHKGRKNEGVIEFVSYSDMKRALEKLDGTEVNGRKIRLVEDKPGSRRRRSYSRSRSHSRSRSRSRHSRKSRSRSGSSKSSHSKSRSRSRSGSRSRSKSRSRSQSRSRSKKEKSRSPSKEKSRSRSHSAGKSRSKSKDQAEEKIQNNDNVGKPKSRSPSRHKSKSKSRSRSQERRVEEEKRGSVSRGRSQEKSLRQSRSRSRSKGGSRSRSRSRSKSKDKRKGRKRSREESRSRSRSRSKSERSRKRGSKRDSKAGSSKKKKKEDTDRSQSRSPSRSVSKEREHAKSESSQREGRGESENAGTNQETRSRSRSNSKSKPNLPSESRSRSKSASKTRSRSKSRSRSASRSPSRSRSRSHSRS

SEQ ID NO: 58 - DNA, 2434 bp, Homo sapiens
gccggggcgtcaggctctgtgttggttggagcgagcatgtgggtctgcagtaccctgtggcgggtgcgaacccccgcccggcagtggcgggggctgctcccagcttctggctgtcacggacctgccgcctcctcctactccgcatccgccgagcctgcccgggtccgggcgcttgtctatgggcaccacggggatccagccaaggtcgtcgaaaccgtaattcctgggcacacatggcagctcagaaatgttgcctgacctactttgaggagatgatttgagcgaaacacccattctagcctggatgacatgaacatctccgtttggctttgtgcttagactcaagaacctggagctagctgctgtgagaggatcagatgtccgtgtgaagatgctggcggcccctatcaatccatctgacataaatatgatccaaggaaactacggattccttcctgaactgcctgctgttggagggaacgaaggtgttgcacaggtggtagcggtgggcagcaatgtgaccgggctgaagccaggagactgggtgattccagcaaatgctggtttaggaacctggcggaccgaggctgtgttcagcgaggaagcactgatccaagttccgagtgacatccctcttcagagcgctgccaccctgggtgtcaatccctgcacagcctacaggatgttgatggacttcgagcaactgcagccaggggattctgtcatccagaatgcatccaacagcggagtggggcaagcagtcatccagatcgccgcagccctgggcctaagaaccatcaatgtggtccgagacagacctgatatccagaagctgagtgacagactgaagagtctgggggctgagcatgtcatcacagaagaggagctaagaaggcccgaaatgaaaaacttctttaaggacatgccccagccacggcttgctctcaactgtgttggtgggaaaagctccacagagctgctgcggcagttagcgcgtggaggaaccatggtaacctatggggggatggccaagcagcccgtcgtagcctctgtgagcctgctcatttttaaggatctcaaacttcgaggcttttggttgtcccagtggaagaaggatcacagtccagaccagttcaaggagctgatcctcacactgtgcgatctcatccgccgaggccagctcacagcccctgcctgctcccaggtcccgctgcaggactaccagtctgccttggaagcctccatgaagcccttcatatcttcaaagcagattctcaccatgtgatcatcccaaaagagctggagtgacatgggaggggaggcggatctgaggggctgggtgcaggcccctcagttggggctcccaccttccccagactactgttctcctcactgcctcttcctattaggaggatggtgaagccagccacggttttccccagggccagccttaaggtatctaataaagtctgaactctcccttccaaaaagtagaagtcatccctgtcgagaaggaccaacactgtgcactggtcagctcacagcaccaagaggcccccttcctgcttttctgtcatgtgttcccccagtaatcattttctgaccaccctgaaagcaaagcctgggtgggtactggcagtgcaaaggccagtaggccaccatccctggccccaagctgcacaagcccacagacgagggtcctgtagaacaaacgctttgatgtgcttctcaggtagcctgcggcccagtccagggcttggggaggatcagctgcatggaagagtgaatgccaggctgaggtcatcagggccctgaggaacttggacgtggggtcttcactctcatggaactgcccttctaactggagacatagacaatataccagtggttctcaaccagaggcaattttacccccaggagacatttgacaatgtctggggatatttctggctatcacagcttatgaaggaggttgctactggcatctagcaggcagagtgagtgctgctgttaaacccaccacaggacacagaacagtctactgcaacaaagaattacccaaggcctggcgcggtggctcacacctgtaatcccagcactttgggaagccaaggcaagcggatcacttgagcccaggagttcaaggtcaacctaggtaacgtggtgaaacaccatctctacaaaaaatacaaacattagccaggtatggtgctgtgcacctgtagtcccagctactcgggaggttgaggtgggaggatcacctgagcctgggaggtctagactgcagtgagccatgatcatgccactgcattccagcctaggcaacagagcaagaccctatatcaaaaaaaaaaaaaaaatctagccccaaatgttcaatgttcatgaggtcgttgataaaccgtgcattaaacaatctcacagtaattaccat

SEQ ID NO: 59 - protein, 297 aa, Homo sapiens
MLAAPINPSDINMIQGNYGFLPELPAVGGNEGVAQVVAVGSNVTGLKPGDWVIPANAGLGTWRTEAVFSEEALIQVPSDIPLQSAATLGVNPCTAYRMLMDFEQLQPGDSVIQNASNSGVGQAVIQIAAALGLRTINVVRDRPDIQKLSDRLKSLGAEHVITEEELRRPEMKNFFKDMPQPRLALNCVGGKSSTELLRQLARGGTMVTYGGMAKQPVVASVSLLIFKDLKLRGFWLSQWKKDHSPDQFKELILTLCDLIRRGQLTAPACSQVPLQDYQSALEASMKPFISSKQILTM

SEQ ID NO: 60 - DNA, 2307 bp, Homo sapiens
gccggggcgtcaggctctgtgttggttggagcgagcatgtgggtctgcagtaccctgtggcgggtgcgaacccccgcccggcagtggcgggggctgctcccagcttctggctgtcacggacctgccgcctcctcctactccgcatccgccgagcctgcccgggtccgggcgcttgtctatgggcaccacggggatccagccaaggtcgtcgaactcaagaacctggagctagctgctgtgagaggatcagatgtccgtgtgaagatgctggcggcccctatcaatccatctgacataaatatgatccaaggaaactacggattccttcctgaactgcctgctgttggagggaacgaaggtgttgcacaggtggtagcggtgggcagcaatgtgaccgggctgaagccaggagactgggtgattccagcaaatgctggtttaggaacctggcggaccgaggctgtgttcagcgaggaagcactgatccaagttccgagtgacatccctcttcagagcgctgccaccctgggtgtcaatccctgcacagcctacaggatgttgatggacttcgagcaactgcagccaggggattctgtcatccagaatgcatccaacagcggagtggggcaagcagtcatccagatcgccgcagccctgggcctaagaaccatcaatgtggtccgagacagacctgatatccagaagctgagtgacagactgaagagtctgggggctgagcatgtcatcacagaagaggagctaagaaggcccgaaatgaaaaacttctttaaggacatgccccagccacggcttgctctcaactgtgttggtgggaaaagctccacagagctgctgcggcagttagcgcgtggaggaaccatggtaacctatggggggatggccaagcagcccgtcgtagcctctgtgagcctgctcatttttaaggatctcaaacttcgaggcttttggttgtcccagtggaagaaggatcacagtccagaccagttcaaggagctgatcctcacactgtgcgatctcatccgccgaggccagctcacagcccctgcctgctcccaggtcccgctgcaggactaccagtctgccttggaagcctccatgaagcccttcatatcttcaaagcagattctcaccatgtgatcatcccaaaagagctggagtgacatgggaggggaggcggatctgaggggctgggtgcaggcccctcagttggggctcccaccttccccagactactgttctcctcactgcctcttcctattaggaggatggtgaagccagccacggttttccccagggccagccttaaggtatctaataaagtctgaactctcccttccaaaaagtagaagtcatccctgtcgagaaggaccaacactgtgcactggtcagctcacagcaccaagaggcccccttcctgcttttctgtcatgtgttcccccagtaatcattttctgaccaccctgaaagcaaagcctgggtgggtactggcagtgcaaaggccagtaggccaccatccctggccccaagctgcacaagcccacagacgagggtcctgtagaacaaacgctttgatgtgcttctcaggtagcctgcggcccagtccagggcttggggaggatcagctgcatggaagagtgaatgccaggctgaggtcatcagggccctgaggaacttggacgtggggtcttcactctcatggaactgcccttctaactggagacatagacaatataccagtggttctcaaccagaggcaattttacccccaggagacatttgacaatgtctggggatatttctggctatcacagcttatgaaggaggttgctactggcatctagcaggcagagtgagtgctgctgttaaacccaccacaggacacagaacagtctactgcaacaaagaattacccaaggcctggcgcggtggctcacacctgtaatcccagcactttgggaagccaaggcaagcggatcacttgagcccaggagttcaaggtcaacctaggtaacgtggtgaaacaccatctctacaaaaaatacaaacattagccaggtatggtgctgtgcacctgtagtcccagctactcgggaggttgaggtgggaggatcacctgagcctgggaggtctagactgcagtgagccatgatcatgccactgcattccagcctaggcaacagagcaagaccctatatcaaaaaaaaaaaaaaaatctagccccaaatgttcaatgttcatgaggtcgttgataaaccgtgcattaaacaatctcacagtaattaccat

SEQ ID NO: 61 - protein, 373 aa, Homo sapiens
MWVCSTLWRVRTPARQWRGLLPASGCHGPAASSYSASAEPARVRALVYGHHGDPAKVVELKNLELAAVRGSDVRVKMLAAPINPSDINMIQGNYGFLPELPAVGGNEGVAQVVAVGSNVTGLKPGDWVIPANAGLGTWRTEAVFSEEALIQVPSDIPLQSAATLGVNPCTAYRMLMDFEQLQPGDSVIQNASNSGVGQAVIQIAAALGLRTINVVRDRPDIQKLSDRLKSLGAEHVITEEELRRPEMKNFFKDMPQPRLALNCVGGKSSTELLRQLARGGTMVTYGGMAKQPVVASVSLLIFKDLKLRGFWLSQWKKDHSPDQFKELILTLCDLIRRGQLTAPACSQVPLQDYQSALEASMKPFISSKQILTM

SEQ ID NO: 62 - DNA, 5609 bp, Homo sapiens
gccgcgccgctccgctccggctcgggctccggctcgcctcgggctgggctcgggctccgggggcggcgtcccccgcgccgggccccgggacgggcggcgacgctccaaccatggcccgtgcccaggcgctcgtgctggcactcaccttccagctctgcgcgccggagaccgagactccggcagctggctgcaccttcgaggaggcaagtgacccagcagtgccctgcgagtacagccaggcccagtacgatgacttccagtgggagcaagtgcgaatccaccctggcacccgggcacctgcggacctgccccacggctcctacttgatggtcaacacttcccagcatgccccaggccagcgagcccatgtcatcttccagagcctgagcgagaatgatacccactgtgtgcagttcagctacttcctgtacagccgggacgggcacagcccgggcaccctgggcgtctacgtgcgcgttaatgggggccccctgggcagtgctgtgtggaatatgactggatcccacggccgtcagtggcaccaggctgagctggctgtcagcactttctggcccaatgaatatcaggtgctgtttgaggccctcatctccccagaccgcaggggctacatgggcctagatgacatcctgcttctcagctacccctgcgcaaaggccccacacttctcccgcctgggcgacgtggaggtcaacgcgggccagaacgcgtcgttccagtgcatggccgcgggcagagcggccgaggccgaacgcttcctcttgcaacggcagagcggggcgctggtgccggcggcgggcgtgcggcacatcagccaccggcgcttcctggccactttcccgctggctgccgtgagccgcgccgagcaggacctgtaccgctgtgtgtcccaggccccgcgcggcgcgggcgtctctaacttcgcggagctcatcgtcaaggagcccccaactcccatcgcgcccccacagctgctgcgtgctggccccacctacctcatcatccagctcaacaccaactccatcattggcgacgggccgatcgtgcgcaaggagattgagtaccgcatggcgcgcgggccctgggctgaggtgcacgccgtcagcctgcagacctacaagctgtggcacctcgaccccgacacagagtatgagatcagcgtgctgctcacgcgtcccggagacggcggcactggccgccctgggccacccctcatcagccgcaccaaatgcgcagagcccatgagggcccccaaaggcctggcttttgctgagatccaggcccgtcagctgaccctgcagtgggaaccactgggctacaacgtgacgcgttgccacacctatactgtgtcgctgtgctatcactacaccctgggcagcagccacaaccagaccatccgagagtgtgtgaagacagagcaaggtgtcagccgctacaccatcaagaacctgctgccctatcggaacgttcacgtgaggcttgtcctcactaaccctgaggggcgcaaagagggcaaggaggtcactttccagacggatgaggatgtgcccagtgggattgcagccgagtccctgaccttcactccactggaggacatgatcttcctcaagtgggaggagccccaggagcccaatggtctcatcacccagtatgagatcagctaccagagcatcgagtcatcagacccggcagtgaacgtgccaggcccacgacgtaccatctccaagctccgcaatgagacctaccatgtcttctccaacctgcacccaggcaccacctacctgttctccgtgcgggcccgcacaggcaaaggcttcggccaggcggcactcactgagataaccactaacatctctgctcccagctttgattatgccgacatgccgtcacccctgggcgagtctgagaacaccatcaccgtgctgctgaggccggcacagggccgcggtgcgcccatcagtgtgtaccaggtgattgtggaggaggagcgggcgcggaggctgcggcgggagccaggtggacaggactgcttcccagtgccattgaccttcgaggcggcgctggcccgaggcctggtgcactacttcggggccgaactggcggccagcagtctacctgaggccatgccctttaccgtgggtgacaaccagacctaccgaggcttctggaacccaccacttgagcctaggaaggcctatctcatctacttccaggcagcaagccacctgaagggggagacccggctgaattgcatccgcattgccaggaaagctgcctgcaaggaaagcaagcggcccctggaggtgtcccagagatcggaggagatggggcttatcctgggcatctgtgcaggggggcttgctgtcctcatccttctcctgggtgccatcattgtcatcatccgcaaagggagagaccactatgcctactcctactacccgaagccggtgaacatgaccaaggccaccgtcaactaccgccaggagaagacacacatgatgagcgccgtggaccgcagcttcacagaccagagcaccctgcaggaggacgagcggctgggcctgtccttcatggacacccatggctacagcacccggggagaccagcgcagcggtggggtcactgaggccagcagcctcctggggggctccccgaggcgtccctgtggccggaagggctccccataccacacggggcagctgcaccctgcggtgcgtgtcgcagaccttctgcagcacatcaaccagatgaagacggccgagggttacggcttcaagcaggagtatgagagcttctttgaaggctgggacgccacaaagaagaaagacaaggtcaagggcagccggcaggagccaatgcctgcctatgatcggcaccgagtgaaactgcacccgatgctgggagaccccaatgccgactacattaatgccaactacatagatggttaccacaggtcaaaccacttcatagccactcaagggccgaagcctgagatggtctatgacttctggcgtatggtgtggcaggagcactgttccagcatcgtcatgatcaccaagctggtcgaggtgggcagggtgaaatgctcacggtactggccggaggactcagacacctacggggacatcaagattatgctggtgaagacagagaccctggctgagtatgtcgtgcgcacttttgccctggagcggagaggctactctgcccggcacgaggtccgccagttccacttcacagcgtggccagagcatggcgtcccctaccatgccacggggctgctggctttcatccggcgcgtgaaggcctccaccccacctgatgccgggcccattgtcatccactgcagcgcgggcaccggccgcacaggttgctatatcgtcctggatgtgatgctggacatggcagagtgtgagggcgtcgtggacatttacaactgtgtgaagactctctgctcccggcgtgtcaacatgatccagactgaggagcagtacatcttcattcatgatgcaatcctggaggcctgcctgtgtggggagaccaccatccctgtcagtgagttcaaggccacctacaaggagatgatccgcattgatcctcagagtaattcctcccagctgcgggaagagttccagacgctgaactcggtcaccccgccgctggacgtggaggagtgcagcatcgccctgttgccccggaaccgcgacaagaaccgcagcatggacgtcctgccgcccgaccgctgcctgcccttcctcatctccactgatggggactccaacaactacattaatgcagccctgactgacagctacacacggagtgcggccttcatcgtgaccctgcacccgctgcagagcaccacgcccgacttctggcggctggtctacgattacgggtgcacctccatcgtcatgctcaaccagctgaaccagtccaactccgcctggccctgcctgcagtactggccagagccaggccggcagcaatatggcctcatggaggtggagtttatgtcgggcacagctgatgaagacttagtggctcgagtcttccgggtgcagaacatctctcggttgcaggaggggcacctgctggtgcggcacttccagttcctgcgctggtctgcataccgggacacacctgactccaagaaggccttcttgcacctgctggctgaggtggacaagtggcaggccgagagtggggatgggcgcaccatcgtgcactgcctaaacgggggaggacgcagcggcaccttctgcgcctgcgccacggtcctggagatgatccgctgccacaacttggtggacgttttctttgctgccaaaaccctccggaactacaaacccaacatggtggagaccatggatcagtaccacttttgctacgatgtggccctggagtacttggaggggctggagtcaagatagcggggccctggcctggggcacccactgcacactcagggccagacccaccatcctggactggcgaggaagatcagtgcctcctgctctgcccaaacacactcccatggggcaagcactggagtggatgctgggctatcttgctcccccttccactgtgggcagggcctttcgcttgtcccatgggcgggtggtgggccaaggaggagcttagcaagtctgcagcccagccccacctccatagggtcctgcaggcctgtgctgagaggcctggtgctgcctggcagagtgacaaaggctcaggacggctggctctgggggactcaggccaagccccttggcaccatcctggcttttggcagggatgagtgaggccctgcagagagcatcccaggccaaggttcccactcagcctgccccctctgcatgtgggtagaggatgtactgggacttggcatttaggattccatctggcccagcccctgaaggtcctggggaagcaggtctcaattctgaatagccagtggggcacactgactgtcctccccaggggaactgcagcgccctcctccccactgccccctgcagcccctgagatattttgctcactatccctccccacttgcttccctgatatgtgctctgagcttccctgaaccaggatctgcctattactgctgtgccccatggggggctccttccctgcctgacccactgttgcagaatgaagtcacctcgcccccctcttcctttaatcttcaggcctcactggcctgtcctgctcagcttgggccagtgacaatctgcaaggctgaacaacagcccctggggttgaggcccctgtggctcctggtcaggctgcccgttgtggggaggggcagtgttagagcagggctggtcataccctctggagttcagaggaagaggtaggaccagtgcttttttgtttcttttgttatttttggttgggtgggtgggaaggtctctttaaaatggggcaggccacacccccattccgtgcctcaatttccccatctgtaaactgtagatatgactactgacctacctcgcagggggctgtggggaggcataagctgatgtttgtaaagcgctttgtaaataaacgtgctctctgaatgccacagaaaaaaaaaaaaaaaa

SEQ ID NO: 63 - protein, 1446 aa, Homo sapiens
MARAQALVLALTFQLCAPETETPAAGCTFEEASDPAVPCEYSQAQYDDFQWEQVRIHPGTRAPADLPHGSYLMVNTSQHAPGQRAHVIFQSLSENDTHCVQFSYFLYSRDGHSPGTLGVYVRVNGGPLGSAVWNMTGSHGRQWHQAELAVSTFWPNEYQVLFEALISPDRRGYMGLDDILLLSYPCAKAPHFSRLGDVEVNAGQNASFQCMAAGRAAEAERFLLQRQSGALVPAAGVRHISHRRFLATFPLAAVSRAEQDLYRCVSQAPRGAGVSNFAELIVKEPPTPIAPPQLLRAGPTYLIIQLNTNSIIGDGPIVRKEIEYRMARGPWAEVHAVSLQTYKLWHLDPDTEYEISVLLTRPGDGGTGRPGPPLISRTKCAEPMRAPKGLAFAEIQARQLTLQWEPLGYNVTRCHTYTVSLCYHYTLGSSHNQTIRECVKTEQGVSRYTIKNLLPYRNVHVRLVLTNPEGRKEGKEVTFQTDEDVPSGIAAESLTFTPLEDMIFLKWEEPQEPNGLITQYEISYQSIESSDPAVNVPGPRRTISKLRNETYHVFSNLHPGTTYLFSVRARTGKGFGQAALTEITTNISAPSFDYADMPSPLGESENTITVLLRPAQGRGAPISVYQVIVEEERARRLRREPGGQDCFPVPLTFEAALARGLVHYFGAELAASSLPEAMPFTVGDNQTYRGFWNPPLEPRKAYLIYFQAASHLKGETRLNCIRIARKAACKESKRPLEVSQRSEEMGLILGICAGGLAVLILLLGAIIVIIRKGRDHYAYSYYPKPVNMTKATVNYRQEKTHMMSAVDRSFTDQSTLQEDERLGLSFMDTHGYSTRGDQRSGGVTEASSLLGGSPRRPCGRKGSPYHTGQLHPAVRVADLLQHINQMKTAEGYGFKQEYESFFEGWDATKKKDKVKGSRQEPMPAYDRHRVKLHPMLGDPNADYINANYIDGYHRSNHFIATQGPKPEMVYDFWRMVWQEHCSSIVMITKLVEVGRVKCSRYWPEDSDTYGDIKIMLVKTETLAEYVVRTFALERRGYSARHEVRQFHFTAWPEHGVPYHATGLLAFIRRVKASTPPDAGPIVIHCSAGTGRTGCYIVLDVMLDMAECEGVVDIYNCVKTLCSRRVNMIQTEEQYIFIHDAILEACLCGETTIPVSEFKATYKEMIRIDPQSNSSQLREEFQTLNSVTPPLDVEECSIALLPRNRDKNRSMDVLPPDRCLPFLISTDGDSNNYINAALTDSYTRSAAFIVTLHPLQSTTPDFWRLVYDYGCTSIVMLNQLNQSNSAWPCLQYWPEPGRQQYGLMEVEFMSGTADEDLVARVFRVQNISRLQEGHLLVRHFQFLRWSAYRDTPDSKKAFLHLLAEVDKWQAESGDGRTIVHCLNGGGRSGTFCACATVLEMIRCHNLVDVFFAAKTLRNYKPNMVETMDQYHFCYDVALEYLEGLESR

SEQ ID NO: 64 - DNA, 5597 bp, Homo sapiens
gccgcgccgctccgctccggctcgggctccggctcgcctcgggctgggctcgggctccgggggcggcgtcccccgcgccgggccccgggacgggcggcgacgctccaaccatggcccgtgcccaggcgctcgtgctggcactcaccttccagctctgcgcgccggagaccgagactccggcagctggctgcaccttcgaggaggcaagtgacccagcagtgccctgcgagtacagccaggcccagtacgatgacttccagtgggagcaagtgcgaatccaccctggcacccgggcacctgcggacctgccccacggctcctacttgatggtcaacacttcccagcatgccccaggccagcgagcccatgtcatcttccagagcctgagcgagaatgatacccactgtgtgcagttcagctacttcctgtacagccgggacgggcacagcccgggcaccctgggcgtctacgtgcgcgttaatgggggccccctgggcagtgctgtgtggaatatgactggatcccacggccgtcagtggcaccaggctgagctggctgtcagcactttctggcccaatgaatatcaggtgctgtttgaggccctcatctccccagaccgcaggggctacatgggcctagatgacatcctgcttctcagctacccctgcgcaaaggccccacacttctcccgcctgggcgacgtggaggtcaacgcgggccagaacgcgtcgttccagtgcatggccgcgggcagagcggccgaggccgaacgcttcctcttgcaacggcagagcggggcgctggtgccggcggcgggcgtgcggcacatcagccaccggcgcttcctggccactttcccgctggctgccgtgagccgcgccgagcaggacctgtaccgctgtgtgtcccaggccccgcgcggcgcgggcgtctctaacttcgcggagctcatcgtcaaggagcccccaactcccatcgcgcccccacagctgctgcgtgctggccccacctacctcatcatccagctcaacaccaactccatcattggcgacgggccgatcgtgcgcaaggagattgagtaccgcatggcgcgcgggccctgggctgaggtgcacgccgtcagcctgcagacctacaagctgtggcacctcgaccccgacacagagtatgagatcagcgtgctgctcacgcgtcccggagacggcggcactggccgccctgggccacccctcatcagccgcaccaaatgcgcagagcccatgagggcccccaaaggcctggcttttgctgagatccaggcccgtcagctgaccctgcagtgggaaccactgggctacaacgtgacgcgttgccacacctatactgtgtcgctgtgctatcactacaccctgggcagcagccacaaccagaccatccgagagtgtgtgaagacagagcaaggtgtcagccgctacaccatcaagaacctgctgccctatcggaacgttcacgtgaggcttgtcctcactaaccctgaggggcgcaaagagggcaaggaggtcactttccagacggatgaggatgtgcccagtgggattgcagccgagtccctgaccttcactccactggaggacatgatcttcctcaagtgggaggagccccaggagcccaatggtctcatcacccagtatgagatcagctaccagagcatcgagtcatcagacccggcagtgaacgtgccaggcccacgacgtaccatctccaagctccgcaatgagacctaccatgtcttctccaacctgcacccaggcaccacctacctgttctccgtgcgggcccgcacaggcaaaggcttcggccaggcggcactcactgagataaccactaacatctctgctcccagctttgattatgccgacatgccgtcacccctgggcgagtctgagaacaccatcaccgtgctgctgaggccggcacagggccgcggtgcgcccatcagtgtgtaccaggtgattgtggaggaggagcgggcgcggaggctgcggcgggagccaggtggacaggactgcttcccagtgccattgaccttcgaggcggcgctggcccgaggcctggtgcactacttcggggccgaactggcggccagcagtctacctgaggccatgccctttaccgtgggtgacaaccagacctaccgaggcttctggaacccaccacttgagcctaggaaggcctatctcatctacttccaggcagcaagccacctgaagggggagacccggctgaattgcatccgcattgccaggaaagctgcctgcaaggaaagcaagcggcccctggaggtgtcccagagatcggaggagatggggcttatcctgggcatctgtgcaggggggcttgctgtcctcatccttctcctgggtgccatcattgtcatcatccgcaaagggaagccggtgaacatgaccaaggccaccgtcaactaccgccaggagaagacacacatgatgagcgccgtggaccgcagcttcacagaccagagcaccctgcaggaggacgagcggctgggcctgtccttcatggacacccatggctacagcacccggggagaccagcgcagcggtggggtcactgaggccagcagcctcctggggggctccccgaggcgtccctgtggccggaagggctccccataccacacggggcagctgcaccctgcggtgcgtgtcgcagaccttctgcagcacatcaaccagatgaagacggccgagggttacggcttcaagcaggagtatgagagcttctttgaaggctgggacgccacaaagaagaaagacaaggtcaagggcagccggcaggagccaatgcctgcctatgatcggcaccgagtgaaactgcacccgatgctgggagaccccaatgccgactacattaatgccaactacatagatattcggataaaccgagaaggttaccacaggtcaaaccacttcatagccactcaagggccgaagcctgagatggtctatgacttctggcgtatggtgtggcaggagcactgttccagcatcgtcatgatcaccaagctggtcgaggtgggcagggtgaaatgctcacggtactggccggaggactcagacacctacggggacatcaagattatgctggtgaagacagagaccctggctgagtatgtcgtgcgcacttttgccctggagcggagaggctactctgcccggcacgaggtccgccagttccacttcacagcgtggccagagcatggcgtcccctaccatgccacggggctgctggctttcatccggcgcgtgaaggcctccaccccacctgatgccgggcccattgtcatccactgcagcgcgggcaccggccgcacaggttgctatatcgtcctggatgtgatgctggacatggcagagtgtgagggcgtcgtggacatttacaactgtgtgaagactctctgctcccggcgtgtcaacatgatccagactgaggagcagtacatcttcattcatgatgcaatcctggaggcctgcctgtgtggggagaccaccatccctgtcagtgagttcaaggccacctacaaggagatgatccgcattgatcctcagagtaattcctcccagctgcgggaagagttccagacgctgaactcggtcaccccgccgctggacgtggaggagtgcagcatcgccctgttgccccggaaccgcgacaagaaccgcagcatggacgtcctgccgcccgaccgctgcctgcccttcctcatctccactgatggggactccaacaactacattaatgcagccctgactgacagctacacacggagtgcggccttcatcgtgaccctgcacccgctgcagagcaccacgcccgacttctggcggctggtctacgattacgggtgcacctccatcgtcatgctcaaccagctgaaccagtccaactccgcctggccctgcctgcagtactggccagagccaggccggcagcaatatggcctcatggaggtggagtttatgtcgggcacagctgatgaagacttagtggctcgagtcttccgggtgcagaacatctctcggttgcaggaggggcacctgctggtgcggcacttccagttcctgcgctggtctgcataccgggacacacctgactccaagaaggccttcttgcacctgctggctgaggtggacaagtggcaggccgagagtggggatgggcgcaccatcgtgcactgcctaaacgggggaggacgcagcggcaccttctgcgcctgcgccacggtcctggagatgatccgctgccacaacttggtggacgttttctttgctgccaaaaccctccggaactacaaacccaacatggtggagaccatggatcagtaccacttttgctacgatgtggccctggagtacttggaggggctggagtcaagatagcggggccctggcctggggcacccactgcacactcagggccagacccaccatcctggactggcgaggaagatcagtgcctcctgctctgcccaaacacactcccatggggcaagcactggagtggatgctgggctatcttgctcccccttccactgtgggcagggcctttcgcttgtcccatgggcgggtggtgggccaaggaggagcttagcaagtctgcagcccagccccacctccatagggtcctgcaggcctgtgctgagaggcctggtgctgcctggcagagtgacaaaggctcaggacggctggctctgggggactcaggccaagccccttggcaccatcctggcttttggcagggatgagtgaggccctgcagagagcatcccaggccaaggttcccactcagcctgccccctctgcatgtgggtagaggatgtactgggacttggcatttaggattccatctggcccagcccctgaaggtcctggggaagcaggtctcaattctgaatagccagtggggcacactgactgtcctccccaggggaactgcagcgccctcctccccactgccccctgcagcccctgagatattttgctcactatccctccccacttgcttccctgatatgtgctctgagcttccctgaaccaggatctgcctattactgctgtgccccatggggggctccttccctgcctgacccactgttgcagaatgaagtcacctcgcccccctcttcctttaatcttcaggcctcactggcctgtcctgctcagcttgggccagtgacaatctgcaaggctgaacaacagcccctggggttgaggcccctgtggctcctggtcaggctgcccgttgtggggaggggcagtgttagagcagggctggtcataccctctggagttcagaggaagaggtaggaccagtgcttttttgtttcttttgttatttttggttgggtgggtgggaaggtctctttaaaatggggcaggccacacccccattccgtgcctcaatttccccatctgtaaactgtagatatgactactgacctacctcgcagggggctgtggggaggcataagctgatgtttgtaaagcgctttgtaaataaacgtgctctctgaatgccacagaaaaaaaaaaaaaaaa

SEQ ID NO: 65 - protein, 1442 aa, Homo sapiens
MARAQALVLALTFQLCAPETETPAAGCTFEEASDPAVPCEYSQAQYDDFQWEQVRIHPGTRAPADLPHGSYLMVNTSQHAPGQRAHVIFQSLSENDTHCVQFSYFLYSRDGHSPGTLGVYVRVNGGPLGSAVWNMTGSHGRQWHQAELAVSTFWPNEYQVLFEALISPDRRGYMGLDDILLLSYPCAKAPHFSRLGDVEVNAGQNASFQCMAAGRAAEAERFLLQRQSGALVPAAGVRHISHRRFLATFPLAAVSRAEQDLYRCVSQAPRGAGVSNFAELIVKEPPTPIAPPQLLRAGPTYLIIQLNTNSIIGDGPIVRKEIEYRMARGPWAEVHAVSLQTYKLWHLDPDTEYEISVLLTRPGDGGTGRPGPPLISRTKCAEPMRAPKGLAFAEIQARQLTLQWEPLGYNVTRCHTYTVSLCYHYTLGSSHNQTIRECVKTEQGVSRYTIKNLLPYRNVHVRLVLTNPEGRKEGKEVTFQTDEDVPSGIAAESLTFTPLEDMIFLKWEEPQEPNGLITQYEISYQSIESSDPAVNVPGPRRTISKLRNETYHVFSNLHPGTTYLFSVRARTGKGFGQAALTEITTNISAPSFDYADMPSPLGESENTITVLLRPAQGRGAPISVYQVIVEEERARRLRREPGGQDCFPVPLTFEAALARGLVHYFGAELAASSLPEAMPFTVGDNQTYRGFWNPPLEPRKAYLIYFQAASHLKGETRLNCIRIARKAACKESKRPLEVSQRSEEMGLILGICAGGLAVLILLLGAIIVIIRKGKPVNMTKATVNYRQEKTHMMSAVDRSFTDQSTLQEDERLGLSFMDTHGYSTRGDQRSGGVTEASSLLGGSPRRPCGRKGSPYHTGQLHPAVRVADLLQHINQMKTAEGYGFKQEYESFFEGWDATKKKDKVKGSRQEPMPAYDRHRVKLHPMLGDPNADYINANYIDIRINREGYHRSNHFIATQGPKPEMVYDFWRMVWQEHCSSIVMITKLVEVGRVKCSRYWPEDSDTYGDIKIMLVKTETLAEYVVRTFALERRGYSARHEVRQFHFTAWPEHGVPYHATGLLAFIRRVKASTPPDAGPIVIHCSAGTGRTGCYIVLDVMLDMAECEGVVDIYNCVKTLCSRRVNMIQTEEQYIFIHDAILEACLCGETTIPVSEFKATYKEMIRIDPQSNSSQLREEFQTLNSVTPPLDVEECSIALLPRNRDKNRSMDVLPPDRCLPFLISTDGDSNNYINAALTDSYTRSAAFIVTLHPLQSTTPDFWRLVYDYGCTSIVMLNQLNQSNSAWPCLQYWPEPGRQQYGLMEVEFMSGTADEDLVARVFRVQNISRLQEGHLLVRHFQFLRWSAYRDTPDSKKAFLHLLAEVDKWQAESGDGRTIVHCLNGGGRSGTFCACATVLEMIRCHNLVDVFFAAKTLRNYKPNMVETMDQYHFCYDVALEYLEGLESR

SEQ ID NO: 66 - DNA, 5579 bp, Homo sapiens
gccgcgccgctccgctccggctcgggctccggctcgcctcgggctgggctcgggctccgggggcggcgtcccccgcgccgggccccgggacgggcggcgacgctccaaccatggcccgtgcccaggcgctcgtgctggcactcaccttccagctctgcgcgccggagaccgagactccggcagctggctgcaccttcgaggaggcaagtgacccagcagtgccctgcgagtacagccaggcccagtacgatgacttccagtgggagcaagtgcgaatccaccctggcacccgggcacctgcggacctgccccacggctcctacttgatggtcaacacttcccagcatgccccaggccagcgagcccatgtcatcttccagagcctgagcgagaatgatacccactgtgtgcagttcagctacttcctgtacagccgggacgggcacagcccgggcaccctgggcgtctacgtgcgcgttaatgggggccccctgggcagtgctgtgtggaatatgactggatcccacggccgtcagtggcaccaggctgagctggctgtcagcactttctggcccaatgaatatcaggtgctgtttgaggccctcatctccccagaccgcaggggctacatgggcctagatgacatcctgcttctcagctacccctgcgcaaaggccccacacttctcccgcctgggcgacgtggaggtcaacgcgggccagaacgcgtcgttccagtgcatggccgcgggcagagcggccgaggccgaacgcttcctcttgcaacggcagagcggggcgctggtgccggcggcgggcgtgcggcacatcagccaccggcgcttcctggccactttcccgctggctgccgtgagccgcgccgagcaggacctgtaccgctgtgtgtcccaggccccgcgcggcgcgggcgtctctaacttcgcggagctcatcgtcaaggagcccccaactcccatcgcgcccccacagctgctgcgtgctggccccacctacctcatcatccagctcaacaccaactccatcattggcgacgggccgatcgtgcgcaaggagattgagtaccgcatggcgcgcgggccctgggctgaggtgcacgccgtcagcctgcagacctacaagctgtggcacctcgaccccgacacagagtatgagatcagcgtgctgctcacgcgtcccggagacggcggcactggccgccctgggccacccctcatcagccgcaccaaatgcgcagagcccatgagggcccccaaaggcctggcttttgctgagatccaggcccgtcagctgaccctgcagtgggaaccactgggctacaacgtgacgcgttgccacacctatactgtgtcgctgtgctatcactacaccctgggcagcagccacaaccagaccatccgagagtgtgtgaagacagagcaaggtgtcagccgctacaccatcaagaacctgctgccctatcggaacgttcacgtgaggcttgtcctcactaaccctgaggggcgcaaagagggcaaggaggtcactttccagacggatgaggatgtgcccagtgggattgcagccgagtccctgaccttcactccactggaggacatgatcttcctcaagtgggaggagccccaggagcccaatggtctcatcacccagtatgagatcagctaccagagcatcgagtcatcagacccggcagtgaacgtgccaggcccacgacgtaccatctccaagctccgcaatgagacctaccatgtcttctccaacctgcacccaggcaccacctacctgttctccgtgcgggcccgcacaggcaaaggcttcggccaggcggcactcactgagataaccactaacatctctgctcccagctttgattatgccgacatgccgtcacccctgggcgagtctgagaacaccatcaccgtgctgctgaggccggcacagggccgcggtgcgcccatcagtgtgtaccaggtgattgtggaggaggagcgggcgcggaggctgcggcgggagccaggtggacaggactgcttcccagtgccattgaccttcgaggcggcgctggcccgaggcctggtgcactacttcggggccgaactggcggccagcagtctacctgaggccatgccctttaccgtgggtgacaaccagacctaccgaggcttctggaacccaccacttgagcctaggaaggcctatctcatctacttccaggcagcaagccacctgaagggggagacccggctgaattgcatccgcattgccaggaaagctgcctgcaaggaaagcaagcggcccctggaggtgtcccagagatcggaggagatggggcttatcctgggcatctgtgcaggggggcttgctgtcctcatccttctcctgggtgccatcattgtcatcatccgcaaagggaagccggtgaacatgaccaaggccaccgtcaactaccgccaggagaagacacacatgatgagcgccgtggaccgcagcttcacagaccagagcaccctgcaggaggacgagcggctgggcctgtccttcatggacacccatggctacagcacccggggagaccagcgcagcggtggggtcactgaggccagcagcctcctggggggctccccgaggcgtccctgtggccggaagggctccccataccacacggggcagctgcaccctgcggtgcgtgtcgcagaccttctgcagcacatcaaccagatgaagacggccgagggttacggcttcaagcaggagtatgagagcttctttgaaggctgggacgccacaaagaagaaagacaaggtcaagggcagccggcaggagccaatgcctgcctatgatcggcaccgagtgaaactgcacccgatgctgggagaccccaatgccgactacattaatgccaactacatagatggttaccacaggtcaaaccacttcatagccactcaagggccgaagcctgagatggtctatgacttctggcgtatggtgtggcaggagcactgttccagcatcgtcatgatcaccaagctggtcgaggtgggcagggtgaaatgctcacggtactggccggaggactcagacacctacggggacatcaagattatgctggtgaagacagagaccctggctgagtatgtcgtgcgcacttttgccctggagcggagaggctactctgcccggcacgaggtccgccagttccacttcacagcgtggccagagcatggcgtcccctaccatgccacggggctgctggctttcatccggcgcgtgaaggcctccaccccacctgatgccgggcccattgtcatccactgcagcgcgggcaccggccgcacaggttgctatatcgtcctggatgtgatgctggacatggcagagtgtgagggcgtcgtggacatttacaactgtgtgaagactctctgctcccggcgtgtcaacatgatccagactgaggagcagtacatcttcattcatgatgcaatcctggaggcctgcctgtgtggggagaccaccatccctgtcagtgagttcaaggccacctacaaggagatgatccgcattgatcctcagagtaattcctcccagctgcgggaagagttccagacgctgaactcggtcaccccgccgctggacgtggaggagtgcagcatcgccctgttgccccggaaccgcgacaagaaccgcagcatggacgtcctgccgcccgaccgctgcctgcccttcctcatctccactgatggggactccaacaactacattaatgcagccctgactgacagctacacacggagtgcggccttcatcgtgaccctgcacccgctgcagagcaccacgcccgacttctggcggctggtctacgattacgggtgcacctccatcgtcatgctcaaccagctgaaccagtccaactccgcctggccctgcctgcagtactggccagagccaggccggcagcaatatggcctcatggaggtggagtttatgtcgggcacagctgatgaagacttagtggctcgagtcttccgggtgcagaacatctctcggttgcaggaggggcacctgctggtgcggcacttccagttcctgcgctggtctgcataccgggacacacctgactccaagaaggccttcttgcacctgctggctgaggtggacaagtggcaggccgagagtggggatgggcgcaccatcgtgcactgcctaaacgggggaggacgcagcggcaccttctgcgcctgcgccacggtcctggagatgatccgctgccacaacttggtggacgttttctttgctgccaaaaccctccggaactacaaacccaacatggtggagaccatggatcagtaccacttttgctacgatgtggccctggagtacttggaggggctggagtcaagatagcggggccctggcctggggcacccactgcacactcagggccagacccaccatcctggactggcgaggaagatcagtgcctcctgctctgcccaaacacactcccatggggcaagcactggagtggatgctgggctatcttgctcccccttccactgtgggcagggcctttcgcttgtcccatgggcgggtggtgggccaaggaggagcttagcaagtctgcagcccagccccacctccatagggtcctgcaggcctgtgctgagaggcctggtgctgcctggcagagtgacaaaggctcaggacggctggctctgggggactcaggccaagccccttggcaccatcctggcttttggcagggatgagtgaggccctgcagagagcatcccaggccaaggttcccactcagcctgccccctctgcatgtgggtagaggatgtactgggacttggcatttaggattccatctggcccagcccctgaaggtcctggggaagcaggtctcaattctgaatagccagtggggcacactgactgtcctccccaggggaactgcagcgccctcctccccactgccccctgcagcccctgagatattttgctcactatccctccccacttgcttccctgatatgtgctctgagcttccctgaaccaggatctgcctattactgctgtgccccatggggggctccttccctgcctgacccactgttgcagaatgaagtcacctcgcccccctcttcctttaatcttcaggcctcactggcctgtcctgctcagcttgggccagtgacaatctgcaaggctgaacaacagcccctggggttgaggcccctgtggctcctggtcaggctgcccgttgtggggaggggcagtgttagagcagggctggtcataccctctggagttcagaggaagaggtaggaccagtgcttttttgtttcttttgttatttttggttgggtgggtgggaaggtctctttaaaatggggcaggccacacccccattccgtgcctcaatttccccatctgtaaactgtagatatgactactgacctacctcgcagggggctgtggggaggcataagctgatgtttgtaaagcgctttgtaaataaacgtgctctctgaatgccacagaaaaaaaaaaaaaaaa

SEQ ID NO: 67 - protein, 1436 aa, Homo sapiens
MARAQALVLALTFQLCAPETETPAAGCTFEEASDPAVPCEYSQAQYDDFQWEQVRIHPGTRAPADLPHGSYLMVNTSQHAPGQRAHVIFQSLSENDTHCVQFSYFLYSRDGHSPGTLGVYVRVNGGPLGSAVWNMTGSHGRQWHQAELAVSTFWPNEYQVLFEALISPDRRGYMGLDDILLLSYPCAKAPHFSRLGDVEVNAGQNASFQCMAAGRAAEAERFLLQRQSGALVPAAGVRHISHRRFLATFPLAAVSRAEQDLYRCVSQAPRGAGVSNFAELIVKEPPTPIAPPQLLRAGPTYLIIQLNTNSIIGDGPIVRKEIEYRMARGPWAEVHAVSLQTYKLWHLDPDTEYEISVLLTRPGDGGTGRPGPPLISRTKCAEPMRAPKGLAFAEIQARQLTLQWEPLGYNVTRCHTYTVSLCYHYTLGSSHNQTIRECVKTEQGVSRYTIKNLLPYRNVHVRLVLTNPEGRKEGKEVTFQTDEDVPSGIAAESLTFTPLEDMIFLKWEEPQEPNGLITQYEISYQSIESSDPAVNVPGPRRTISKLRNETYHVFSNLHPGTTYLFSVRARTGKGFGQAALTEITTNISAPSFDYADMPSPLGESENTITVLLRPAQGRGAPISVYQVIVEEERARRLRREPGGQDCFPVPLTFEAALARGLVHYFGAELAASSLPEAMPFTVGDNQTYRGFWNPPLEPRKAYLIYFQAASHLKGETRLNCIRIARKAACKESKRPLEVSQRSEEMGLILGICAGGLAVLILLLGAIIVIIRKGKPVNMTKATVNYRQEKTHMMSAVDRSFTDQSTLQEDERLGLSFMDTHGYSTRGDQRSGGVTEASSLLGGSPRRPCGRKGSPYHTGQLHPAVRVADLLQHINQMKTAEGYGFKQEYESFFEGWDATKKKDKVKGSRQEPMPAYDRHRVKLHPMLGDPNADYINANYIDGYHRSNHFIATQGPKPEMVYDFWRMVWQEHCSSIVMITKLVEVGRVKCSRYWPEDSDTYGDIKIMLVKTETLAEYVVRTFALERRGYSARHEVRQFHFTAWPEHGVPYHATGLLAFIRRVKASTPPDAGPIVIHCSAGTGRTGCYIVLDVMLDMAECEGVVDIYNCVKTLCSRRVNMIQTEEQYIFIHDAILEACLCGETTIPVSEFKATYKEMIRIDPQSNSSQLREEFQTLNSVTPPLDVEECSIALLPRNRDKNRSMDVLPPDRCLPFLISTDGDSNNYINAALTDSYTRSAAFIVTLHPLQSTTPDFWRLVYDYGCTSIVMLNQLNQSNSAWPCLQYWPEPGRQQYGLMEVEFMSGTADEDLVARVFRVQNISRLQEGHLLVRHFQFLRWSAYRDTPDSKKAFLHLLAEVDKWQAESGDGRTIVHCLNGGGRSGTFCACATVLEMIRCHNLVDVFFAAKTLRNYKPNMVETMDQYHFCYDVALEYLEGLESR

SEQ ID NO: 68 - DNA, 1602 bp, Homo sapiens
cttgtgggtggaaacgcgctggctgactggggtcggcgtttagttcagcgcagcgactcggggacctggagctgacgcctagacacttgtattagctttaatagaagagaaatggaggagccatagaatattaaggatgaattcaggaaggcctgagaccatggaaaacttgcctgctctctacactattttccaaggagaggttgctatggtgacagactatggggcctttatcaaaatcccaggctgtcggaagcaaggtctggtccatcgaactcatatgtcatcctgtcgggtggataagccctctgagatagtagatgttggagataaagtgtgggtgaagcttattggccgagagatgaaaaatgatagaataaaagtatccctctccatgaaggttgtcaatcaagggactgggaaagaccttgatcccaacaatgttatcattgagcaagaagagaggcggaggcgatccttccaggattacactgggcagaagatcacccttgaggctgtcttgaacactacctgcaagaagtgtggctgtaaaggccactttgcaaaagattgtttcatgcaaccaggtgggactaaatactctctgatacctgatgaggaagaggaaaaggaagaggcaaagtcagcagagtttgagaagcctgaccctacaaggaatccttctagaaaaagaaagaaggagaagaagaaaaagaaacatagagataggaagtcatctgactctgacagctcagactctgagagtgatacaggcaagagggcaaggcacacatcaaaagacagcaaggcagcaaagaagaagaaaaagaagaagaagcacaagaagaagcacaaggagtgagagtataaagagtgtagggggtggttgagagtaagaaaccaggagccttgtgccttgagactcctggaaagactcaatagtgagaatatagcctcccaccccattaacttcgctcccatgggagatggcttcccctcatgcaacaggcaggtttgggagttagaggtcaaaagcagctgcctgaatgagttgttgtttccttatcactcctggtccctttgcaagtgaaccctgcagctcacccattcattcacccaacttccttcattcagcaggaggccctattaccctctccagctgccactgccagagctggattcctgtaaaggagtccaggctagagccacagagactgttgtggaggtgagttcggctgtagttagagtgattggacccttcctattggtctgtcctgggccaactggtgggtgatctctgctgcatccaacatgggagcagagactggcagcaggaggggggaacatggtgagaagtggtgctcacttttcccattcctcctaacatagttctactatgctagaagtggcatccagcggccacagctagaaaacagtctgcagtgtgacttaacttgtgtattgcattccagcagaccactgaaccagacagcgaagccaagatcattgttctactttgtatttactactgtgtgaatcagttgattctacttcaggtccttgcttaaattcctgtcactaaatggaaatgtgtttggtttt

SEQ ID NO: 69 - protein, 241 aa, Homo sapiens
MNSGRPETMENLPALYTIFQGEVAMVTDYGAFIKIPGCRKQGLVHRTHMSSCRVDKPSEIVDVGDKVWVKLIGREMKNDRIKVSLSMKVVNQGTGKDLDPNNVIIEQEERRRRSFQDYTGQKITLEAVLNTTCKKCGCKGHFAKDCFMQPGGTKYSLIPDEEEEKEEAKSAEFEKPDPTRNPSRKRKKEKKKKKHRDRKSSDSDSSDSESDTGKRARHTSKDSKAAKKKKKKKKHKKKHKE

SEQ ID NO: 70 - DNA, 1097 bp, Homo sapiens
gccgtcggagcccttgcacgcctgctctcttgtagcttctctcagcctagcccagcatcactatggtggacgctttcctgggcacctggaagctagtggacagcaagaatttcgatgactacatgaagtcactcggtgtgggttttgctaccaggcaggtggccagcatgaccaagcctaccacaatcatcgaaaagaatggggacattctcaccctaaaaacacacagcaccttcaagaacacagagatcagctttaagttgggggtggagttcgatgagacaacagcagatgacaggaaggtcaagtccattgtgacactggatggagggaaacttgttcacctgcagaaatgggacgggcaagagaccacacttgtgcgggagctaattgatggaaaactcatcctgacactcacccacggcactgcagtttgcactcgcacttatgagaaagaggcatgacctgactgcactgttgctgactactactctgccaatcggctacccctcgactcagcaccacattgcctcatttcttcctctgcattttgtacaaatccacgaattcttctggggtcaggtgccactgaccgggatccagttccagttcccatggtgtatgtggttttttttttttttttttaactgcactcatagggtgctctgaggtcaataaagcagagccaaggccacccagttgcctttttgcctttggtaacataactctgggagtcttggtttatcctgtgtgtcagagagtgggcagaaataacggcctgaaggttactgaggaagaagcactggatgggagactgaaatggacagtctcggagcctgttaatcagctgatcaccttacacatttaataataaaagagctgtacctacacgttgcctttacactgccccccctccatggtcaaatgacctagttcagtcagtgatggggcttccccaggtttggctattgaactgtcacttcaggcccatcctacactgaaagctcttgggtctggctgttctctgtgaaatgctgtagtctctccctttccagaattcaggttcagggcacagaacccaggcttgtaccatggtg

SEQ ID NO: 71 - protein, 133 aa, Homo sapiens [sequence omitted]

SEQ ID NO: 72 - DNA, 2011 bp, Homo sapiens
cgagcgccgccggaaagcgtcgagcggcttcggtaggtggggcggggccggggcggggccggggccggggaggggccaggcccggcacccggatcccgaggtccgcgccccgcgcccggcgccgggcgcccgaagccgggagccgccgccatgggggcctgcctgggagcctgctccctgctcagctgcgcgtcctgcctctgcggctctgccccctgcatcctgtgcagctgctgccccgccagccgcaactccaccgtgagccgcctcatcttcacgttcttcctcttcctgggggtgctggtgtccatcattatgctgagcccgggcgtggagagtcagctctacaagctgccctgggtgtgtgaggagggggccgggatccccaccgtcctgcagggccacatcgactgtggctccctgcttggctaccgcgctgtctaccgcatgtgcttcgccacggcggccttcttcttctttttcaccctgctcatgctctgcgtgagcagcagccgggacccccgggctgccatccagaatgggttttggttctttaagttcctgatcctggtgggcctcaccgtgggtgccttctacattcctgacggctccttcaccaacatctggttctacttcggcgtcgtgggctccttcctcttcatcctcatccagctggtgctgctcatcgactttgcgcactcctggaaccagcggtggctgggcaaggccgaggagtgcgattcccgtgcctggtacgcaggcctcttcttcttcactctcctcttctacttgctgtcgatcgcggccgtggcgctgatgttcatgtactacactgagcccagcggctgccacgagggcaaggtcttcatcagcctcaacctcaccttctgtgtctgcgtgtccatcgctgctgtcctgcccaaggtccaggacgcccagcccaactcgggtctgctgcaggcctcggtcatcaccctctacaccatgtttgtcacctggtcagccctatccagtatccctgaacagaaatgcaacccccatttgccaacccagctgggcaacgagacagttgtggcaggccccgagggctatgagacccagtggtgggatgccccgagcattgtgggcctcatcatcttcctcctgtgcaccctcttcatcagtctgcgctcctcagaccaccggcaggtgaacagcctgatgcagaccgaggagtgcccacctatgctagacgccacacagcagcagcagcaggtggcagcctgtgagggccgggcctttgacaacgagcaggacggcgtcacctacagctactccttcttccacttctgcctggtgctggcctcactgcacgtcatgatgacgctcaccaactggtacaagcccggtgagacccggaagatgatcagcacgtggaccgccgtgtgggtgaagatctgtgccagctgggcagggctgctcctctacctgtggaccctggtagccccactcctcctgcgcaaccgcgacttcagctgaggcagcctcacagcctgccatctggtgcctcctgccacctggtgcctctcggctcagtgacagccaacctgccccctccccacaccaatcagccaggctgagcccccacccctgccccagctccaggacctgcccctgagccgggccttctagtcgtagtgccttcagggtccgaggagcatcaggctcctgcagagccccatccccccgccacacccacacggtggagctgcctcttccttcccctcctccctgttgcccatactcagcatctcggatgaaagggctcccttgtcctcaggctccacgggagcggggctgctggagagagcggggaactcccaccacagtggggcatccggcactgaagccctggtgttcctggtcacgtcccccaggggaccctgcccacttcctggacttcgtgccttactgagtctctaagactttttctaataaacaagccagtgcgtgtaccaaaaaaaaaaaaaaa

SEQ ID NO: 73 - protein, 455 aa, Homo sapiens
MGACLGACSLLSCASCLCGSAPCILCSCCPASRNSTVSRLIFTFFLFLGVLVSIIMLSPGVESQLYKLPWVCEEGAGIPTVLQGHIDCGSLLGYRAVYRMCFATAAFFFFFTLLMLCVSSSRDPRAAIQNGFWFFKFLILVGLTVGAFYIPDGSFTNIWFYFGVVGSFLFILIQLVLLIDFAHSWNQRWLGKAEECDSRAWYAGLFFFTLLFYLLSIAAVALMFMYYTEPSGCHEGKVFISLNLTFCVCVSIAAVLPKVQDAQPNSGLLQASVITLYTMFVTWSALSSIPEQKCNPHLPTQLGNETVVAGPEGYETQWWDAPSIVGLIIFLLCTLFISLRSSDHRQVNSLMQTEECPPMLDATQQQQQVAACEGRAFDNEQDGVTYSYSFFHFCLVLASLHVMMTLTNWYKPGETRKMISTWTAVWVKICASWAGLLLYLWTLVAPLLLRNRDFS

SEQ ID NO: 74 - DNA, 17821 bp, Homo sapiens
cacgctcccctcgactgcgctccagcctggggcgcgcccggccgccgccgccttcgctgccgccacgggcccgtcttcttcctccttcggctcccaggatgaagaaactgagtctcagagaggtgaagtgacttgcccaagatcacagcaattatcacttctccctgggctcccaggccctcctgcagcagcccccgcctgggccatgtcttcctcagatgaagagacgctcagtgagcggtcatgtcggagtgagcggtcttgtcggagtgagcgatcttacaggagcgagcggtcggggagcctgtctccctgtcccccaggggacaccttgccctggaacctgccactgcatgagcagaaaaagcggaaaagccaggattcggtgctggaccctgcagagcgtgctgtggtcagagtcgctgatgaacgggaccgggttcagaagaaaacgttcaccaagtgggtcaacaagcacttaatgaaggtccgcaagcacatcaatgatctttatgaagatctgcgggatggccataacctgatctctctgttggaggtcctctcaggcatcaaactgccccgggagaagggcaggatgcgttttcataggctgcagaatgtgcagattgccctggacttcctaaagcagcgacaggtgaaactagtgaatattcgcaatgatgacatcacagatggcaaccccaagttgaccctgggtctgatctggaccattattttgcatttccagatctctgacatctacattagtggagaatcaggggatatgtcagccaaggagaaactactcctgtggacccagaaggtgacagctggttacacaggaatcaaatgcaccaacttttcctcctgctggagtgatgggaagatgttcaatgcactcattcaccgataccgacccgatctagtagacatggagagggtgcaaatccaaagtaaccgagagaatctggaacaggcttttgaagtggcagaaagactgggggtcactcgcctgctggatgcagaagatgtggatgtgccatctccagatgaaaagtctgtaatcacttatgtgtcttcgatttatgatgccttccctaaagttcctgagggtggagaagggatcagtgctacggaagtggactccaggtggcaagaataccaaagccgagtggactccctcattccctggatcaaacagcatacaatactgatgtcagataaaacttttccccaaaaccctgttgaactaaaggcactttataaccaatatatacacttcaaagaaacagaaattctggccaaggagagagaaaaaggaagaattgaggaattatataaattactagaggtgtggattgaatttggccgaattaaactgcctcaaggttatcaccctaatgatgtggaagaagagtggggaaagctcatcatagagatgctggaacgagagaaatcacttcggccggctgtggagaggctggaattgctgctacagattgcaaacaaaatccagaatggtgctttgaactgtgaagaaaaactgacactagctaagaatacactgcaggctgatgctgctcacctggaatcaggacaaccggtacaatgtgagtcagatgtcattatgtacattcaggagtgtgaaggtctcatcaggcagctgcaggtggatctccagatcctgcgggatgagaattactaccagctagaagagctggcttttagggtcatgcgtcttcaggatgagctggtcaccttgcgtctagagtgtacaaacctgtaccggaagggtcatttcacttcacttgaattggttccaccctctactttaaccaccactcatctgaaagcagaacccttaaccaaggcaacccattcttcttctacctcctggttccgaaagcctatgactcgggctgaacttgtggccatcagctcctctgaagatgaaggcaatctccgatttgtgtatgaactactgtcttgggtagaagagatgcagatgaaactggagcgagcagagtggggcaatgacctgcctagtgtggagttgcagctagaaacacagcagcacatccatacgagtgtagaagagctgggctcaagtgtcaaggaggccaggttgtatgagggaaagatgtcccagaatttccataccagctatgctgaaactcttggaaagctggagacacagtattgtaaattgaaggaaacttctagcttccggatgaggcaccttcagagcctgcataaatttgtttccagagctacagctgagttgatctggttgaatgagaaggaggaggaggaactagcatatgactggagtgacaacaattccaatatctcagccaagagaaattacttctctgagttgacaatggaactggaggagaaacaggatgtgtttcgttctctacaagatacagcagaactactttcacttgagaaccacccagccaagcagacagtggaggcttacagtgctgctgtccagtcccagttgcagtggatgaagcagctgtgcctgtgtgttgagcagcatgtgaaagagaatactgcttattttcagttcttcagtgatgcacgagagctggagtcattcttgaggaacctccaagattccattaaacgaaaatattcctgtgaccacaacaccagcttatcccgccttgaagacctgctccaggactccatggatgaaaaggagcagcttatacagtccaagagttccgttgccagtctcgttgggagatcaaaaaccatcgttcagctaaaaccacgcagtccagaccatgtgttaaagaacaccatttctgtcaaggctgtctgtgactacaggcagatcgagattactatttgcaaaaatgatgaatgtgtgctagaagataattctcagcggaccaaatggaaagtgatcagccccacagggaacgaggcaatggtgccgtcagtctgcttcctcatccccccacccaataaggatgccattgagatggccagcagggtcgaacaatcttatcagaaggttatggccctttggcatcagctgcatgttaacaccaaaagccttatctcttggaactatctgcgtaaagaccttgaccttgtacagacctggaacctagaaaagcttcgatcctcagcaccaggggagtgccatcagattatgaagaaccttcaggcccactatgaagactttctgcaggatagtcgtgactctgtgctgttctcagtggctgatcgcttgcgcttggaagaggaggtggaagcttgtaaagcccgcttccagcacctgatgaagtccatggagaatgaggacaaagaggagactgtggccaagatgtacatttcagagttgaagaacatccggctacgcctggaggagtatgaacagagggtggtcaaacgaattcagtctctagccagctctaggactgacagagatgcctggcaggacaatgcattaaggattgcagagcaagagcacacccaggaggatttacagcaattgaggtcagacttggatgcagtttctatgaaatgtgacagctttctccatcagtctccatctagttcaagtgtcccaactctgcgctcagaactgaatctgctggtggagaagatggaccatgtctatggtctctctactgtatatctgaataagttaaagacagttgatgttatagtacgtagcatacaggatgctgaactcttggtcaaaggttatgagattaagctgagtcaagaagaagtagtactggcagatctctcagctctggaggcccattggtcgacattacggcactggcttagtgatgtgaaggacaagaattcagtgttttcagtcctggatgaggaaattgccaaggccaaggtagtggcagagcagatgagtcgtctgacaccagagcgaaatctggatttggagcgctatcaggaaaaaggctcccagctgcaggagcgttggcaccgagtcattgcccagctcgagattcgccaatctgagctagaaagtatccaggaagttctgggagattaccgagcctgccatggaactctcatcaagtggattgaggaaaccactgcccagcaggaaatgatgaagccaggccaggcagaggatagcagagtgctttcggagcagctcagccagcagacggccctatttgcagaaattgagagaaatcagacaaaactggatcaatgtcaaaaattttcccagcagtactctactattgtaaaggactatgaattgcaactgatgacatacaaggcctttgtggaatcgcagcagaaatcccctggcaagcgccgtcgcatgctttcctcttcagatgccatcactcaagagttcatggacttaaggactcgctacacggcattggtgactttaacaactcagcacgtgaaatacatcagtgatgcactccggcgtctggaggaggaggagaaagtggtagaagaggagaaacaagaacatgtggagaaggttaaagaacttttgggctgggtgtctaccctagcgaggaatacacaaggaaaagctacctcatccgagaccaaagaatcaacagacattgaaaaagctattttggaacagcaggttctgtcagaagagctgacaacaaagaaagaacaagtctctgaagctattaaaacatcacagatcttcttggccaagcatggtcataagctctcagaaaaagagaagaaacaaatatctgagcaattgaatgccctaaacaaggcttaccatgacctttgtgatggttctgcaaatcagcttcagcagcttcagagccagttggctcaccagacagaacaaaagaccctgcagaaacaacaaaatacctgtcaccagcaactggaggatctttgcagttgggtaggacaggcagaaagagcactggcaggccaccaaggcagaaccacccagcaggatctctctgctttgcagaagaaccaaagtgacttgaaggatttacaggatgacattcagaatcgtgccacctcatttgccactgttgtcaaggacattgaggggttcatggaagagaatcagaccaagctgagcccacgtgagttgacagctcttcgggaaaagcttcatcaggctaaggagcaatatgaggcgctccaggaagagacacgtgtggcccagaaggaactggaggaagcagtgacctccgccttacagcaggagactgaaaagagtaaagcagcaaaggaactggcagagaacaagaagaagatcgatgctctcctggattgggtaacttcagtaggatcatctggtggacagctgctgaccaaccttccaggaatggagcagctctcgggagctagcttggagaaaggagccttggacaccactgatggttacatgggggtgaatcaagccccagagaaactggacaagcaatgtgagatgatgaaggcccgtcaccaagaattgctgtcccagcagcaaaatttcattctggccacccagtcagctcaggccttcttggatcagcatggccacaatctcacacctgaggagcaacagatgctgcaacagaagctgggagagctaaaggaacaatactctacttccctggcccaatcagaggcagaactgaagcaggtgcagacacttcaggatgagttgcagaaatttctgcaggatcataaagagtttgaaagctggttggaacgatccgagaaagagctggagaacatgcataagggaggcagcagccccgagacccttccctccctgctaaagcggcaaggaagcttctcagaggatgtcatttcccacaaaggagacttgagatttgtgactatctcaggacagaaagtcttggacatggaaaacagttttaaggaaggcaaagaaccatcagaaattggaaacttagtaaaggacaagttgaaggatgcaacagaaagatacactgctctccactcaaagtgtacacgattaggatctcacctgaatatgctgttaggccagtatcatcaattccaaaacagtgctgacagcctgcaggcctggatgcaggcttgtgaggccaacgtggagaagctcctctcagatactgttgcctctgaccctggagttctccaggagcagcttgcaacaacaaagcagttgcaggaggaattggctgagcaccaagtacctgtggaaaaactccaaaaagtagctcgtgacataatggaaattgaaggggagccagccccagaccacaggcatgttcaagaaactacagattccatactcagccacttccaaagcctctcctatagcctggctgagcgatcttctctgctgcagaaagcaattgcccaatctcagagtgtccaggaaagcctggagagcctgttgcagtctattggggaagttgaacaaaacctggaagggaagcaggtgtcatcactctcatcaggagtcatccaggaagccttagccacaaatatgaaattgaagcaggacattgctcggcaaaagagcagcttggaggccacccgtgagatggtgacccgattcatggagacagcagacagtactacagcagcagtgctgcagggcaaactggcagaggtgagccagcggttcgaacagctctgtctacagcagcaagaaaaggagagctccctaaagaagcttctaccccaggcagagatgtttgaacacctctctggtaagctgcagcagttcatggaaaacaaaagtcggatgctggcctctggaaatcagccagatcaagatattacacatttcttccaacagatccaggagctcaatttggaaatggaagaccaacaggagaacctagatactcttgagcacctggtcactgaactgagctcttgtggctttgcgctggacttgtgccagcatcaggacagggtacagaatctaagaaaagacttcacagagctacagaagacagttaaagagagagagaaagatgcatcatcttgccaggaacagttggatgaattccggaagctggtcaggaccttccagaaatggttgaaagaaactgaagggagtattccacctacggaaacttctatgagtgctaaagagttagaaaagcagattgaacacctgaagagtctactagatgactgggcaagtaagggaactctggtggaagaaatcaattgcaaaggtacttctttagaaaatctcatcatggaaatcacagcacctgattcccaaggcaagacaggttccatactgccctctgtaggaagctctgtaggcagtgtaaacggataccacacctgcaaagatctgacggagatccagtgtgacatgtcagatgtaaacttgaagtatgagaaactagggggagtacttcatgaacgccaggaaagccttcaggctatcctcaacagaatggaggaggttcacaaggaggcaaactctgtgctgcagtggctggaatcaaaagaggaagtcctgaaatccatggatgccatgtcatctccaaccaagacagaaacagtgaaagcccaagctgaatctaacaaggccttcctggctgagttggaacagaattctccaaaaattcaaaaagtaaaggaagccctggctggattactggtgacatatcccaactcacaggaagcagaaaattggaagaaaattcaggaagaactcaattcccgatgggaaagggccactgaggttactgtggctcggcaaaggcagctagaggaatctgcaagtcatctggcctgcttccaggctgcagaatcccagctccggccgtggctgatggagaaagaactgatgatgggagtgctggggcccctgtctattgaccccaacatgttgaatgcacaaaagcaacaggtccagtttatgctaaaggaatttgaagcacgcaggcaacagcatgagcaactgaatgaggcagctcagggcatcctaacaggccctggagatgtctctctgtccaccagccaagtacagaaagaactccagagcatcaatcagaaatgggttgagctgactgacaaactcaactcccgttccagccaaattgaccaagctattgttaagagcacccagtaccaggaactgctccaggacttatcagagaaggtgagggcagttggacaacggctgagtgtccagtcagctatcagcacccaaccagaggctgtaaagcagcaattggaagagaccagtgaaattcgatctgacttggagcagttagaccacgaggttaaggaggctcagacactgtgcgatgaactctcagtgctcattggtgagcagtacctcaaggatgaactgaagaagcgtttggagacagttgccctgcctctccaaggtttagaagaccttgcagccgatcgcattaacagactccaggcagctcttgccagcacccagcagttccagcaaatgtttgatgagttgaggacctggttggatgataaacaaagccagcaagcaaaaaactgcccaatttctgcaaaattggagcggctacagtctcagctacaggagaatgaagagtttcagaaaagtcttaatcaacacagtggctcctatgaggtgattgtggctgaaggggaatctctacttctttctgtacctcctggagaagagaaaaggactctacaaaaccagttggttgagctcaaaaaccattgggaagagcttagtaaaaaaactgcagacagacaatccaggctcaaggattgtatgcagaaagctcagaaatatcagtggcatgtggaagaccttgtgccatggatagaagattgtaaagctaagatgtctgagttgcgagtcactctggatccagtgcagctagagtccagtctcctaagatcaaaggctatgctgaatgaggtggagaagcgccgctccctgctggaaatattgaatagtgctgctgacattctgatcaattcttcagaagcagatgaggatggaatccgggatgagaaggctgggatcaaccagaacatggatgctgttacagaagagctgcaggccaaaacagggtcactcgaagaaatgactcagaggctcagggagttccaggaaagctttaagaatattgaaaagaaggttgaaggagccaaacaccaacttgagatctttgatgctctgggttctcaagcctgtagcaacaagaacctggagaagctaagagctcaacaggaagtgctgcaggccctagagcctcaggtagactatctgaggaactttactcagggtctggtagaagatgccccagatggatctgatgcttctcaacttctccaccaagctgaggtcgcccagcaagagttcctcgaagttaagcaaagagtgaacagtggttgtgtgatgatggaaaacaagctggaggggattggccagtttcactgccgggtccgagagatgttctctcaattggcagacctggatgatgagctagatggcatgggtgctattggcagagacactgatagcctccagtcccaaatcgaggatgtccggctattccttaacaaaattcacgtcctcaaattagacatagaggcctctgaagcagagtgtcgacatatgctagaagaagaggggactctggatttgttaggtctcaaaagggagctagaagccctgaacaaacagtgtggcaaactgacagagagggggaaagctcgtcaggaacagctggaactgacactaggccgtgtagaggacttctacaggaaattgaaaggactcaatgacgcgaccacagcagcagaggaggcagaggccctccagtgggtagtggggaccgaagtggaaatcatcaaccaacaattagcagattttaaaatgtttcagaaagaacaagtggatcctcttcagatgaaattgcagcaggtgaatggacttggccagggattaattcagagtgcaggaaaagactgtgatgtacagggtttagaacatgacatggaagagatcaatgctcgatggaatacattgaataaaaaggtcgcacaaagaattgcacagctacaggaagctttgttgcattgtgggaagtttcaagatgccttggagccattgctcagctggttggcagataccgaggagctcatagccaatcagaaacctccatctgctgagtataaagtggtgaaagcacagatccaagaacagaagttgctccagcggctcctagatgatcgaaaggccacagtagacatgcttcaagcagaaggaggcagaatagcccagtcagcagagctggctgatagagagaaaatcactggacagctggagagtcttgaaagtagatggactgaactactcagtaaggcagcagccaggcaaaaacagctggaagacatcctggttctggccaaacagttccatgagacagctgagcctatttctgacttcttatctgtcacagagaaaaagcttgctaactcagaacctgttggcactcagactgccaaaatacagcagcagatcattcggcacaaggctctggaagaagacatagaaaaccatgcaacagatgtgcaccaggcagtcaaaattgggcagtccctctcctccctgacatctcctgcagaacagggtgtgctgtcagaaaagatagactcattgcaggcccgatacagtgaaattcaagaccgctgttgtcggaaggcagccctacttgaccaagctctgtctaatgctaggctgtttggggaggatgaggtggaggtgctcaactggctggctgaggttgaggacaagctcagttcagtgttcgtaaaggatttcaaacaggatgtcctgcacaggcagcatgctgaccacctggctttaaatgaagaaattgttaatagaaagaagaatgtagatcaagctattaaaaatggtcaggctcttctaaaacaaaccacaggtgaggaggtgttacttatccaggaaaaactagatggtataaagactcgttacgcagacatcacagttactagctccaaggccctcagaactttagagcaagcccggcagctggccaccaagttccagtctacttatgaggaactgaccgggtggctgagggaggtggaggaggagctggcaaccagtggaggacagtctcccacaggggaacagataccccagtttcagcagagacagaaggaattaaagaaggaggtcatggagcacaggctggtgttggacacagtgaatgaggtgagccgtgctctcttagagctggtgccctggagagccagagaagggctggataaacttgtgtccgatgctaacgagcagtacaaactagtcagtgacactattggacaaagggtggatgaaattgatgctgctattcagagatcacaacagtatgagcaagctgccgatgcagaactagcttgggttgctgaaacaaaacggaaactgatggctctgggtccaattcgcctggaacaggaccagaccacagctcagcttcaggtacagaaggctttctccattgacattattcgacacaaagattcaatggatgaactcttcagtcaccgtagtgaaatctttggcacatgtggggaggagcaaaaaactgtattacaggaaaagacagagtctctaatacagcaatatgaagccattagcctactcaattcagagcgttatgcccgcctagagcgggcccaggtcttagtaaaccagttttgggaaacttatgaagagctcagcccctggattgaggaaactcgggcactaatagcacagttaccctctccagccattgatcatgagcagctcaggcagcaacaagaggaaatgaggcaattaagggaatctattgctgaacacaaacctcatattgacaaactactaaagataggcccacaactaaaggaattaaaccctgaggaaggggaaatggtggaagaaaaataccagaaagcagaaaacatgtatgcccaaataaaggaggaggtgcgccagcgagccctggctctggatgaagccgtgtcccagtccacacagattacagagtttcatgataaaattgagcctatgttggagacactggagaatctttcctctcgcctgcgtatgccaccactgatccctgctgaagtagacaagatcagagagtgcatcagtgacaataagagtgccaccgtggagctagaaaaactgcagccatcctttgaggccttgaagcgccgtggagaggagcttattggacgatctcagggagcagacaaggatctggctgcaaaagaaatccaggataaattggatcaaatggtattcttctgggaggacatcaaagctcgggctgaagaacgagaaatcaaatttcttgatgtccttgaattagcagagaagttctggtatgacatggcagctctcctgaccaccatcaaagacacccaggatattgtccatgacttggaaagcccaggcattgatccttccatcatcaaacaacaggttgaagctgctgagactattaaggaagagacagatggtctgcatgaagagctggagtttattcggatccttggagcagatttgatttttgcctgtggagaaactgagaagcctgaagtgaggaagagcattgatgagatgaataatgcttgggagaacttaaacaaaacatggaaagagaggctagaaaaacttgaggatgctatgcaagctgctgtgcagtatcaggacactcttcaggctatgtttgactggctagataacactgtgattaaactctgcaccatgccccctgttggcactgacctcaatactgttaaagatcagttaaatgaaatgaaggagttcaaagtagaagtttaccaacagcaaattgagatggagaagcttaatcaccagggtgaactgatgttaaagaaagctactgatgagacggacagagacattatacgagaaccactgacagaactcaaacacctctgggagaacctgggtgagaaaattgcccaccgacagcacaaactagaaggggctctgttggcccttggtcagttccagcatgccttagaggaactaatgagttggctgactcataccgaagagttgttagatgctcagagaccaataagtggagacccaaaagtcattgaagttgagctcgcaaagcaccatgtcctaaaaaatgatgttttggctcatcaagccacagtggaaacagtcaacaaagctggcaatgagcttcttgaatccagtgctggagatgatgccagcagcttaaggagccgtttggaagccatgaaccaatgctgggagtcagtgttacagaaaacagaggagagggagcagcagcttcagtcaactctgcagcaggcccagggcttccacagtgaaattgaagatttcctcttggaacttactagaatggagagccagctttctgcatctaagcccacaggaggacttcctgaaactgctagggaacagcttgatacacatatggaactctattcccagctgaaagccaaggaagagacttataatcaactacttgacaagggcagactcatgcttctaagccgtgacgactctgggtctggctccaagacagaacagagtgtagcacttttggagcagaagtggcatgtggtcagcagtaagatggaagaaagaaagtcaaagctggaagaggccctcaacttggcaacagaattccagaattccctacaagaatttatcaactggctcactctagcagagcagagtttaaacatcgcttctccaccaagcctgattctaaatactgtcctttcccagatagaagagcacaaggtttttgctaatgaagtaaatgctcatcgagaccagatcattgagctggatcaaactgggaatcaattaaagttccttagccaaaagcaggatgttgttctgatcaagaatttgttggtgagcgtgcagtctcgatgggagaaggttgtccagcgatctattgaaagagggcgatcactagatgatgccaggaagcgggcaaaacaattccatgaagcttggaaaaaactgattgactggctagaagatgcagagagtcacctggactcagaactagagatatccaatgacccagacaaaattaaacttcagctttctaagcataaggagtttcagaagactcttggtggcaagcagcctgtgtatgataccacaattagaactggcagagcactgaaagaaaagactttgcttcccgaagatagtcagaaacttgacaatttcctaggagaagtcagagacaaatgggatactgtttgtggcaagtctgtggagcggcagcacaagttggaggaagccctgctcttttcgggtcagttcatggatgctttgcaggcattggttgactggttatacaaggtggagccacagctggctgaggaccagcccgtgcacggggaccttgacctcgtcatgaacctcatggatgcacacaaggttttccagaaggaactgggaaagcgaacaggaaccgttcaggtcctgaagcggtcaggccgagagctgattgagaatagtcgagatgacaccacttgggtaaaaggacagctccaggaactgagcactcgctgggacactgtctgtaaactctctgtttccaaacaaagccggcttgagcaggccttaaaacaagcggaagtgtttcgagacacagtccacatgctgttggagtggctttctgaagcagagcaaacgcttcgctttcggggagcacttcctgatgacacagaggccctgcagtctctcattgacacccataaggaattcatgaagaaagtagaagaaaagcgagtggacgttaactcagcagtagccatgggagaagtcatcctggctgtctgccaccccgattgcatcacaaccatcaaacactggatcaccatcatccgagctcgcttcgaggaggtcctgacatgggctaagcagcaccagcagcgtcttgaaacggccttgtcagaactggtggctaatgctgagctcctggaagaacttctggcatggatccagtgggctgagaccaccctcattcagcgggatcaggagccaatcccgcagaacattgaccgagttaaagcccttatcgctgagcatcagacatttatggaggagatgactcgcaaacagcctgacgtggaccgggtcaccaagacatacaaaaggaaaaacatagagcctactcacgcgcctttcatagagaaatcccgcagcggaggcaggaaatccctaagtcagccaacccctcctcccatgccaatcctttcacagtctgaagcaaaaaacccacggatcaaccagctttctgcccgctggcagcaggtgtggctgttagcactggagcggcaaaggaaactgaatgatgccttggatcggctggaggagttgaaagaatttgccaactttgactttgatgtctggaggaaaaagtatatgcgttggatgaatcacaaaaagtctcgagtgatggatttcttccggcgcattgataaggaccaggatgggaagataacacgtcaggagtttatcgatggcattttagcatccaagttccccaccaccaagttagagatgactgctgtggctgacattttcgaccgagatggggatggttacattgattattatgaatttgtggctgctcttcatcccaacaaggatgcgtatcgaccaacaaccgatgcagataaaatcgaagatgaggttacaagacaagtggctcagtgcaaatgtgcaaaaaggtttcaggtggagcagatcggagagaataaataccggtttggggattctcagcagttgcggctggtccgtattctgcgcagcaccgtgatggttcgcgttggtggaggatggatggccttggatgaatttttagtgaaaaatgatccctgccgagcacgaggtagaactaacattgaacttagagagaaattcatcctaccagagggagcatcccagggaatgacccccttccgctcacggggtcgaaggtccaaaccatcttcccgggcagcttcccctactcgttccagctccagtgctagtcagagtaaccacagctgtacatccatgccatcttctccagccaccccagccagtggaaccaaggttatcccatcatcaggtagcaagttgaaacgaccaacaccaacttttcattctagtcggacatcccttgctggtgataccagcaatagttcttccccggcctccacaggtgccaaaactaatcgggcagaccctaaaaagtctgccagtcgccctgggagtcgggctgggagtcgagccgggagtcgagccagcagccggcgaggaagtgacgcttctgactttgacctcttagagacgcagtctgcttgttccgacacttcagaaagcagcgctgcagggggccaaggcaactccaggagagggctaaacaaaccttccaaaatcccaaccatgtctaagaagaccaccactgcctcccccaggactccaggtcccaagcgataacactgtctaagcacccccaagccactatccactttgaatcctgctccatacattgggtgtatatttattctgaacgggagaagttatattgttaaaagtgtaaaagaataattgtgttatgaagctgccttattttttttctttttgtaagttactattttcatgtgaatatttatgtagataaaatttgcctcctggtaaccctgtaatggatggggcccagaaatgaaatatttgagaaaaacaagtgaaaaggtcaagatacaaatgtgtattaaaaaaaaaaaagcctattaatagggtttctgcgcggtgcagggttgtaaacctgctttatcttttaggattattcctaaatgcatcttctttataaacttgacttgctatctcagcaagataaattatattaaaaaaataagaatcctgcagtgtttaaggaactctttttttgtaaatcacggacacctcaattagcaagaactgaggggagggctttttccattgtttaatgttttgtgatttttagctaaagagagggaacctcatctaagtaacatttgcacatgatacagcaaaaggagttcattgcaatactgtctttggatattgtttcagtactgggtgtttaaaggacaaatagctgctagaattcaggggtaaatgtaagtgttcagaaaacgtcagaacatttggggttttaaactgatttgttgctccctatccagcctagacaccagtaactcttgtgttcaccaggacccagacccttggcaagggataggctcgttggtgacattgtgaatttcagatttgttttatccactttttttgctatttatttaaatggtcgatcaacttcccacaaactgaggaatgaattccacgagcctgttctgaaaatgtggacgtaagacaaacacgtgctcgtcctttaatggagttcaccagcacacttgttaaccagtcctgtttgctttcgtctttttttgtgcgtaataaagtcaactgaccaagtgaccatgaaaaggggctgtctggggctcctgttttttagctgctgttcttcagctccgaccatgttgctgtgtgattatctcaattggttttaattgaggcagaaactgaagctctaccaatgaactgtttagaaacaagacacacttttgtattaaaattgcttgcagtaacaaatattttgtatttcctgattttcttttcaactattaccttatctataaatgttaccctggggtataatcatgttgtaggtacttaaatgcattccgcaaatcaaaatatcttgatggataaattatagagctt

SEQ ID NO: 75 - protein, 5430 aa, Homo sapiens
MSSSDEETLSERSCRSERSCRSERSYRSERSGSLSPCPPGDTLPWNLPLHEQKKRKSQDSVLDPAERAVVRVADERDRVQKKTFTKWVNKHLMKVRKHINDLYEDLRDGHNLISLLEVLSGIKLPREKGRMRFHRLQNVQIALDFLKQRQVKLVNIRNDDITDGNPKLTLGLIWTIILHFQISDIYISGESGDMSAKEKLLLWTQKVTAGYTGIKCTNFSSCWSDGKMFNALIHRYRPDLVDMERVQIQSNRENLEQAFEVAERLGVTRLLDAEDVDVPSPDEKSVITYVSSIYDAFPKVPEGGEGISATEVDSRWQEYQSRVDSLIPWIKQHTILMSDKTFPQNPVELKALYNQYIHFKETEILAKEREKGRIEELYKLLEVWIEFGRIKLPQGYHPNDVEEEWGKLIIEMLEREKSLRPAVERLELLLQIANKIQNGALNCEEKLTLAKNTLQADAAHLESGQPVQCESDVIMYIQECEGLIRQLQVDLQILRDENYYQLEELAFRVMRLQDELVTLRLECTNLYRKGHFTSLELVPPSTLTTTHLKAEPLTKATHSSSTSWFRKPMTRAELVAISSSEDEGNLRFVYELLSWVEEMQMKLERAEWGNDLPSVELQLETQQHIHTSVEELGSSVKEARLYEGKMSQNFHTSYAETLGKLETQYCKLKETSSFRMRHLQSLHKFVSRATAELIWLNEKEEEELAYDWSDNNSNISAKRNYFSELTMELEEKQDVFRSLQDTAELLSLENHPAKQTVEAYSAAVQSQLQWMKQLCLCVEQHVKENTAYFQFFSDARELESFLRNLQDSIKRKYSCDHNTSLSRLEDLLQDSMDEKEQLIQSKSSVASLVGRSKTIVQLKPRSPDHVLKNTISVKAVCDYRQIEITICKNDECVLEDNSQRTKWKVISPTGNEAMVPSVCFLIPPPNKDAIEMASRVEQSYQKVMALWHQLHVNTKSLISWNYLRKDLDLVQTWNLEKLRSSAPGECHQIMKNLQAHYEDFLQDSRDSVLFSVADRLRLEEEVEACKARFQHLMKSMENEDKEETVAKMYISELKNIRLRLEEYEQRVVKRIQSLASSRTDRDAWQDNALRIAEQEHTQEDLQQLRSDLDAVSMKCDSFLHQSPSSSSVPTLRSELNLLVEKMDHVYGLSTVYLNKLKTVDVIVRSIQDAELLVKGYEIKLSQEEVVLADLSALEAHWSTLRHWLSDVKDKNSVFSVLDEEIAKAKVVAEQMSRLTPERNLDLERYQEKGSQLQERWHRVIAQLEIRQSELESIQEVLGDYRACHGTLIKWIEETTAQQEMMKPGQAEDSRVLSEQLSQQTALFAEIERNQTKLDQCQKFSQQYSTIVKDYELQLMTYKAFVESQQKSPGKRRRMLSSSDAITQEFMDLRTRYTALVTLTTQHVKYISDALRRLEEEEKVVEEEKQEHVEKVKELLGWVSTLARNTQGKATSSETKESTDIEKAILEQQVLSEELTTKKEQVSEAIKTSQIFLAKHGHKLSEKEKKQISEQLNALNKAYHDLCDGSANQLQQLQSQLAHQTEQKTLQKQQNTCHQQLEDLCSWVGQAERALAGHQGRTTQQDLSALQKNQSDLKDLQDDIQNRATSFATVVKDIEGFMEENQTKLSPRELTALREKLHQAKEQYEALQEETRVAQKELEEAVTSALQQETEKSKAAKELAENKKKIDALLDWVTSVGSSGGQLLTNLPGMEQLSGASLEKGALDTTDGYMGVNQAPEKLDKQCEMMKARHQELLSQQQNFILATQSAQAFLDQHGHNLTPEEQQMLQQKLGELKEQYSTSLAQSEAELKQVQTLQDELQKFLQDHKEFESWLERSEKELENMHKGGSSPETLPSLLKRQGSFSEDVISHKGDLRFVTISGQKVLDMENSFKEGKEPSEIGNLVKDKLKDATERYTALHSKCTRLGSHLNMLLGQYHQFQNSADSLQAWMQACEANVEKLLSDTVASDPGVLQEQLATTKQLQEELAEHQVPVEKLQKVARDIMEIEGEPAPDHRHVQETTDSILSHFQSLSYSLAERSSLLQKAIAQSQSVQESLESLLQSIGEVEQNLEGKQVSSLSSGVIQEALATNMKLKQDIARQKSSLEATREMVTRFMETADSTTAAVLQGKLAEVSQRFEQLCLQQQEKESSLKKLLPQAEMFEHLSGKLQQFMENKSRMLASGNQPDQDITHFFQQIQELNLEMEDQQENLDTLEHLVTELSSCGFALDLCQHQDRVQNLRKDFTELQKTVKEREKDASSCQEQLDEFRKLVRTFQKWLKETEGSIPPTETSMSAKELEKQIEHLKSLLDDWASKGTLVEEINCKGTSLENLIMEITAPDSQGKTGSILPSVGSSVGSVNGYHTCKDLTEIQCDMSDVNLKYEKLGGVLHERQESLQAILNRMEEVHKEANSVLQWLESKEEVLKSMDAMSSPTKTETVKAQAESNKAFLAELEQNSPKIQKVKEALAGLLVTYPNSQEAENWKKIQEELNSRWERATEVTVARQRQLEESASHLACFQAAESQLRPWLMEKELMMGVLGPLSIDPNMLNAQKQQVQFMLKEFEARRQQHEQLNEAAQGILTGPGDVSLSTSQVQKELQSINQKWVELTDKLNSRSSQIDQAIVKSTQYQELLQDLSEKVRAVGQRLSVQSAISTQPEAVKQQLEETSEIRSDLEQLDHEVKEAQTLCDELSVLIGEQYLKDELKKRLETVALPLQGLEDLAADRINRLQAALASTQQFQQMFDELRTWLDDKQSQQAKNCPISAKLERLQSQLQENEEFQKSLNQHSGSYEVIVAEGESLLLSVPPGEEKRTLQNQLVELKNHWEELSKKTADRQSRLKDCMQKAQKYQWHVEDLVPWIEDCKAKMSELRVTLDPVQLESSLLRSKAMLNEVEKRRSLLEILNSAADILINSSEADEDGIRDEKAGINQNMDAVTEELQAKTGSLEEMTQRLREFQESFKNIEKKVEGAKHQLEIFDALGSQACSNKNLEKLRAQQEVLQALEPQVDYLRNFTQGLVEDAPDGSDASQLLHQAEVAQQEFLEVKQRVNSGCVMMENKLEGIGQFHCRVREMFSQLADLDDELDGMGAIGRDTDSLQSQIEDVRLFLNKIHVLKLDIEASEAECRHMLEEEGTLDLLGLKRELEALNKQCGKLTERGKARQEQLELTLGRVEDFYRKLKGLNDATTAAEEAEALQWVVGTEVEIINQQLADFKMFQKEQVDPLQMKLQQVNGLGQGLIQSAGKDCDVQGLEHDMEEINARWNTLNKKVAQRIAQLQEALLHCGKFQDALEPLLSWLADTEELIANQKPPSAEYKVVKAQIQEQKLLQRLLDDRKATVDMLQAEGGRIAQSAELADREKITGQLESLESRWTELLSKAAARQKQLEDILVLAKQFHETAEPISDFLSVTEKKLANSEPVGTQTAKIQQQIIRHKALEEDIENHATDVHQAVKIGQSLSSLTSPAEQGVLSEKIDSLQARYSEIQDRCCRKAALLDQALSNARLFGEDEVEVLNWLAEVEDKLSSVFVKDFKQDVLHRQHADHLALNEEIVNRKKNVDQAIKNGQALLKQTTGEEVLLIQEKLDGIKTRYADITVTSSKALRTLEQARQLATKFQSTYEELTGWLREVEEELATSGGQSPTGEQIPQFQQRQKELKKEVMEHRLVLDTVNEVSRALLELVPWRAREGLDKLVSDANEQYKLVSDTIGQRVDEIDAAIQRSQQYEQAADAELAWVAETKRKLMALGPIRLEQDQTTAQLQVQKAFSIDIIRHKDSMDELFSHRSEIFGTCGEEQKTVLQEKTESLIQQYEAISLLNSERYARLERAQVLVNQFWETYEELSPWIEETRALIAQLPSPAIDHEQLRQQQEEMRQLRESIAEHKPHIDKLLKIGPQLKELNPEEGEMVEEKYQKAENMYAQIKEEVRQRALALDEAVSQSTQITEFHDKIEPMLETLENLSSRLRMPPLIPAEVDKIRECISDNKSATVELEKLQPSFEALKRRGEELIGRSQGADKDLAAKEIQDKLDQMVFFWEDIKARAEEREIKFLDVLELAEKFWYDMAALLTTIKDTQDIVHDLESPGIDPSIIKQQVEAAETIKEETDGLHEELEFIRILGADLIFACGETEKPEVRKSIDEMNNAWENLNKTWKERLEKLEDAMQAAVQYQDTLQAMFDWLDNTVIKLCTMPPVGTDLNTVKDQLNEMKEFKVEVYQQQIEMEKLNHQGELMLKKATDETDRDIIREPLTELKHLWENLGEKIAHRQHKLEGALLALGQFQHALEELMSWLTHTEELLDAQRPISGDPKVIEVELAKHHVLKNDVLAHQATVETVNKAGNELLESSAGDDASSLRSRLEAMNQCWESVLQKTEEREQQLQSTLQQAQGFHSEIEDFLLELTRMESQLSASKPTGGLPETAREQLDTHMELYSQLKAKEETYNQLLDKGRLMLLSRDDSGSGSKTEQSVALLEQKWHVVSSKMEERKSKLEEALNLATEFQNSLQEFINWLTLAEQSLNIASPPSLILNTVLSQIEEHKVFANEVNAHRDQIIELDQTGNQLKFLSQKQDVVLIKNLLVSVQSRWEKVVQRSIERGRSLDDARKRAKQFHEAWKKLIDWLEDAESHLDSELEISNDPDKIKLQLSKHKEFQKTLGGKQPVYDTTIRTGRALKEKTLLPEDSQKLDNFLGEVRDKWDTVCGKSVERQHKLEEALLFSGQFMDALQALVDWLYKVEPQLAEDQPVHGDLDLVMNLMDAHKVFQKELGKRTGTVQVLKRSGRELIENSRDDTTWVKGQLQELSTRWDTVCKLSVSKQSRLEQALKQAEVFRDTVHMLLEWLSEAEQTLRFRGALPDDTEALQSLIDTHKEFMKKVEEKRVDVNSAVAMGEVILAVCHPDCITTIKHWITIIRARFEEVLTWAKQHQQRLETALSELVANAELLEELLAWIQWAETTLIQRDQEPIPQNIDRVKALIAEHQTFMEEMTRKQPDVDRVTKTYKRKNIEPTHAPFIEKSRSGGRKSLSQPTPPPMPILSQSEAKNPRINQLSARWQQVWLLALERQRKLNDALDRLEELKEFANFDFDVWRKKYMRWMNHKKSRVMDFFRRIDKDQDGKITRQEFIDGILASKFPTTKLEMTAVADIFDRDGDGYIDYYEFVAALHPNKDAYRPTTDADKIEDEVTRQVAQCKCAKRFQVEQIGENKYRFGDSQQLRLVRILRSTVMVRVGGGWMALDEFLVKNDPCRARGRTNIELREKFILPEGASQGMTPFRSRGRRSKPSSRAASPTRSSSSASQSNHSCTSMPSSPATPASGTKVIPSSGSKLKRPTPTFHSSRTSLAGDTSNSSSPASTGAKTNRADPKKSASRPGSRAGSRAGSRASSRRGSDASDFDLLETQSACSDTSESSAAGGQGNSRRGLNKPSKIPTMSKKTTTASPRTPGPKR

SEQ ID NO: 76 - DNA, 19271 bp, Homo sapiens
ggctctgattcagttttctttttcttctcttttccttttttttttttttttttttttttttttaggaatgcagagcagttgctggggtgattgacctaggcacagtggagatatttcccatcttcaaagccatgcaaaagggcctccttgaccaagacacaggcctagtgcttctggaatctcaggttatcatgtctggcctcattgcccctgagacgggtgaaaacctctctttggaggagggcatagccagaaacctcattaatccccagatgtaccagcagctccgggagctacaggatgccctggccttaataagcaggcttactgagagcagaggccctctttctgtggtggaagcaattgaaaagagaataatcagtgagacagttggactgaaaatcttagaagctcacctggcaactggaggtttcagtctttcccctagtgagaactgtattaacctggaagaggcttttcatcaaggcctcatttctgcatggcttcattcagtattagagtcttatcttagaacatccaagaatttgatagaccctaacacagctgagaaaattggtttgctggatctgatgcagcgatgtattgtccaccaggaatcaggattcaaattactgcctgtcaaacaattggcaggggggatggtgagcttgaaatcaggccggaaggttagcattttccgtgcagttcaggaagggctaatagataggcaggtcactgtccggttgctggaagctcagctttttgctggtggcatagtagatccaagaacaggacacagacttacagtggaagaggctgtaagacataatctgattgaccaagatatggcctgtgctatcctcataaggcagcttcagacaggaggcatcatagacactgtcacggggcaaaggctaacaatagatgaagcagtgagcaatgatctagtagctgctaagatcgcccttgtgattctggagtccctctggtcattcatggggttgctgtggcctgaatctggagagatcctcccaattacagatgccctagaacaaggtattgtgtctactgaactagcacataaaatccttagtaaccgacagcatattaaggctctgtttctaccagcaaccacagagattttgtcctggaagaaagcaatagaaagtggtatcctggatagagatcttgccaataacttaaaatcgatttgtatacctgatgtgatgccccacatgcaactagcagactctgcagaacaaaatattaatcctggagcagcagttctaccgtgcagcaagagccaccctaaggccacagcaagccagagtgagaatctgttgttccagctgatgactcacagctatattaatgtgcaaaatggacagaggctgcttctgttagataaagagctgatggagacactaacatccagagatgagtatcaaacaagtcctccaaaagtggttgaaattgggcatcaaaggcaaaaaactcctgagggattgcaagaatcagctaatgtgaaaatctcaggaactttcagcagtgggtggactgtgaggctgcctgagttccagttttcttctcagaacaaagaatatcccgatcgggaagattgcactacagaaaaaggcaaaaagaccactgtagaaacagaagattcttctgtagagaaccctgaacaggatctgtttgtagaacaaaaagagagaaatccaaacattgatgctttgaaggtaataaataaagtcaaattagaggtacaaaggcagttgataggtacccaaagggaagaccaaacagcagtgtctgtcagagaaaatgccagcaggggacacctcctgaccatacctcctgctgaggcggaaggtgtgccgttggtggttgacaaagatgttttttctgttgaaacaccaaagaaagaacatcaacctctaagaaacacttcctttacatgtcagaatgaacaagcacacactcttgagactgaatatattcatgatgaaactggaggatctcacataaaaccccaaagcaaaaagttacaagttcaggtaaagaaaactctaggtataaagttagaactaaagtctgaaactgatgggaatgttcatcctctggacaaaaaggaaatgttaaagaaaacatttctggctaaggatgaccataaagaaagtcaagaagcacagaacatcgcaggtggtagtatgatgatgtcagaaaagaccgatgaggaagatagtggcagggaaatttttctgtcatgcagtcatccattagaattgcttgaagaagctaccttaaatgtattatctgcacagttactagatggtggtatctttcatgaacaaacaggtcaaaagctcttactaaatgaagcaatatcccgaggcattgtgccaagtcacactgccgtgaagcttatggagaagctgaacatgtttcaggggttctttgactctcagacttgtgagtctttgacaactgaagaagtcattaatgaaggtctgatggatgagaaattattacataatgtcctcatggcagacaaagctataagtggtgtcttagacccccgtacccagacactgtgctctgtaaaggatgcagttacagttggacttcttgacaaggaaacagccaccagaattttagagaggcaggtggtgactggtggaattattgatctgaaacgaggcaaaaaagtttcagtaactttggcctcaactcttggcttggtggacgttgctgaccagccagaacttataaatctggagaaagcttccaaaggtagagatgctgaaaaaacagttagggagagattaattagtttacaaatggaaacaacaggacttatagaccctgatagtaaagcacctttaacagttgtgcagtccattgacagaggtcttttggagagagaggaggccgttcgtttgttgactaagcaagtggtagatggaggtatcattcaccatatatctgggatgagactttctgttgataatgccttcagacatggcttaattggtgaagatttagccgagaaactcaaaagagttgagaacttaaacatccatcagatttttaatcctgaaacgaaggaaaatatttccctccctaaagccataaaattagatcttattacctcagacctgaaaagagaaatccaggaggttcaggcctttactggaaactttgtggatctcatttctggtcagagattgaccttggcagaagctaaaaaagaaggactgttaactaatgaagcagtattgtctccaggaatgatgcatggcattgtagatcccgagaactgcagaattgtcccctactcagaattagtcaagaaatgtaagattgatattgaatctggacagagatatctagaagtaattcccttctcagacattaaagatggggtgagcgacaaagtgcttacattgtctcaagcaattcagcttggaaaagtagactttgcatctacgctgaaggttctagaagcccaggcaaatactggtggaatcatagatactgctactggaaaaagactgacattggcatcagctttggaagagaaactggtggatgaaaacatggtcagaattattgcatctcatcaggtgttaaatggaggaattgttgacatatttagtgatcagagagtgactttagtagaagctattgagaaaagactgatcagccctgaactggcaaatatgatccaaatagatagttcagagttcagcgatcacagggctcagattgaaaagcaagaagggattgaagtgtgtgcattacaaaatgaatttctaggaaaggatatgttaattgcttgtaatcagactgctgaaatgagttgtaataaagtagaagagagtgagagattatttcaagttgaaaatcagtctgcacaagaaaaggttaaagtgagagtttctgatggggagcaggcaaaaaagagcagggaaatttccttaaaggaatttgggtgcaaggatcaacgtaagccaagaatgtcttcagatgctaaagaatttatcagtatcataaatcctcataatcttaaaggtaaatccttgggccaagtgtcattgacacacccttactctgaatgtgattttaaacttaaagaagtggctagaaataacatgggaaatgatacaaatgaagagcaggaaaaagcagtgacaaaaatagaaattatttctcatatgaagcagtctacctcatgtctagattctgaagaaataagagaaaatcaaggggaagtgattttggaagtacaagaaacatattgtgaaacgtcaggcaaattgccgagtgagcaggttttgcagcaaccaatgaatgctcgggtgaaaagtaagagagagaagagggaggtgattgtagaagaaagtatcagaacatgcaaaccagcatttctttctgaagaaaagttgtatcaggaaactgccattagagatgagcatgactcccatataaagagccaacctagggaaatgacctcaagtgaaaaagggaaagaagctgatacagaaatgggattttctattacttttaaaattgaagagtcctcttcccaagtggtacctcaaggaatttctgtaaaacatttagatgctttaacactcttcagctctaaacaggccaatgaaggaaaagtaaacaatttaagtctctgcttgactttaaaaccagaagaaaacttatctcgagaaattgcctgtggggcccagagtgaaccattcccttgtatgaccccaagacctgaaggattgcactaccaggaatcagatggaaaagcccaagtgacaggcccatcccaaatttccaaaacagacaagtctttccaaggaaccaccagacaggagaccaactatcaagattcctgggttacttcgaaaactaaggaaaccaaacatcaaatttcctcatctaatgaatgtaaagaaaagtcataccaagaagtatcttttgacccagcaagaggtcttaaattggaagaaatcacagtttctagaccagattcaaaagaagtcaggtatctagaattctcagacagaaaagaccttcatcatcagggcagcaaaagtgatgataaactttgtggaactctcaaatctgaaatagcaacacaggaactaactggagagaaatttctagaaatggcaaaccctaatgttgcaggtctagaagcaggatccattgaggacatagtgactcagagaggttccagagtcttgggatcctttcttccagagaaactgttcaaaggagtgtctcaaaaagagaatacagggcaacagaatgccatcattagtcctactgttctagagaccagtgaagaaaagacagtgtccctaacagtatgctctgcagtgaagacagagaagacaccacaggaaaagctcagagaaagccctggcagtgaacaaactcccttcatgactgcacctgaaggaaagggaaatggaggtgtaaacccagagcccttcagagcaactcagaatgtatttacccggcaactctgtttagaacatgatgaaaagctagtatcctatctgtctctgttacggaacattgaaatgaggaccaaacagattcaacctttggagctaaacctggcagaactacaggatctgctgtgtcaggccaaggtattagaaagggagttaaaggatctgaccaccttggtcagtcaggagctggagtgtgtgaatcagattatcatcagccagcctcaagaagttcctgctcaactgttgaaggctctagagaaagatgccaagaatcttcagaagtctctcagctctgtgagtgacacttggaattccaggctactccacttccagaatgctgtggaaatagaaaagactaaagtgttaaatcagcacacacagctagaaggccgacttcaagatctgagagcctgggttggcaataaaaatcttattctgaacagcaagggatctaacagtgaaatagatgttgacagcctgaacctctgcctccaacagtatgaggatttgaaacagcccatggctgaaaggaaagctcagctggatgctcttgcttttgatattcagttctttatctcagaacatgcccaggacttgtcccctcagcagaatcgacagatgctgaggcttctgaatgaactgcagaggtccttccaggacattttggaacagactgccgctcaggtggatgccttgcagggccatcttcaacaaatggagcaggaagccctggtgaagaccctgcagaaacaacaaaatacctgtcaccagcaactggaggatctttgcagttgggtaggacaggcagaaagagcactggcaggccaccaaggcagaaccacccagcaggatctctctgctttgcagaagaaccaaagtgacttgaaggatttacaggatgacattcagaatcgtgccacctcatttgccactgttgtcaaggacattgaggggttcatggaagagaatcagaccaagctgagcccacgtgagttgacagctcttcgggaaaagcttcatcaggctaaggagcaatatgaggcgctccaggaagagacacgtgtggcccagaaggaactggaggaagcagtgacctccgccttacagcaggagactgaaaagagtaaagcagcaaaggaactggcagagaacaagaagaagatcgatgctctcctggattgggtaacttcagtaggatcatctggtggacagctgctgaccaaccttccaggaatggagcagctctcgggagctagcttggagaaaggagccttggacaccactgatggttacatgggggtgaatcaagccccagagaaactggacaagcaatgtgagatgatgaaggcccgtcaccaagaattgctgtcccagcagcaaaatttcattctggccacccagtcagctcaggccttcttggatcagcatggccacaatctcacacctgaggagcaacagatgctgcaacagaagctgggagagctaaaggaacaatactctacttccctggcccaatcagaggcagaactgaagcaggtgcagacacttcaggatgagttgcagaaatttctgcaggatcataaagagtttgaaagctggttggaacgatccgagaaagagctggagaacatgcataagggaggcagcagccccgagacccttccctccctgctaaagcggcaaggaagcttctcagaggatgtcatttcccacaaaggagacttgagatttgtgactatctcaggacagaaagtcttggacatggaaaacagttttaaggaaggcaaagaaccatcagaaattggaaacttagtaaaggacaagttgaaggatgcaacagaaagatacactgctctccactcaaagtgtacacgattaggatctcacctgaatatgctgttaggccagtatcatcaattccaaaacagtgctgacagcctgcaggcctggatgcaggcttgtgaggccaacgtggagaagctcctctcagatactgttgcctctgaccctggagttctccaggagcagcttgcaacaacaaagcagttgcaggaggaattggctgagcaccaagtacctgtggaaaaactccaaaaagtagctcgtgacataatggaaattgaaggggagccagccccagaccacaggcatgttcaagaaactacagattccatactcagccacttccaaagcctctcctatagcctggctgagcgatcttctctgctgcagaaagcaattgcccaatctcagagtgtccaggaaagcctggagagcctgttgcagtctattggggaagttgaacaaaacctggaagggaagcaggtgtcatcactctcatcaggagtcatccaggaagccttagccacaaatatgaaattgaagcaggacattgctcggcaaaagagcagcttggaggccacccgtgagatggtgacccgattcatggagacagcagacagtactacagcagcagtgctgcagggcaaactggcagaggtgagccagcggttcgaacagctctgtctacagcagcaagaaaaggagagctccctaaagaagcttctaccccaggcagagatgtttgaacacctctctggtaagctgcagcagttcatggaaaacaaaagtcggatgctggcctctggaaatcagccagatcaagatattacacatttcttccaacagatccaggagctcaatttggaaatggaagaccaacaggagaacctagatactcttgagcacctggtcactgaactgagctcttgtggctttgcgctggacttgtgccagcatcaggacagggtacagaatctaagaaaagacttcacagagctacagaagacagttaaagagagagagaaagatgcatcatcttgccaggaacagttggatgaattccggaagctggtcaggaccttccagaaatggttgaaagaaactgaagggagtattccacctacggaaacttctatgagtgctaaagagttagaaaagcagattgaacacctgaagagtctactagatgactgggcaagtaagggaactctggtggaagaaatcaattgcaaaggtacttctttagaaaatctcatcatggaaatcacagcacctgattcccaaggcaagacaggttccatactgccctctgtaggaagctctgtaggcagtgtaaacggataccacacctgcaaagatctgacggagatccagtgtgacatgtcagatgtaaacttgaagtatgagaaactagggggagtacttcatgaacgccaggaaagccttcaggctatcctcaacagaatggaggaggttcacaaggaggcaaactctgtgctgcagtggctggaatcaaaagaggaagtcctgaaatccatggatgccatgtcatctccaaccaagacagaaacagtgaaagcccaagctgaatctaacaaggccttcctggctgagttggaacagaattctccaaaaattcaaaaagtaaaggaagccctggctggattactggtgacatatcccaactcacaggaagcagaaaattggaagaaaattcaggaagaactcaattcccgatgggaaagggccactgaggttactgtggctcggcaaaggcagctagaggaatctgcaagtcatctggcctgcttccaggctgcagaatcccagctccggccgtggctgatggagaaagaactgatgatgggagtgctggggcccctgtctattgaccccaacatgttgaatgcacaaaagcaacaggtccagtttatgctaaaggaatttgaagcacgcaggcaacagcatgagcaactgaatgaggcagctcagggcatcctaacaggccctggagatgtctctctgtccaccagccaagtacagaaagaactccagagcatcaatcagaaatgggttgagctgactgacaaactcaactcccgttccagccaaattgaccaagctattgttaagagcacccagtaccaggaactgctccaggacttatcagagaaggtgagggcagttggacaacggctgagtgtccagtcagctatcagcacccaaccagaggctgtaaagcagcaattggaagagaccagtgaaattcgatctgacttggagcagttagaccacgaggttaaggaggctcagacactgtgcgatgaactctcagtgctcattggtgagcagtacctcaaggatgaactgaagaagcgtttggagacagttgccctgcctctccaaggtttagaagaccttgcagccgatcgcattaacagactccaggcagctcttgccagcacccagcagttccagcaaatgtttgatgagttgaggacctggttggatgataaacaaagccagcaagcaaaaaactgcccaatttctgcaaaattggagcggctacagtctcagctacaggagaatgaagagtttcagaaaagtcttaatcaacacagtggctcctatgaggtgattgtggctgaaggggaatctctacttctttctgtacctcctggagaagagaaaaggactctacaaaaccagttggttgagctcaaaaaccattgggaagagcttagtaaaaaaactgcagacagacaatccaggctcaaggattgtatgcagaaagctcagaaatatcagtggcatgtggaagaccttgtgccatggatagaagattgtaaagctaagatgtctgagttgcgagtcactctggatccagtgcagctagagtccagtctcctaagatcaaaggctatgctgaatgaggtggagaagcgccgctccctgctggaaatattgaatagtgctgctgacattctgatcaattcttcagaagcagatgaggatggaatccgggatgagaaggctgggatcaaccagaacatggatgctgttacagaagagctgcaggccaaaacagggtcactcgaagaaatgactcagaggctcagggagttccaggaaagctttaagaatattgaaaagaaggttgaaggagccaaacaccaacttgagatctttgatgctctgggttctcaagcctgtagcaacaagaacctggagaagctaagagctcaacaggaagtgctgcaggccctagagcctcaggtagactatctgaggaactttactcagggtctggtagaagatgccccagatggatctgatgcttctcaacttctccaccaagctgaggtcgcccagcaagagttcctcgaagttaagcaaagagtgaacagtggttgtgtgatgatggaaaacaagctggaggggattggccagtttcactgccgggtccgagagatgttctctcaattggcagacctggatgatgagctagatggcatgggtgctattggcagagacactgatagcctccagtcccaaatcgaggatgtccggctattccttaacaaaattcacgtcctcaaattagacatagaggcctctgaagcagagtgtcgacatatgctagaagaagaggggactctggatttgttaggtctcaaaagggagctagaagccctgaacaaacagtgtggcaaactgacagagagggggaaagctcgtcaggaacagctggaactgacactaggccgtgtagaggacttctacaggaaattgaaaggactcaatgacgcgaccacagcagcagaggaggcagaggccctccagtgggtagtggggaccgaagtggaaatcatcaaccaacaattagcagattttaaaatgtttcagaaagaacaagtggatcctcttcagatgaaattgcagcaggtgaatggacttggccagggattaattcagagtgcaggaaaagactgtgatgtacagggtttagaacatgacatggaagagatcaatgctcgatggaatacattgaataaaaaggtcgcacaaagaattgcacagctacaggaagctttgttgcattgtgggaagtttcaagatgccttggagccattgctcagctggttggcagataccgaggagctcatagccaatcagaaacctccatctgctgagtataaagtggtgaaagcacagatccaagaacagaagttgctccagcggctcctagatgatcgaaaggccacagtagacatgcttcaagcagaaggaggcagaatagcccagtcagcagagctggctgatagagagaaaatcactggacagctggagagtcttgaaagtagatggactgaactactcagtaaggcagcagccaggcaaaaacagctggaagacatcctggttctggccaaacagttccatgagacagctgagcctatttctgacttcttatctgtcacagagaaaaagcttgctaactcagaacctgttggcactcagactgccaaaatacagcagcagatcattcggcacaaggctctggaagaagacatagaaaaccatgcaacagatgtgcaccaggcagtcaaaattgggcagtccctctcctccctgacatctcctgcagaacagggtgtgctgtcagaaaagatagactcattgcaggcccgatacagtgaaattcaagaccgctgttgtcggaaggcagccctacttgaccaagctctgtctaatgctaggctgtttggggaggatgaggtggaggtgctcaactggctggctgaggttgaggacaagctcagttcagtgttcgtaaaggatttcaaacaggatgtcctgcacaggcagcatgctgaccacctggctttaaatgaagaaattgttaatagaaagaagaatgtagatcaagctattaaaaatggtcaggctcttctaaaacaaaccacaggtgaggaggtgttacttatccaggaaaaactagatggtataaagactcgttacgcagacatcacagttactagctccaaggccctcagaactttagagcaagcccggcagctggccaccaagttccagtctacttatgaggaactgaccgggtggctgagggaggtggaggaggagctggcaaccagtggaggacagtctcccacaggggaacagataccccagtttcagcagagacagaaggaattaaagaaggaggtcatggagcacaggctggtgttggacacagtgaatgaggtgagccgtgctctcttagagctggtgccctggagagccagagaagggctggataaacttgtgtccgatgctaacgagcagtacaaactagtcagtgacactattggacaaagggtggatgaaattgatgctgctattcagagatcacaacagtatgagcaagctgccgatgcagaactagcttgggttgctgaaacaaaacggaaactgatggctctgggtccaattcgcctggaacaggaccagaccacagctcagcttcaggtacagaaggctttctccattgacattattcgacacaaagattcaatggatgaactcttcagtcaccgtagtgaaatctttggcacatgtggggaggagcaaaaaactgtattacaggaaaagacagagtctctaatacagcaatatgaagccattagcctactcaattcagagcgttatgcccgcctagagcgggcccaggtcttagtaaaccagttttgggaaacttatgaagagctcagcccctggattgaggaaactcgggcactaatagcacagttaccctctccagccattgatcatgagcagctcaggcagcaacaagaggaaatgaggcaattaagggaatctattgctgaacacaaacctcatattgacaaactactaaagataggcccacaactaaaggaattaaaccctgaggaaggggaaatggtggaagaaaaataccagaaagcagaaaacatgtatgcccaaataaaggaggaggtgcgccagcgagccctggctctggatgaagccgtgtcccagtccacacagattacagagtttcatgataaaattgagcctatgttggagacactggagaatctttcctctcgcctgcgtatgccaccactgatccctgctgaagtagacaagatcagagagtgcatcagtgacaataagagtgccaccgtggagctagaaaaactgcagccatcctttgaggccttgaagcgccgtggagaggagcttattggacgatctcagggagcagacaaggatctggctgcaaaagaaatccaggataaattggatcaaatggtattcttctgggaggacatcaaagctcgggctgaagaacgagaaatcaaatttcttgatgtccttgaattagcagagaagttctggtatgacatggcagctctcctgaccaccatcaaagacacccaggatattgtccatgacttggaaagcccaggcattgatccttccatcatcaaacaacaggttgaagctgctgagactattaaggaagagacagatggtctgcatgaagagctggagtttattcggatccttggagcagatttgatttttgcctgtggagaaactgagaagcctgaagtgaggaagagcattgatgagatgaataatgcttgggagaacttaaacaaaacatggaaagagaggctagaaaaacttgaggatgctatgcaagctgctgtgcagtatcaggacactcttcaggctatgtttgactggctagataacactgtgattaaactctgcaccatgccccctgttggcactgacctcaatactgttaaagatcagttaaatgaaatgaaggagttcaaagtagaagtttaccaacagcaaattgagatggagaagcttaatcaccagggtgaactgatgttaaagaaagctactgatgagacggacagagacattatacgagaaccactgacagaactcaaacacctctgggagaacctgggtgagaaaattgcccaccgacagcacaaactagaaggggctctgttggcccttggtcagttccagcatgccttagaggaactaatgagttggctgactcataccgaagagttgttagatgctcagagaccaataagtggagacccaaaagtcattgaagttgagctcgcaaagcaccatgtcctaaaaaatgatgttttggctcatcaagccacagtggaaacagtcaacaaagctggcaatgagcttcttgaatccagtgctggagatgatgccagcagcttaaggagccgtttggaagccatgaaccaatgctgggagtcagtgttacagaaaacagaggagagggagcagcagcttcagtcaactctgcagcaggcccagggcttccacagtgaaattgaagatttcctcttggaacttactagaatggagagccagctttctgcatctaagcccacaggaggacttcctgaaactgctagggaacagcttgatacacatatggaactctattcccagctgaaagccaaggaagagacttataatcaactacttgacaagggcagactcatgcttctaagccgtgacgactctgggtctggctccaagacagaacagagtgtagcacttttggagcagaagtggcatgtggtcagcagtaagatggaagaaagaaagtcaaagctggaagaggccctcaacttggcaacagaattccagaattccctacaagaatttatcaactggctcactctagcagagcagagtttaaacatcgcttctccaccaagcctgattctaaatactgtcctttcccagatagaagagcacaaggtttttgctaatgaagtaaatgctcatcgagaccagatcattgagctggatcaaactgggaatcaattaaagttccttagccaaaagcaggatgttgttctgatcaagaatttgttggtgagcgtgcagtctcgatgggagaaggttgtccagcgatctattgaaagagggcgatcactagatgatgccaggaagcgggcaaaacaattccatgaagcttggaaaaaactgattgactggctagaagatgcagagagtcacctggactcagaactagagatatccaatgacccagacaaaattaaacttcagctttctaagcataaggagtttcagaagactcttggtggcaagcagcctgtgtatgataccacaattagaactggcagagcactgaaagaaaagactttgcttcccgaagatagtcagaaacttgacaatttcctaggagaagtcagagacaaatgggatactgtttgtggcaagtctgtggagcggcagcacaagttggaggaagccctgctcttttcgggtcagttcatggatgctttgcaggcattggttgactggttatacaaggtggagccacagctggctgaggaccagcccgtgcacggggaccttgacctcgtcatgaacctcatggatgcacacaaggttttccagaaggaactgggaaagcgaacaggaaccgttcaggtcctgaagcggtcaggccgagagctgattgagaatagtcgagatgacaccacttgggtaaaaggacagctccaggaactgagcactcgctgggacactgtctgtaaactctctgtttccaaacaaagccggcttgagcaggccttaaaacaagcggaagtgtttcgagacacagtccacatgctgttggagtggctttctgaagcagagcaaacgcttcgctttcggggagcacttcctgatgacacagaggccctgcagtctctcattgacacccataaggaattcatgaagaaagtagaagaaaagcgagtggacgttaactcagcagtagccatgggagaagtcatcctggctgtctgccaccccgattgcatcacaaccatcaaacactggatcaccatcatccgagctcgcttcgaggaggtcctgacatgggctaagcagcaccagcagcgtcttgaaacggccttgtcagaactggtggctaatgctgagctcctggaagaacttctggcatggatccagtgggctgagaccaccctcattcagcgggatcaggagccaatcccgcagaacattgaccgagttaaagcccttatcgctgagcatcagacatttatggaggagatgactcgcaaacagcctgacgtggaccgggtcaccaagacatacaaaaggaaaaacatagagcctactcacgcgcctttcatagagaaatcccgcagcggaggcaggaaatccctaagtcagccaacccctcctcccatgccaatcctttcacagtctgaagcaaaaaacccacggatcaaccagctttctgcccgctggcagcaggtgtggctgttagcactggagcggcaaaggaaactgaatgatgccttggatcggctggaggagttgaaagaatttgccaactttgactttgatgtctggaggaaaaagtatatgcgttggatgaatcacaaaaagtctcgagtgatggatttcttccggcgcattgataaggaccaggatgggaagataacacgtcaggagtttatcgatggcattttagcatccaagttccccaccaccaagttagagatgactgctgtggctgacattttcgaccgagatggggatggttacattgattattatgaatttgtggctgctcttcatcccaacaaggatgcgtatcgaccaacaaccgatgcagataaaatcgaagatgaggttacaagacaagtggctcagtgcaaatgtgcaaaaaggtttcaggtggagcagatcggagagaataaataccggttcttcctcggcaatcagtttggggattctcagcagttgcggctggtccgtattctgcgcagcaccgtgatggttcgcgttggtggaggatggatggccttggatgaatttttagtgaaaaatgatccctgccgagcacgaggtagaactaacattgaacttagagagaaattcatcctaccagagggagcatcccagggaatgacccccttccgctcacggggtcgaaggtccaaaccatcttcccgggcagcttcccctactcgttccagctccagtgctagtcagagtaaccacagctgtacatccatgccatcttctccagccaccccagccagtggaaccaaggttatcccatcatcaggtagcaagttgaaacgaccaacaccaacttttcattctagtcggacatcccttgctggtgataccagcaatagttcttccccggcctccacaggtgccaaaactaatcgggcagaccctaaaaagtctgccagtcgccctgggagtcgggctgggagtcgagccgggagtcgagccagcagccggcgaggaagtgacgcttctgactttgacctcttagagacgcagtctgcttgttccgacacttcagaaagcagcgctgcagggggccaaggcaactccaggagagggctaaacaaaccttccaaaatcccaaccatgtctaagaagaccaccactgcctcccccaggactccaggtcccaagcgataacactgtctaagcacccccaagccactatccactttgaatcctgctccatacattgggtgtatatttattctgaacgggagaagttatattgttaaaagtgtaaaagaataattgtgttatgaagctgccttattttttttctttttgtaagttactattttcatgtgaatatttatgtagataaaatttgcctcctggtaaccctgtaatggatggggcccagaaatgaaatatttgagaaaaacaagtgaaaaggtcaagatacaaatgtgtattaaaaaaaaaaaagcctattaatagggtttctgcgcggtgcagggttgtaaacctgctttatcttttaggattattcctaaatgcatcttctttataaacttgacttgctatctcagcaagataaattatattaaaaaaataagaatcctgcagtgtttaaggaactctttttttgtaaatcacggacacctcaattagcaagaactgaggggagggctttttccattgtttaatgttttgtgatttttagctaaagagagggaacctcatctaagtaacatttgcacatgatacagcaaaaggagttcattgcaatactgtctttggatattgtttcagtactgggtgtttaaaggacaaatagctgctagaattcaggggtaaatgtaagtgttcagaaaacgtcagaacatttggggttttaaactgatttgttgctccctatccagcctagacaccagtaactcttgtgttcaccaggacccagacccttggcaagggataggctcgttggtgacattgtgaatttcagatttgttttatccactttttttgctatttatttaaatggtcgatcaacttcccacaaactgaggaatgaattccacgagcctgttctgaaaatgtggacgtaagacaaacacgtgctcgtcctttaatggagttcaccagcacacttgttaaccagtcctgtttgctttcgtctttttttgtgcgtaataaagtcaactgaccaagtgaccatgaaaaggggctgtctggggctcctgttttttagctgctgttcttcagctccgaccatgttgctgtgtgattatctcaattggttttaattgaggcagaaactgaagctctaccaatgaactgtttagaaacaagacacacttttgtattaaaattgcttgcagtaacaaatattttgtatttcctgattttcttttcaactattaccttatctataaatgttaccctggggtataatcatgttgtaggtacttaaatgcattccgcaaatcaaaatatcttgatggataaattatagagctt

SEQ ID NO: 77 - protein, 5938 aa, Homo sapiens
MQKGLLDQDTGLVLLESQVIMSGLIAPETGENLSLEEGIARNLINPQMYQQLRELQDALALISRLTESRGPLSVVEAIEKRIISETVGLKILEAHLATGGFSLSPSENCINLEEAFHQGLISAWLHSVLESYLRTSKNLIDPNTAEKIGLLDLMQRCIVHQESGFKLLPVKQLAGGMVSLKSGRKVSIFRAVQEGLIDRQVTVRLLEAQLFAGGIVDPRTGHRLTVEEAVRHNLIDQDMACAILIRQLQTGGIIDTVTGQRLTIDEAVSNDLVAAKIALVILESLWSFMGLLWPESGEILPITDALEQGIVSTELAHKILSNRQHIKALFLPATTEILSWKKAIESGILDRDLANNLKSICIPDVMPHMQLADSAEQNINPGAAVLPCSKSHPKATASQSENLLFQLMTHSYINVQNGQRLLLLDKELMETLTSRDEYQTSPPKVVEIGHQRQKTPEGLQESANVKISGTFSSGWTVRLPEFQFSSQNKEYPDREDCTTEKGKKTTVETEDSSVENPEQDLFVEQKERNPNIDALKVINKVKLEVQRQLIGTQREDQTAVSVRENASRGHLLTIPPAEAEGVPLVVDKDVFSVETPKKEHQPLRNTSFTCQNEQAHTLETEYIHDETGGSHIKPQSKKLQVQVKKTLGIKLELKSETDGNVHPLDKKEMLKKTFLAKDDHKESQEAQNIAGGSMMMSEKTDEEDSGREIFLSCSHPLELLEEATLNVLSAQLLDGGIFHEQTGQKLLLNEAISRGIVPSHTAVKLMEKLNMFQGFFDSQTCESLTTEEVINEGLMDEKLLHNVLMADKAISGVLDPRTQTLCSVKDAVTVGLLDKETATRILERQVVTGGIIDLKRGKKVSVTLASTLGLVDVADQPELINLEKASKGRDAEKTVRERLISLQMETTGLIDPDSKAPLTVVQSIDRGLLEREEAVRLLTKQVVDGGIIHHISGMRLSVDNAFRHGLIGEDLAEKLKRVENLNIHQIFNPETKENISLPKAIKLDLITSDLKREIQEVQAFTGNFVDLISGQRLTLAEAKKEGLLTNEAVLSPGMMHGIVDPENCRIVPYSELVKKCKIDIESGQRYLEVIPFSDIKDGVSDKVLTLSQAIQLGKVDFASTLKVLEAQANTGGIIDTATGKRLTLASALEEKLVDENMVRIIASHQVLNGGIVDIFSDQRVTLVEAIEKRLISPELANMIQIDSSEFSDHRAQIEKQEGIEVCALQNEFLGKDMLIACNQTAEMSCNKVEESERLFQVENQSAQEKVKVRVSDGEQAKKSREISLKEFGCKDQRKPRMSSDAKEFISIINPHNLKGKSLGQVSLTHPYSECDFKLKEVARNNMGNDTNEEQEKAVTKIEIISHMKQSTSCLDSEEIRENQGEVILEVQETYCETSGKLPSEQVLQQPMNARVKSKREKREVIVEESIRTCKPAFLSEEKLYQETAIRDEHDSHIKSQPREMTSSEKGKEADTEMGFSITFKIEESSSQVVPQGISVKHLDALTLFSSKQANEGKVNNLSLCLTLKPEENLSREIACGAQSEPFPCMTPRPEGLHYQESDGKAQVTGPSQISKTDKSFQGTTRQETNYQDSWVTSKTKETKHQISSSNECKEKSYQEVSFDPARGLKLEEITVSRPDSKEVRYLEFSDRKDLHHQGSKSDDKLCGTLKSEIATQELTGEKFLEMANPNVAGLEAGSIEDIVTQRGSRVLGSFLPEKLFKGVSQKENTGQQNAIISPTVLETSEEKTVSLTVCSAVKTEKTPQEKLRESPGSEQTPFMTAPEGKGNGGVNPEPFRATQNVFTRQLCLEHDEKLVSYLSLLRNIEMRTKQIQPLELNLAELQDLLCQAKVLERELKDLTTLVSQELECVNQIIISQPQEVPAQLLKALEKDAKNLQKSLSSVSDTWNSRLLHFQNAVEIEKTKVLNQHTQLEGRLQDLRAWVGNKNLILNSKGSNSEIDVDSLNLCLQQYEDLKQPMAERKAQLDALAFDIQFFISEHAQDLSPQQNRQMLRLLNELQRSFQDILEQTAAQVDALQGHLQQMEQEALVKTLQKQQNTCHQQLEDLCSWVGQAERALAGHQGRTTQQDLSALQKNQSDLKDLQDDIQNRATSFATVVKDIEGFMEENQTKLSPRELTALREKLHQAKEQYEALQEETRVAQKELEEAVTSALQQETEKSKAAKELAENKKKIDALLDWVTSVGSSGGQLLTNLPGMEQLSGASLEKGALDTTDGYMGVNQAPEKLDKQCEMMKARHQELLSQQQNFILATQSAQAFLDQHGHNLTPEEQQMLQQKLGELKEQYSTSLAQSEAELKQVQTLQDELQKFLQDHKEFESWLERSEKELENMHKGGSSPETLPSLLKRQGSFSEDVISHKGDLRFVTISGQKVLDMENSFKEGKEPSEIGNLVKDKLKDATERYTALHSKCTRLGSHLNMLLGQYHQFQNSADSLQAWMQACEANVEKLLSDTVASDPGVLQEQLATTKQLQEELAEHQVPVEKLQKVARDIMEIEGEPAPDHRHVQETTDSILSHFQSLSYSLAERSSLLQKAIAQSQSVQESLESLLQSIGEVEQNLEGKQVSSLSSGVIQEALATNMKLKQDIARQKSSLEATREMVTRFMETADSTTAAVLQGKLAEVSQRFEQLCLQQQEKESSLKKLLPQAEMFEHLSGKLQQFMENKSRMLASGNQPDQDITHFFQQIQELNLEMEDQQENLDTLEHLVTELSSCGFALDLCQHQDRVQNLRKDFTELQKTVKEREKDASSCQEQLDEFRKLVRTFQKWLKETEGSIPPTETSMSAKELEKQIEHLKSLLDDWASKGTLVEEINCKGTSLENLIMEITAPDSQGKTGSILPSVGSSVGSVNGYHTCKDLTEIQCDMSDVNLKYEKLGGVLHERQESLQAILNRMEEVHKEANSVLQWLESKEEVLKSMDAMSSPTKTETVKAQAESNKAFLAELEQNSPKIQKVKEALAGLLVTYPNSQEAENWKKIQEELNSRWERATEVTVARQRQLEESASHLACFQAAESQLRPWLMEKELMMGVLGPLSIDPNMLNAQKQQVQFMLKEFEARRQQHEQLNEAAQGILTGPGDVSLSTSQVQKELQSINQKWVELTDKLNSRSSQIDQAIVKSTQYQELLQDLSEKVRAVGQRLSVQSAISTQPEAVKQQLEETSEIRSDLEQLDHEVKEAQTLCDELSVLIGEQYLKDELKKRLETVALPLQGLEDLAADRINRLQAALASTQQFQQMFDELRTWLDDKQSQQAKNCPISAKLERLQSQLQENEEFQKSLNQHSGSYEVIVAEGESLLLSVPPGEEKRTLQNQLVELKNHWEELSKKTADRQSRLKDCMQKAQKYQWHVEDLVPWIEDCKAKMSELRVTLDPVQLESSLLRSKAMLNEVEKRRSLLEILNSAADILINSSEADEDGIRDEKAGINQNMDAVTEELQAKTGSLEEMTQRLREFQESFKNIEKKVEGAKHQLEIFDALGSQACSNKNLEKLRAQQEVLQALEPQVDYLRNFTQGLVEDAPDGSDASQLLHQAEVAQQEFLEVKQRVNSGCVMMENKLEGIGQFHCRVREMFSQLADLDDELDGMGAIGRDTDSLQSQIEDVRLFLNKIHVLKLDIEASEAECRHMLEEEGTLDLLGLKRELEALNKQCGKLTERGKARQEQLELTLGRVEDFYRKLKGLNDATTAAEEAEALQWVVGTEVEIINQQLADFKMFQKEQVDPLQMKLQQVNGLGQGLIQSAGKDCDVQGLEHDMEEINARWNTLNKKVAQRIAQLQEALLHCGKFQDALEPLLSWLADTEELIANQKPPSAEYKVVKAQIQEQKLLQRLLDDRKATVDMLQAEGGRIAQSAELADREKITGQLESLESRWTELLSKAAARQKQLEDILVLAKQFHETAEPISDFLSVTEKKLANSEPVGTQTAKIQQQIIRHKALEEDIENHATDVHQAVKIGQSLSSLTSPAEQGVLSEKIDSLQARYSEIQDRCCRKAALLDQALSNARLFGEDEVEVLNWLAEVEDKLSSVFVKDFKQDVLHRQHADHLALNEEIVNRKKNVDQAIKNGQALLKQTTGEEVLLIQEKLDGIKTRYADITVTSSKALRTLEQARQLATKFQSTYEELTGWLREVEEELATSGGQSPTGEQIPQFQQRQKELKKEVMEHRLVLDTVNEVSRALLELVPWRAREGLDKLVSDANEQYKLVSDTIGQRVDEIDAAIQRSQQYEQAADAELAWVAETKRKLMALGPIRLEQDQTTAQLQVQKAFSIDIIRHKDSMDELFSHRSEIFGTCGEEQKTVLQEKTESLIQQYEAISLLNSERYARLERAQVLVNQFWETYEELSPWIEETRALIAQLPSPAIDHEQLRQQQEEMRQLRESIAEHKPHIDKLLKIGPQLKELNPEEGEMVEEKYQKAENMYAQIKEEVRQRALALDEAVSQSTQITEFHDKIEPMLETLENLSSRLRMPPLIPAEVDKIRECISDNKSATVELEKLQPSFEALKRRGEELIGRSQGADKDLAAKEIQDKLDQMVFFWEDIKARAEEREIKFLDVLELAEKFWYDMAALLTTIKDTQDIVHDLESPGIDPSIIKQQVEAAETIKEETDGLHEELEFIRILGADLIFACGETEKPEVRKSIDEMNNAWENLNKTWKERLEKLEDAMQAAVQYQDTLQAMFDWLDNTVIKLCTMPPVGTDLNTVKDQLNEMKEFKVEVYQQQIEMEKLNHQGELMLKKATDETDRDIIREPLTELKHLWENLGEKIAHRQHKLEGALLALGQFQHALEELMSWLTHTEELLDAQRPISGDPKVIEVELAKHHVLKNDVLAHQATVETVNKAGNELLESSAGDDASSLRSRLEAMNQCWESVLQKTEEREQQLQSTLQQAQGFHSEIEDFLLELTRMESQLSASKPTGGLPETAREQLDTHMELYSQLKAKEETYNQLLDKGRLMLLSRDDSGSGSKTEQSVALLEQKWHVVSSKMEERKSKLEEALNLATEFQNSLQEFINWLTLAEQSLNIASPPSLILNTVLSQIEEHKVFANEVNAHRDQIIELDQTGNQLKFLSQKQDVVLIKNLLVSVQSRWEKVVQRSIERGRSLDDARKRAKQFHEAWKKLIDWLEDAESHLDSELEISNDPDKIKLQLSKHKEFQKTLGGKQPVYDTTIRTGRALKEKTLLPEDSQKLDNFLGEVRDKWDTVCGKSVERQHKLEEALLFSGQFMDALQALVDWLYKVEPQLAEDQPVHGDLDLVMNLMDAHKVFQKELGKRTGTVQVLKRSGRELIENSRDDTTWVKGQLQELSTRWDTVCKLSVSKQSRLEQALKQAEVFRDTVHMLLEWLSEAEQTLRFRGALPDDTEALQSLIDTHKEFMKKVEEKRVDVNSAVAMGEVILAVCHPDCITTIKHWITIIRARFEEVLTWAKQHQQRLETALSELVANAELLEELLAWIQWAETTLIQRDQEPIPQNIDRVKALIAEHQTFMEEMTRKQPDVDRVTKTYKRKNIEPTHAPFIEKSRSGGRKSLSQPTPPPMPILSQSEAKNPRINQLSARWQQVWLLALERQRKLNDALDRLEELKEFANFDFDVWRKKYMRWMNHKKSRVMDFFRRIDKDQDGKITRQEFIDGILASKFPTTKLEMTAVADIFDRDGDGYIDYYEFVAALHPNKDAYRPTTDADKIEDEVTRQVAQCKCAKRFQVEQIGENKYRFFLGNQFGDSQQLRLVRILRSTVMVRVGGGWMALDEFLVKNDPCRARGRTNIELREKFILPEGASQGMTPFRSRGRRSKPSSRAASPTRSSSSASQSNHSCTSMPSSPATPASGTKVIPSSGSKLKRPTPTFHSSRTSLAGDTSNSSSPASTGAKTNRADPKKSASRPGSRAGSRAGSRASSRRGSDASDFDLLETQSACSDTSESSAAGGQGNSRRGLNKPSKIPTMSKKTTTASPRTPGPKR

SEQ ID NO: 78 - DNA, 2106 bp, Homo sapiens
agccacgttcggttgagctccaagtagaccagcggcggcggcggcggcggcggcggcagcggtgctggaggcgcagagggcggcgcaggcggagccgggcgggcgcgcgagcgagcggagagcgggcggccgtgcgggcggcggcggcggcacccccaggccgagccggcgcggaaggagttccagggcgatggggccgcggccggggctgacgctttgacagctggaaagagcgcggagccagcgcctgggggggagggaggggagcgcggcgaggagagcgccagcgagcgagagagcgagcgagcgccggggagggggccgggagcgaggggcagctcgggagagccggagcggtagcggcggcggcggcggcggcggcgaggctcggcgccctcttccctgcaaaccatgtttgccaaaggcaaaggctcggcggtgccctcggatgggcaggctcgggaaaagttagctttatacgtctacgaatatttactgcacgtaggagcacagaaatctgcacagaccttcttatcggagattcgatgggaaaaaaacatcacgttgggagaaccgcctgggtttttgcactcgtggtggtgtgtattttgggacctttactgtgcagctcctgaaaggagagacacttgtgaacattcaagtgaagcaaaagcctttcatgattatagtgcagcagctgccccgagccccgtgcttggcaacattccccccaacgatgggatgccgggaggccccatcccgccaggtttctttcagccttttatgtcaccgcgatacgcaggcggccccaggcccccgatcagaatgggaaaccagcctccgggaggagttcctgggacacagccattgctgcccaattctatggatcccacacgacaacaaggccaccccaacatgggaggatcaatgcagagaatgaaccctccccgaggcatggggcccatgggtcccggcccacagaattacggcagcggcatgagaccaccacccaactccctcggccccgccatgcccgggattaacatgggcccgggagctggcagaccctggcccaatcctaacagtgctaactcaattccatactcctcctcatcacctggtacctatgtgggaccccctggtggtggcggtcctccaggaacacccattatgcccagtcccgcagattcaacaaattccagtgacaacatctacacaatgattaatccagtgccgcctggaggcagccggtccaacttcccgatgggtcccggctcggacggtccgatgggcggcatgggtggcatggagccacaccacatgaatggatcattagggtcaggcgacatagacggacttccaaaaaattctcctaacaacataagtggcattagcaatcctccaggcacccctcgagatgacggcgagctaggagggaacttcctccactcctttcagaacgacaattattctccaagcatgacgatgagtgtgtgatccccccttctccgagacgctgagagagcaggcattgcaggcgggaagatgccagaaattatgcaagaagtgaggtgtcattatccaggagctggtggggagggcatctccctgctcccctcaaccccctcccaccccatccacgccccctacctttcccaattttagtttcatgcaataaaaaggccaaactttttattccataaaacaagaaggacaaaactctcaaaaatgtatttcaagtcagtgaccagaaaaatcccaccccttgccctttccccaaaggaccttttctgtacatgacacttttttgttgttttttgtttggggttttaccattgttgggatttttttatttgttttcaggggggttttttgggggaaaatttttttaaatggaagcttctagcaagccccccaccccaatcaacctctatgctttcttcttaaaaaaaaaaaaaaaggaaaaaggaaaaaaaaaaaaggaaaaccagaagccctgctgtctgtctgtgcccaagcccttccaccagaaaagctagtctaggtgtgagagcccacattgtctgtagccatcaaaaataataataataaactggacagtttaca

SEQ ID NO: 79 - protein, 361 aa, Homo sapiens
MFAKGKGSAVPSDGQAREKLALYVYEYLLHVGAQKSAQTFLSEIRWEKNITLGEPPGFLHSWWCVFWDLYCAAPERRDTCEHSSEAKAFHDYSAAAAPSPVLGNIPPNDGMPGGPIPPGFFQPFMSPRYAGGPRPPIRMGNQPPGGVPGTQPLLPNSMDPTRQQGHPNMGGSMQRMNPPRGMGPMGPGPQNYGSGMRPPPNSLGPAMPGINMGPGAGRPWPNPNSANSIPYSSSSPGTYVGPPGGGGPPGTPIMPSPADSTNSSDNIYTMINPVPPGGSRSNFPMGPGSDGPMGGMGGMEPHHMNGSLGSGDIDGLPKNSPNNISGISNPPGTPRDDGELGGNFLHSFQNDNYSPSMTMSV

SEQ ID NO: 80 - DNA, 2014 bp, Homo sapiens
agcggagagcgggcggccgtgcgggcggcggcggcggcacccccaggccgagccggcgcggaaggagttccagggcgatggggccgcggccggggctgacgctttgacagctggaaagagcgcggagccagcgcctgggggggagggaggggagcgcggcgaggagagcgccagcgagcgagagagcgagcgagcgccggggagggggccgggagcgaggggcagctcgggagagccggagcggtagcggcggcggcggcggcggcggcgaggctcggcgccctcttccctgcaaaccatgtttgccaaaggcaaaggctcggcggtgccctcggatgggcaggctcgggaaaagttagctttatacgtctacgaatatttactgcacgtaggagcacagaaatctgcacagaccttcttatcggagattcgatgggaaaaaaacatcacgttgggagaaccgcctgggtttttgcactcgtggtggtgtgtattttgggacctttactgtgcagctcctgaaaggagagacacttgtgaacattcaagtgaagcaaaagcctttcatgattatagtgcagcagctgccccgagccccgtgcttggcaacattccccccaacgatgggatgccgggaggccccatcccgccaggtttctttcagggtcctccggggtcacagccctcgccgcacgcacagcctccacctcacaatcctagcagcatgatgggaccccacagtcagcctccgggaggagttcctgggacacagccattgctgcccaattctatggatcccacacgacaacaaggccaccccaacatgggaggatcaatgcagagaatgaaccctccccgaggcatggggcccatgggtcccggcccacagaattacggcagcggcatgagaccaccacccaactccctcggccccgccatgcccgggattaacatgggcccgggagctggcagaccctggcccaatcctaacagtgctaactcaattccatactcctcctcatcacctggtacctatgtgggaccccctggtggtggcggtcctccaggaacacccattatgcccagtcccgcagattcaacaaattccagtgacaacatctacacaatgattaatccagtgccgcctggaggcagccggtccaacttcccgatgggtcccggctcggacggtccgatgggcggcatgggtggcatggagccacaccacatgaatggatcattagggtcaggcgacatagacggacttccaaaaaattctcctaacaacataagtggcattagcaatcctccaggcacccctcgagatgacggcgagctaggagggaacttcctccactcctttcagaacgacaattattctccaagcatgacgatgagtgtgtgatccccccttctccgagacgctgagagagcaggcattgcaggcgggaagatgccagaaattatgcaagaagtgaggtgtcattatccaggagctggtggggagggcatctccctgctcccctcaaccccctcccaccccatccacgccccctacctttcccaattttagtttcatgcaataaaaaggccaaactttttattccataaaacaagaaggacaaaactctcaaaaatgtatttcaagtcagtgaccagaaaaatcccaccccttgccctttccccaaaggaccttttctgtacatgacacttttttgttgttttttgtttggggttttaccattgttgggatttttttatttgttttcaggggggttttttgggggaaaatttttttaaatggaagcttctagcaagccccccaccccaatcaacctctatgctttcttcttaaaaaaaaaaaaaaaggaaaaaggaaaaaaaaaaaaggaaaaccagaagccctgctgtctgtctgtgcccaagcccttccaccagaaaagctagtctaggtgtgagagcccacattgtctgtagccatcaaaaataataataataaactggacagtttaca

SEQ ID NO: 81 - protein, 368 aa, Homo sapiens
MFAKGKGSAVPSDGQAREKLALYVYEYLLHVGAQKSAQTFLSEIRWEKNITLGEPPGFLHSWWCVFWDLYCAAPERRDTCEHSSEAKAFHDYSAAAAPSPVLGNIPPNDGMPGGPIPPGFFQGPPGSQPSPHAQPPPHNPSSMMGPHSQPPGGVPGTQPLLPNSMDPTRQQGHPNMGGSMQRMNPPRGMGPMGPGPQNYGSGMRPPPNSLGPAMPGINMGPGAGRPWPNPNSANSIPYSSSSPGTYVGPPGGGGPPGTPIMPSPADSTNSSDNIYTMINPVPPGGSRSNFPMGPGSDGPMGGMGGMEPHHMNGSLGSGDIDGLPKNSPNNISGISNPPGTPRDDGELGGNFLHSFQNDNYSPSMTMSV

SEQ ID NO: 82 - DNA, 2074 bp, Homo sapiens
agcggagagcgggcggccgtgcgggcggcggcggcggcacccccaggccgagccggcgcggaaggagttccagggcgatggggccgcggccggggctgacgctttgacagctggaaagagcgcggagccagcgcctgggggggagggaggggagcgcggcgaggagagcgccagcgagcgagagagcgagcgagcgccggggagggggccgggagcgaggggcagctcgggagagccggagcggtagcggcggcggcggcggcggcggcgaggctcggcgccctcttccctgcaaaccatgtttgccaaaggcaaaggctcggcggtgccctcggatgggcaggctcgggaaaagttagctttatacgtctacgaatatttactgcacgtaggagcacagaaatctgcacagaccttcttatcggagattcgatgggaaaaaaacatcacgttgggagaaccgcctgggtttttgcactcgtggtggtgtgtattttgggacctttactgtgcagctcctgaaaggagagacacttgtgaacattcaagtgaagcaaaagcctttcatgattatagtgcagcagctgccccgagccccgtgcttggcaacattccccccaacgatgggatgccgggaggccccatcccgccaggtttctttcagggtcctccggggtcacagccctcgccgcacgcacagcctccacctcacaatcctagcagcatgatgggaccccacagtcagccttttatgtcaccgcgatacgcaggcggccccaggcccccgatcagaatgggaaaccagcctccgggaggagttcctgggacacagccattgctgcccaattctatggatcccacacgacaacaaggccaccccaacatgggaggatcaatgcagagaatgaaccctccccgaggcatggggcccatgggtcccggcccacagaattacggcagcggcatgagaccaccacccaactccctcggccccgccatgcccgggattaacatgggcccgggagctggcagaccctggcccaatcctaacagtgctaactcaattccatactcctcctcatcacctggtacctatgtgggaccccctggtggtggcggtcctccaggaacacccattatgcccagtcccgcagattcaacaaattccagtgacaacatctacacaatgattaatccagtgccgcctggaggcagccggtccaacttcccgatgggtcccggctcggacggtccgatgggcggcatgggtggcatggagccacaccacatgaatggatcattagggtcaggcgacatagacggacttccaaaaaattctcctaacaacataagtggcattagcaatcctccaggcacccctcgagatgacggcgagctaggagggaacttcctccactcctttcagaacgacaattattctccaagcatgacgatgagtgtgtgatccccccttctccgagacgctgagagagcaggcattgcaggcgggaagatgccagaaattatgcaagaagtgaggtgtcattatccaggagctggtggggagggcatctccctgctcccctcaaccccctcccaccccatccacgccccctacctttcccaattttagtttcatgcaataaaaaggccaaactttttattccataaaacaagaaggacaaaactctcaaaaatgtatttcaagtcagtgaccagaaaaatcccaccccttgccctttccccaaaggaccttttctgtacatgacacttttttgttgttttttgtttggggttttaccattgttgggatttttttatttgttttcaggggggttttttgggggaaaatttttttaaatggaagcttctagcaagccccccaccccaatcaacctctatgctttcttcttaaaaaaaaaaaaaaaggaaaaaggaaaaaaaaaaaaggaaaaccagaagccctgctgtctgtctgtgcccaagcccttccaccagaaaagctagtctaggtgtgagagcccacattgtctgtagccatcaaaaataataataataaactggacagtttaca

SEQ ID NO: 83 - protein, 388 aa, Homo sapiens
MFAKGKGSAVPSDGQAREKLALYVYEYLLHVGAQKSAQTFLSEIRWEKNITLGEPPGFLHSWWCVFWDLYCAAPERRDTCEHSSEAKAFHDYSAAAAPSPVLGNIPPNDGMPGGPIPPGFFQGPPGSQPSPHAQPPPHNPSSMMGPHSQPFMSPRYAGGPRPPIRMGNQPPGGVPGTQPLLPNSMDPTRQQGHPNMGGSMQRMNPPRGMGPMGPGPQNYGSGMRPPPNSLGPAMPGINMGPGAGRPWPNPNSANSIPYSSSSPGTYVGPPGGGGPPGTPIMPSPADSTNSSDNIYTMINPVPPGGSRSNFPMGPGSDGPMGGMGGMEPHHMNGSLGSGDIDGLPKNSPNNISGISNPPGTPRDDGELGGNFLHSFQNDNYSPSMTMSV

SEQ ID NO: 84 - DNA, 1027 bp, Homo sapiens
aggactttctgtgtcctgggattcctcaggatgtggggctttttagtgttaaaagccagatggttggtcacaccagtgaggaccctggcaacggaggcaggccagaaaccatccctcagagggctgctggatgtaggcaatatccagcacagggcagcccgcgctcggggtttaacacgtggggtgatccgggtgtcacctcaggaacggagccaacaaaaccagagtgccccaaaaggccctaccccctcaaccaggccaaagcctcgcactttagggccccaggcccactctctggctctacagtctgtagacctccttttcagaccctgagctcctggaggggcaaggctgaacaggttcacctgaggcctgcatggaggaggaagggaaggaactagaatggaagggttgcctgtggaggggaagcagatcaggccccgacctcgggcaacgccccctgggtgaggagacaggctgcagctgactaaccaagtcccatccagtgggtgcaggggacacaggaggaagtggggcaagcagtaatcagaaatggggaaatgtgagctgcaacatcacccaagggctgcaactctgagaggcaaagaagctgccaggtattgggagttccagagctcctggcagcagcacaggcaggcgggtcccccagcgagccctgtccccttgctgctggctccaccctcaactccatagccccagaaacagacccaggaggagagggattgcccgggccacagccagtttgctgggcagagaccaggccagaccccacctacagcatggcgcttcccccaccagcacggcaggaggtggcaagtcccagcagcacagcgggcaccctggctctaaccagagggtgggcatcgtcccaccccttcctctcccaccccctgccgcccatgaaatgggaactgagttgcccaagagttaatcacttttctgacggtttattttattcatctttggtaacaaatggctgaaatcaattaaacttgctttcccctca

SEQ ID NO: 85 - protein, 100 aa, Homo sapiens
MWGFLVLKARWLVTPVRTLATEAGQKPSLRGLLDVGNIQHRAARARGLTRGVIRVSPQERSQQNQSAPKGPTPSTRPKPRTLGPQAHSLALQSVDLLFRP

SEQ ID NO: 86 - DNA, 2053 bp, Homo sapiens
ggcactcacagcacaggcttgttatgggtctagcagcctctgtggcatctcctgtcacattgggaaaatgaagaattccaggacatgggcttggagggcgccggtggagctatttcttctctgtgctgccctgggctgtctcagtttgcctggctccagaggtgaaaggccacattcctttgggtcaaatgcagtcaacaagagctttgctaagagcagacagatgcggagtgtggatgttaccctgatgcccattgattgtgagctgtctagttggtcctcttggaccacatgtgacccctgtcagaagaaaaggtacaggtatgcctacttgctccagccctctcagttccatggggaaccgtgcaacttctctgacaaggaagtcgaagactgtgttaccaacagaccatgcggaagtcaagtgcgatgtgaaggctttgtgtgtgcacagacaggaaggtgtgtaaaccgcagacttctttgcaatggggacaatgactgtggagaccagtcagatgaagcaaactgtagaaggatttataaaaaatgtcagcatgaaatggaccaatactggggaattggcagtctggccagtgggataaatttgttcacaaacagttttgagggcccagttcttgatcacaggtattatgcaggtggatgctccccgcattacatcctgaacacgaggtttaggaagccctacaatgtggaaagctacacgccacagacccaaggcaaatacgaattcatattaaaagagtatgaatcatactcagattttgaacgcaatgtcacagagaaaatggcaagcaagtctggtttcagttttggttttaaaatacctggaatatttgaacttggcatcagtagtcaaagtgatcgaggcaaacactatattaggagaaccaaacgattctctcatactaaaagcgtatttctgcatgcacgctctgaccttgaagtagcacattacaagctgaaacccagaagcctcatgctccattacgagttccttcagagagttaagcggctgcccctggagtacagctacggggaatacagagatctcttccgtgattttgggacccactacatcacagaggctgtgcttgggggcatttatgaatacaccctcgttatgaacaaagaggccatggagagaggagattatactcttaacaacgtccatgcctgtgccaaaaatgattttaaaattggtggtgccattgaagaggtctacgtcagtctgggtgtgtctgtaggcaaatgcagaggtattctgaatgaaataaaagacagaaacaagagggacaccatggtggaggacttggtggtcctggtacgaggaggggcaagtgagcacatcaccaccctggcataccaggagctgccgacggcggacctgatgcaggagtggggagacgctgtgcagtacaacccagccatcatcaaagttaaggtggagcctctgtatgaactagtgacagccacagattttgcctattccagcacagtgaggcagaacatgaagcaggcactggaggagttccagaaggaagttagttcctgccactgtgctccctgccaaggaaatggagtccctgtcctgaaaggatcacgctgtgactgcatctgtcctgttggatcccaaggcctagcctgtgaggtctcctatcggaagaatacccccattgatgggaagtggaattgctggtcaaattggtcttcatgctctggaagacgtaagacaagacaaaggcagtgtaacaatccacctcctcaaaatgggggtagcccctgttcaggccctgcttcagaaacacttgactgctcctagcagatgatacagcagtgggctacatacaatgagagccctgagccctcaagaactcatgccagctcagccctacaccagtttccacctggagttcatgcaagggcaaaaggcagtgccatgcaagctgtttaaaataaagatgttaccttgtaaaatgcaagttgatttaaataaatactgagttaaaggcttaaaaaaaaaaaaaaaaaa

SEQ ID NO: 87 - protein, 591 aa, Homo sapiens
MKNSRTWAWRAPVELFLLCAALGCLSLPGSRGERPHSFGSNAVNKSFAKSRQMRSVDVTLMPIDCELSSWSSWTTCDPCQKKRYRYAYLLQPSQFHGEPCNFSDKEVEDCVTNRPCGSQVRCEGFVCAQTGRCVNRRLLCNGDNDCGDQSDEANCRRIYKKCQHEMDQYWGIGSLASGINLFTNSFEGPVLDHRYYAGGCSPHYILNTRFRKPYNVESYTPQTQGKYEFILKEYESYSDFERNVTEKMASKSGFSFGFKIPGIFELGISSQSDRGKHYIRRTKRFSHTKSVFLHARSDLEVAHYKLKPRSLMLHYEFLQRVKRLPLEYSYGEYRDLFRDFGTHYITEAVLGGIYEYTLVMNKEAMERGDYTLNNVHACAKNDFKIGGAIEEVYVSLGVSVGKCRGILNEIKDRNKRDTMVEDLVVLVRGGASEHITTLAYQELPTADLMQEWGDAVQYNPAIIKVKVEPLYELVTATDFAYSSTVRQNMKQALEEFQKEVSSCHCAPCQGNGVPVLKGSRCDCICPVGSQGLACEVSYRKNTPIDGKWNCWSNWSSCSGRRKTRQRQCNNPPPQNGGSPCSGPASETLDCS

SEQ ID NO: 88 - DNA, 1923 bp, Homo sapiens
cttcctcctcctggccgcttagtctcacacccgccgggccgttgttcccgagacgttgttgagtcccctgtgtcctcttctgggtggaggaactgcaatgtctggtggagaacagaaaccagagaggtactatgtgggtgtggacgttggaacaggcagtgtccgtgcagctctggtggaccagagtggggtcctgttggcttttgcagaccagccaattaagaattgggagccccagttcaaccaccatgagcagtcctccgaggacatctgggctgcgtgctgtgttgtcacaaagaaagttgtacaagggattgatttaaaccaaattcgaggacttgggtttgatgccacgtgttctctggttgttttggataagcagtttcacccattaccagtcaaccaggaaggggattcccatcgaaacgtcatcatgtggctggaccatcgagcagtcagtcaagttaacaggatcaatgagaccaagcacagtgtcctccagtacgtcgggggggtgatgtctgtggaaatgcaggccccgaaacttctgtggctgaaagagaacttgagagagatttgctgggataaggcgggacatttctttgatctcccggacttcttatcgtggaaggcaacaggtgtcacagcacggtctctctgctccctggtgtgtaagtggacatattcagcagagaaaggctgggacgacagtttctggaaaatgattggtttggaagactttgttgcagataattacagcaaaataggaaaccaagtgctacctcctggagcttctcttggaaatgggctcacaccagaggcagcaagagaccttggccttctccctgggattgcggtcgcagcttcactcattgatgcccatgcaggaggactaggagtgattggggcagatgtgagagggcacggcctcatctgtgaggggcagccagtgacgtcacggctggctgtcatctgtggaacgtcttcttgtcacatggggatcagcaaagacccgatttttgtaccaggcgtctgggggccttatttctcagccatggtacctgggttctggctgaatgaaggtggtcagagcgttactggaaaattgatagaccacatggtacaaggccatgctgcttttccagaactacaagtaaaggccacagccagatgccagagtatatatgcatatttgaacagtcacctggatctgattaagaaggctcagcctgtgggtttccttactgttgatttacatgtttggccagatttccatggcaaccggtctcccttagcagatctgacactaaagggcatggtcaccggattgaaactgtctcaggaccttgatgatcttgccattctctacctggccacagttcaagccattgctttggggactcgcttcattatagaagccatggaggcagcagggcactcaatcagtactcttttcctatgtggaggcctcagcaagaatcccctttttgtgcaaatgcatgcggacattactggcatgcctgtggtcctgtcgcaagaggtggagtccgttcttgtgggtgctgctgttctgggtgcctgtgcctcaggggatttcgcttctgtacaggaagcaatggcaaaaatgagcaaagttgggaaagttgtgttcccgagactacaggataaaaaatactatgataagaaataccaagtattcctgaagctggttgaacaccagaaggagtatttggcgatcatgaatgatgactgaacagggcttgcaggtgctgatgccagaagcttctgtgccattgcattaaagacttctgtcatttgatccatgttcaagacccttgaggtattgtttcatcatttctgtattgtctttcaataaagaaaacaaacatgtgcaaccaaaaaaaaaaaaaaaaaaaaaaaaaa

SEQ ID NO: 89 - protein, 439 aa, Homo sapiens
MWLDHRAVSQVNRINETKHSVLQYVGGVMSVEMQAPKLLWLKENLREICWDKAGHFFDLPDFLSWKATGVTARSLCSLVCKWTYSAEKGWDDSFWKMIGLEDFVADNYSKIGNQVLPPGASLGNGLTPEAARDLGLLPGIAVAASLIDAHAGGLGVIGADVRGHGLICEGQPVTSRLAVICGTSSCHMGISKDPIFVPGVWGPYFSAMVPGFWLNEGGQSVTGKLIDHMVQGHAAFPELQVKATARCQSIYAYLNSHLDLIKKAQPVGFLTVDLHVWPDFHGNRSPLADLTLKGMVTGLKLSQDLDDLAILYLATVQAIALGTRFIIEAMEAAGHSISTLFLCGGLSKNPLFVQMHADITGMPVVLSQEVESVLVGAAVLGACASGDFASVQEAMAKMSKVGKVVFPRLQDKKYYDKKYQVFLKLVEHQKEYLAIMNDD

SEQ ID NO: 90 - DNA, 4352 bp, Homo sapiens
cccgggcctcctcccgctttctctctccgcttcccctggagcctccgaggagtccgcagccgctgggcgcccgggaagatggcggcggcggcgggagacggcggcggcgaggggggcgcgggcctgggcagcgcggcggggctggggccggggccggggctgcgcgggcagggcccctcagccgaagcgcacgagggcgccccggacccgatgcccgccgcgctgcaccctgaggaggtcgccgcgcgactgcagcggatgcagcgggagctgagcaaccgcaggaaaatcctggtgaaaaacctgccccaggacagcaactgccaggaagttcatgatttgttaaaagactatgacttaaaatattgttatgtggacagaaataaacgaacagcttttgttaccttattgaatggggaacaagcccagaacgcaattcagatgtttcatcaatattcttttagaggaaaagacttaatagtccagcttcagccaacagatgctttgttgtgtattaccaacgtgcccatttcttttacatcagaagagtttgaagaacttgttcgtgcttatggaaatattgagagatgttttctggtctatagtgaagttactggccattccaaaggctatggatttgtggaatacatgaaaaaggactttgctgcaaaggctagactggagctattgggtagacagttgggagcatcagcactctttgcacaatggatggatgttaatctattggcttcagagctcattcattctaagtgcctttgtattgataaactccccagtgactacagggattcagaagagctgttgcaaattttttccagtgtccataaacctgtgttttgccagcttgcacaggatgaaggtagttacgttggtggctttgcagtggttgaatatagcactgcggagcaggctgaagaggtccagcaggcagcagacggtatgaccatcaagggcagcaaagtccaggtttccttctgtgctcctggagcgccagggcgaagtacattagcagcattgatagcggctcaacgtgtgatgcacagtaatcaaaagggcttacttccagagccaaatccagtacaaattatgaaaagtttaaacaaccctgccatgttgcaagttcttctacagccccagttatgtggacgagctgttaaaccagccgttcttggaacacctcacagcttgccacatctgatgaatccatccatctctcctgcatttttacatttgaataaagcacatcagaatctttctcatataccactggcacaacaacaattaatgaagtttgagaatattcatactaataataaacccggcttacttggagagcccccagctgtggtacttcagactgcactagggatagggtcagtgcttccattgaaaaaggagttgggacatcatcatggagaagcacataaaacatctagcctgattccaactcaaacaacgataacagctggaatgggcatgttaccattctttccaaatcagcacattgctggacaggctgggccagggcacagtaatactcaggagaaacagccagccacggtgggaatggcagaaggaaatttctcagggtcgcagccttatcttcagagctttccaaaccttgctgctggaagcttgctggtgggacaccataagcagcagcaaagccagccaaaaggcacagagataagttcaggggctgcctctaagaatcaaacttcactcttgggagaaccaccaaaagaaattcggctcagtaaaaatccatacttgaatttggcaagtgtgttgcccagtgtgtgcttatcatcccctgcaagtaaaaccactcttcataagactggaattgcaagcagcattctggatgcaatctctcagggaagtgaatcacaacacgcattggaaaagtgcattgcttattctccaccttttggtgattatgcacaggtgtcatctttaagaaatgaaaagcgaggctcatcatatctcatctctgccccagaaggtggttcagtggaatgtgttgaccagcattctcagggcacaggagcatattacatggaaacttacttaaaaaagaagcgagtatactgagttaagctctctcctaataaccccctaaggttctctgcagtatctctgctgttcatcgctgccttaacttcattcaaactagccatatcctttaaatacgggtttatagtttcccagaaggaactgtgttgtgcagcaggcagaaatgccaaataaaaaatagcaataagaagagacatcaattgaggacattttccactagagtcagatgcatcttaatcagtgtgctaacttacaatccattggagaaactaacaatgttccaatattccttgatttaggactgggaataattctgacaccatatataaaagaagtttgaagcaataaatgggaaacagtgttgtttcctgagccttagaagaatgagtttcttataagccaatgtgcatttcaatttactttccctagaagtaattgcatttatagatttttaggacttttcctagaactacaagggtgcaagtaccaaatgtgctgatggtaatattataaagatgctctacatgcacactcaattacgcccacaccagccatgcaaaattaaacccggtaagagagtgacagtgatgtccaaggtatccactactaccgatgctttaagatgttgtttaccatttataccttctgtgaaaaatagaaggtattttaagaaaagtaactttggtgatctaataaaagggtttggcaaactacaccctgggtccacatttggtctaccacccgcttttgtgctgcctgcaagctaagactaatgtttacatttttaaatggttggaggaaaaaagaaaacttatgacatgaaatttatatgaaattcagatttcagtgtccataaataaacttttattgggacgttgccatgctcattcatttacgtgttgtctgtggcactcttacgctacaagggcagaactgattagcttcaacagagactgtatggcctacaaagaccatatggcctaaaatttcaagtatctggccatttatatatagtttgctgatccctgatctaatagcactaattctaatagcaactattcctttcaattcacctaaagacagacctttagcctttagacagacttgtaagtggaaaggaacatgggtttctgtgctcatttcatagcgtagactagtaatgatctaatgactagaatggggcctattttgatcactaaatgccctatttccacaatatagtatagtaaagcagtcaatactgcactttctgatggagtcttaaggagtcacagtatttataaccattttgagctaataagctatacctcactctctgctttctctctctctctttttgatagtgtgttagggtgaaaaatcagttatttaacccaatttacttgtgaaagaagttttatctttatggactatgatgacttttgacatcaccatttcttgaagaccttggtattaaatgcatgagaaaccttttgccatctagaaatttctaagtttgtttatgttataagactgtaattaattgatagggaatttgggatctcaatccggggctttttgaaatcagatcattaaatatctcgtcactttggggacttgttatttttaactatgatgtggatatcctgttttaattatgaagtctagaattggtacatatgttgtatgctttgtaaagaatttcacttggtctaatttattgcatatactagcttctgttggaaaatgactgacagctagaaagtttaaggtaatttctaagtatactacctataagtaactgataagaattaggcatcattcagtgatatagcagatgactaatgggtttttcaggccctgcacttctctttcccattttcctgttgcattcagcctcttcaatgcttagtcacacctccactatagtacaaacaaacaaacaaacagaagaaaggaaagatggtgaattttgcaacagagctgcaaaaagtcagtcaaagcaggaagaggttgaaggaactaaaacaaacaaacaaaggtgtctggactacagcacagtggacatgccatccatactggcctgtgccccgttatcaatcactgggcacaacagtgaagaagtgcaaatcaagtggtgtttgtttgtttgtttgtagtaaggaccgtaacccaccccttcctccccccaaaactatactgttatttttctatgtaagcaaattgtttgaaatgctttgaaaatgaaatcttaatattaaaaggcatatgcatgt

SEQ ID NO: 91 - protein, 678 aa, Homo sapiens
MAAAAGDGGGEGGAGLGSAAGLGPGPGLRGQGPSAEAHEGAPDPMPAALHPEEVAARLQRMQRELSNRRKILVKNLPQDSNCQEVHDLLKDYDLKYCYVDRNKRTAFVTLLNGEQAQNAIQMFHQYSFRGKDLIVQLQPTDALLCITNVPISFTSEEFEELVRAYGNIERCFLVYSEVTGHSKGYGFVEYMKKDFAAKARLELLGRQLGASALFAQWMDVNLLASELIHSKCLCIDKLPSDYRDSEELLQIFSSVHKPVFCQLAQDEGSYVGGFAVVEYSTAEQAEEVQQAADGMTIKGSKVQVSFCAPGAPGRSTLAALIAAQRVMHSNQKGLLPEPNPVQIMKSLNNPAMLQVLLQPQLCGRAVKPAVLGTPHSLPHLMNPSISPAFLHLNKAHQNLSHIPLAQQQLMKFENIHTNNKPGLLGEPPAVVLQTALGIGSVLPLKKELGHHHGEAHKTSSLIPTQTTITAGMGMLPFFPNQHIAGQAGPGHSNTQEKQPATVGMAEGNFSGSQPYLQSFPNLAAGSLLVGHHKQQQSQPKGTEISSGAASKNQTSLLGEPPKEIRLSKNPYLNLASVLPSVCLSSPASKTTLHKTGIASSILDAISQGSESQHALEKCIAYSPPFGDYAQVSSLRNEKRGSSYLISAPEGGSVECVDQHSQGTGAYYMETYLKKKRVY

SEQ ID NO: 92 - DNA, 5053 bp, Homo sapiens
tgcagacagtgcgggcctgcgcccagtcccggctgtcctcgccgcgacccctcctcagccctgggcgcgcgcacgctggggccccgcggggctggccgcctagcgagcctgccggtcgaccccagccagcgcagcgacggggcgctgcctggcccaggcgcacacggaagtgcgcttctctgaagtagctttggaaagtagagaagaaaatccagtttgcttcttggagaacactggacagctgaataaatgcagtatctaaatataaaagaggactgcaatgccatggctttctgtgctaaaatgaggagctccaagaagactgaggtgaacctggaggcccctgagccaggggtggaagtgatcttctatctgtcggacagggagcccctccggctgggcagtggagagtacacagcagaggaactgtgcatcagggctgcacaggcatgccgtatctctcctctttgtcacaacctctttgccctgtatgacgagaacaccaagctctggtatgctccaaatcgcaccatcaccgttgatgacaagatgtccctccggctccactaccggatgaggttctatttcaccaattggcatggaaccaacgacaatgagcagtcagtgtggcgtcattctccaaagaagcagaaaaatggctacgagaaaaaaaagattccagatgcaacccctctccttgatgccagctcactggagtatctgtttgctcagggacagtatgatttggtgaaatgcctggctcctattcgagaccccaagaccgagcaggatggacatgatattgagaacgagtgtctagggatggctgtcctggccatctcacactatgccatgatgaagaagatgcagttgccagaactgcccaaggacatcagctacaagcgatatattccagaaacattgaataagtccatcagacagaggaaccttctcaccaggatgcggataaataatgttttcaaggatttcctaaaggaatttaacaacaagaccatttgtgacagcagcgtgtccacgcatgacctgaaggtgaaatacttggctaccttggaaactttgacaaaacattacggtgctgaaatatttgagacttccatgttactgatttcatcagaaaatgagatgaattggtttcattcgaatgacggtggaaacgttctctactacgaagtgatggtgactgggaatcttggaatccagtggaggcataaaccaaatgttgtttctgttgaaaaggaaaaaaataaactgaagcggaaaaaactggaaaataaacacaagaaggatgaggagaaaaacaagatccgggaagagtggaacaatttttcttacttccctgaaatcactcacattgtaataaaggagtctgtggtcagcattaacaagcaggacaacaagaaaatggaactgaagctctcttcccacgaggaggccttgtcctttgtgtccctggtagatggctacttccggctcacagcagatgcccatcattacctctgcaccgacgtggcccccccgttgatcgtccacaacatacagaatggctgtcatggtccaatctgtacagaatacgccatcaataaattgcggcaagaaggaagcgaggaggggatgtacgtgctgaggtggagctgcaccgactttgacaacatcctcatgaccgtcacctgctttgagaagtctgagcaggtgcagggtgcccagaagcagttcaagaactttcagatcgaggtgcagaagggccgctacagtctgcacggttcggaccgcagcttccccagcttgggagacctcatgagccacctcaagaagcagatcctgcgcacggataacatcagcttcatgctaaaacgctgctgccagcccaagccccgagaaatctccaacctgctggtggctactaagaaagcccaggagtggcagcccgtctaccccatgagccagctgagtttcgatcggatcctcaagaaggatctggtgcagggcgagcaccttgggagaggcacgagaacacacatctattctgggaccctgatggattacaaggatgacgaaggaacttctgaagagaagaagataaaagtgatcctcaaagtcttagaccccagccacagggatatttccctggccttcttcgaggcagccagcatgatgagacaggtctcccacaaacacatcgtgtacctctatggcgtctgtgtccgcgacgtggagaatatcatggtggaagagtttgtggaagggggtcctctggatctcttcatgcaccggaaaagcgatgtccttaccacaccatggaaattcaaagttgccaaacagctggccagtgccctgagctacttggaggataaagacctggtccatggaaatgtgtgtactaaaaacctcctcctggcccgtgagggcatcgacagtgagtgtggcccattcatcaagctcagtgaccccggcatccccattacggtgctgtctaggcaagaatgcattgaacgaatcccatggattgctcctgagtgtgttgaggactccaagaacctgagtgtggctgctgacaagtggagctttggaaccacgctctgggaaatctgctacaatggcgagatccccttgaaagacaagacgctgattgagaaagagagattctatgaaagccggtgcaggccagtgacaccatcatgtaaggagctggctgacctcatgacccgctgcatgaactatgaccccaatcagaggcctttcttccgagccatcatgagagacattaataagcttgaagagcagaatccagatattgtttcagaaaaaaaaccagcaactgaagtggaccccacacattttgaaaagcgcttcctaaagaggatccgtgacttgggagagggccactttgggaaggttgagctctgcaggtatgaccccgaaggggacaatacaggggagcaggtggctgttaaatctctgaagcctgagagtggaggtaaccacatagctgatctgaaaaaggaaatcgagatcttaaggaacctctatcatgagaacattgtgaagtacaaaggaatctgcacagaagacggaggaaatggtattaagctcatcatggaatttctgccttcgggaagccttaaggaatatcttccaaagaataagaacaaaataaacctcaaacagcagctaaaatatgccgttcagatttgtaaggggatggactatttgggttctcggcaatacgttcaccgggacttggcagcaagaaatgtccttgttgagagtgaacaccaagtgaaaattggagacttcggtttaaccaaagcaattgaaaccgataaggagtattacaccgtcaaggatgaccgggacagccctgtgttttggtatgctccagaatgtttaatgcaatctaaattttatattgcctctgacgtctggtcttttggagtcactctgcatgagctgctgacttactgtgattcagattctagtcccatggctttgttcctgaaaatgataggcccaacccatggccagatgacagtcacaagacttgtgaatacgttaaaagaaggaaaacgcctgccgtgcccacctaactgtccagatgaggtttatcaacttatgaggaaatgctgggaattccaaccatccaatcggacaagctttcagaaccttattgaaggatttgaagcacttttaaaataagaagcatgaataacatttaaattccacagattatcaagtccttctcctgcaacaaatgcccaagtcattttttaaaaatttctaatgaaagaagtttgtgttctgtccaaaaagtcactgaactcatacttcagtacatatacatgtataaggcacactgtagtgcttaatatgtgtaaggacttcctctttaaatttggtaccagtaacttagtgacacataatgacaaccaaaatatttgaaagcacttaagcactcctccttgtggaaagaatataccaccatttcatctggctagttcaccatcacaactgcattaccaaaaggggatttttgaaaacgaggagttgaccaaaataatatctgaagatgattgcttttccctgctgccagctgatctgaaatgttttgctggcacattaatcatagataaagaaagattgatggacttagccctcaaatttcagtatctatacagtactagaccatgcattcttaaaatattagataccaggtagtatatattgtttctgtacaaaaatgactgtattctctcaccagtaggacttaaactttgtttctccagtggcttagctcctgttcctttgggtgatcactagcacccatttttgagaaagctggttctacatggggggatagctgtggaatagataatttgctgcatgttaattctcaagaactaagcctgtgccagtgctttcctaagcagtatacctttaatcagaactcattcccagaacctggatgctattacacatgcttttaagaaacgtcaatgtatatccttttataactctaccactttggggcaagctattccagcactggttttgaatgctgtatgcaaccagtctgaataccacatacgctgcactgttcttagagggtttccatacttaccaccgatctacaagggttgatccctgtttttaccatcaatcatcaccctgtggtgcaacacttgaaagacccggctagaggcactatggacttcaggatccactagacagttttcagtttgcttggaggtagctgggtaatcaaaaatgtttagtcattgattcaatgtgaacgattacggtctttatgaccaagagtctgaaaatctttttgttatgctgtttagtattcgtttgatattgttacttttcacctgttgagcccaaattcaggattggttcagtggcagcaatgaagttgccatttaaatttgttcatagcctacatcaccaaggtctctgtgtcaaacctgtggccactctatatgcactttgtttactctttatacaaataaatatactaaagactttacatgca

SEQ ID NO: 93 - protein, 1154 aa, Homo sapiens
MQYLNIKEDCNAMAFCAKMRSSKKTEVNLEAPEPGVEVIFYLSDREPLRLGSGEYTAEELCIRAAQACRISPLCHNLFALYDENTKLWYAPNRTITVDDKMSLRLHYRMRFYFTNWHGTNDNEQSVWRHSPKKQKNGYEKKKIPDATPLLDASSLEYLFAQGQYDLVKCLAPIRDPKTEQDGHDIENECLGMAVLAISHYAMMKKMQLPELPKDISYKRYIPETLNKSIRQRNLLTRMRINNVFKDFLKEFNNKTICDSSVSTHDLKVKYLATLETLTKHYGAEIFETSMLLISSENEMNWFHSNDGGNVLYYEVMVTGNLGIQWRHKPNVVSVEKEKNKLKRKKLENKHKKDEEKNKIREEWNNFSYFPEITHIVIKESVVSINKQDNKKMELKLSSHEEALSFVSLVDGYFRLTADAHHYLCTDVAPPLIVHNIQNGCHGPICTEYAINKLRQEGSEEGMYVLRWSCTDFDNILMTVTCFEKSEQVQGAQKQFKNFQIEVQKGRYSLHGSDRSFPSLGDLMSHLKKQILRTDNISFMLKRCCQPKPREISNLLVATKKAQEWQPVYPMSQLSFDRILKKDLVQGEHLGRGTRTHIYSGTLMDYKDDEGTSEEKKIKVILKVLDPSHRDISLAFFEAASMMRQVSHKHIVYLYGVCVRDVENIMVEEFVEGGPLDLFMHRKSDVLTTPWKFKVAKQLASALSYLEDKDLVHGNVCTKNLLLAREGIDSECGPFIKLSDPGIPITVLSRQECIERIPWIAPECVEDSKNLSVAADKWSFGTTLWEICYNGEIPLKDKTLIEKERFYESRCRPVTPSCKELADLMTRCMNYDPNQRPFFRAIMRDINKLEEQNPDIVSEKKPATEVDPTHFEKRFLKRIRDLGEGHFGKVELCRYDPEGDNTGEQVAVKSLKPESGGNHIADLKKEIEILRNLYHENIVKYKGICTEDGGNGIKLIMEFLPSGSLKEYLPKNKNKINLKQQLKYAVQICKGMDYLGSRQYVHRDLAARNVLVESEHQVKIGDFGLTKAIETDKEYYTVKDDRDSPVFWYAPECLMQSKFYIASDVWSFGVTLHELLTYCDSDSSPMALFLKMIGPTHGQMTVTRLVNTLKEGKRLPCPPNCPDEVYQLMRKCWEFQPSNRTSFQNLIEGFEALLK

SEQ ID NO: 94 - DNA, 3882 bp, Homo sapiens
cacataccctaaagaaccctgggatgactaaggcagagagagtctgagaaaactctttggtgcttctgcctttagttttaggacacatttatgcagatgagcttataagagaccgttccctccgccttcttcctcagaggaagtttcttggtagatcaccgacacctcatccaggcggggggttggggggaaacttggcaccagccatcccaggcagagcaccactgtgatttgttctcctggtggagagagctggaaggaaggagccagcgtgcaaataatgaaggagcacgggggcaccttcagtagcaccggaatcagcggtggtagcggtgactctgctatggacagcctgcagccgctccagcctaactacatgcctgtgtgtttgtttgcagaagaatcttatcaaaaattagcaatggaaacgctggaggaattagactggtgtttagaccagctagagaccatacagacctaccggtctgtcagtgagatggcttctaacaagttcaaaagaatgctgaaccgggagctgacacacctctcagagatgagccgatcagggaaccaggtgtctgaatacatttcaaatactttcttagacaagcagaatgatgtggagatcccatctcctacccagaaagacagggagaaaaagaaaaagcagcagctcatgacccagataagtggagtgaagaaattaatgcatagttcaagcctaaacaatacaagcatctcacgctttggagtcaacactgaaaatgaagatcacctggccaaggagctggaagacctgaacaaatggggtcttaacatctttaatgtggctggatattctcacaatagacccctaacatgcatcatgtatgctatattccaggaaagagacctcctaaagacattcagaatctcatctgacacatttataacctacatgatgactttagaagaccattaccattctgacgtggcatatcacaacagcctgcacgctgctgatgtagcccagtcgacccatgttctcctttctacaccagcattagacgctgtcttcacagatttggagatcctggctgccatttttgcagctgccatccatgacgttgatcatcctggagtctccaatcagtttctcatcaacacaaattcagaacttgctttgatgtataatgatgaatctgtgttggaaaatcatcaccttgctgtgggtttcaaactgctgcaagaagaacactgtgacatcttcatgaatctcaccaagaagcagcgtcagacactcaggaagatggttattgacatggtgttagcaactgatatgtctaaacatatgagcctgctggcagacctgaagacaatggtagaaacgaagaaagttacaagttcaggcgttcttctcctagacaactataccgatcgcattcaggtccttcgcaacatggtacactgtgcagacctgagcaaccccaccaagtccttggaattgtatcggcaatggacagaccgcatcatggaggaatttttccagcagggagacaaagagcgggagaggggaatggaaattagcccaatgtgtgataaacacacagcttctgtggaaaaatcccaggttggtttcatcgactacattgtccatccattgtgggagacatgggcagatttggtacagcctgatgctcaggacattctcgataccttagaagataacaggaactggtatcagagcatgatacctcaaagtccctcaccaccactggacgagcagaacagggactgccagggtctgatggagaagtttcagtttgaactgactctcgatgaggaagattctgaaggacctgagaaggagggagagggacacagctatttcagcagcacaaagacgctttgtgtgattgatccagaaaacagagattccctgggagagactgacatagacattgcaacagaagacaagtcccccgtggatacataatccccctctccctgtggagatgaacattctatccttgatgagcatgccagctatgtggtagggccagcccaccatgggggccaagacctgcacaggacaagggccacctggcctttcagttacttgagtttggagtcagaaagcaagaccaggaagcaaatagcagctcaggaaatcccacggttgacttgccttgatggcaagcttggtggagagggctgaagctgttgctgggggccgattctgatcaagacacatggcttgaaaatggaagacacaaaactgagagatcattctgcactaagtttcgggaacttatccccgacagtgactgaactcactgactaataacttcatttatgaatcttctcacttgtccctttgtctgccaacctgtgtgccttttttgtaaaacattttcatgtctttaaaatgcctgttgaatacctggagtttagtatcaacttctacacagataagctttcaaagttgacaaacttttttgactctttctggaaaagggaaagaaaatagtcttccttctttcttgggcaatatccttcactttactacagttacttttgcaaacagacagaaaggatacacttctaaccacattttacttccttcccctgttgtccagtccaactccacagtcactcttaaaacttctctctgtttgcctgcctccaacagtacttttaactttttgctgtaaacagaataaaattgaacaaattagggggtagaaaggagcagtggtgtcgttcaccgtgagagtctgcatagaactcagcagtgtgccctgctgtgtcttggaccctgccccccacaggagttgtacagtccctggccctgttccctacctcctctcttcaccccgttaggctgttttcaatgtaatgctgccgtccttctcttgcactgccttctgcgctaacacctccattcctgtttataaccgtgtatttattacttaatgtatataatgtaatgttttgtaagttattaatttatatatctaacattgcctgccaatggtggtgttaaatttgtgtagaaaactctgcctaagagttacgactttttcttgtaatgttttgtattgtgtattatataacccaaacgtcacttagtagagacatatggcccccttggcagagaggacaggggtgggcttttgttcaaagggtctgccctttccctgcctgagttgctacttctgcacaacccctttatgaaccagttttggaaacaatattctcacattagatactaaatggtttatactgagcttttacttttgtatagcttgataggggcagggggcaatgggatgtagtttttacccaggttctatccaaatctatgtgggcatgagttgggttataactggatcctactatcattgtggctttggttcaaaaggaaacactacatttgctcacagatgattcttctgaatgctcccgaactactgactttgaagaggtagcctcctgcctgccattaagcaggaatgtcatgttccagttcattacaaaagaaaacaataaaacaatgtgaatttttataataaaatgtgaactgatgtagcaaattacgcaaatgtgaagcctcttctgataacacttgttaggcctcttactgatgtcagtttcagtttgtaaaatatgtttcatgctttcagttcagcattgtgactcagtaattacagaaaatggcacaaatgtgcatgaccaatgtatgtctatgaacactgcattgtttcaggtggacattttatcattttcaaatgtttctcacaatgtatgttatagtattattattatatattgtgttcaaatgcattctaaagagacttttatatgaggtgaataaagaaaagcatgattagattaaaaaaa

SEQ ID NO: 95 - protein, 564 aa, Homo sapiens
MKEHGGTFSSTGISGGSGDSAMDSLQPLQPNYMPVCLFAEESYQKLAMETLEELDWCLDQLETIQTYRSVSEMASNKFKRMLNRELTHLSEMSRSGNQVSEYISNTFLDKQNDVEIPSPTQKDREKKKKQQLMTQISGVKKLMHSSSLNNTSISRFGVNTENEDHLAKELEDLNKWGLNIFNVAGYSHNRPLTCIMYAIFQERDLLKTFRISSDTFITYMMTLEDHYHSDVAYHNSLHAADVAQSTHVLLSTPALDAVFTDLEILAAIFAAAIHDVDHPGVSNQFLINTNSELALMYNDESVLENHHLAVGFKLLQEEHCDIFMNLTKKQRQTLRKMVIDMVLATDMSKHMSLLADLKTMVETKKVTSSGVLLLDNYTDRIQVLRNMVHCADLSNPTKSLELYRQWTDRIMEEFFQQGDKERERGMEISPMCDKHTASVEKSQVGFIDYIVHPLWETWADLVQPDAQDILDTLEDNRNWYQSMIPQSPSPPLDEQNRDCQGLMEKFQFELTLDEEDSEGPEKEGEGHSYFSSTKTLCVIDPENRDSLGETDIDIATEDKSPVDT

SEQ ID NO: 96 - DNA, 4273 bp, Homo sapiens
aaagctccttgtgacagcctgacttgctattcttcgagtatgctgctcttgctctaagacgctcatacattggagtcacagcttcgtaaattaaactggaaatagtttgcagacttatcagtcttctgacctgcagcagtgtctctgctatgtttgagatttttgttttggatggtgaaagctagcactccttacaagacatgacagcaaaagattcttcaaaggaacttactgcttctgaacctgaggtttgcataaagactttcaaggagcaaatgcatttagaacttgagcttccgagattaccaggaaacagacctacatctcctaaaatttctccacgcagttcaccaaggaactcaccatgctttttcagaaagttgctggtgaataaaagcattcggcagcgtcgtcgcttcactgtggctcatacatgctttgatgtggaaaatggcccttccccaggtcggagtccactggatccccaggccagctcttccgctgggctggtacttcacgccacctttcctgggcacagccagcgcagagagtcatttctctacagatcagacagcgactatgacttgtcaccaaaggcgatgtcgagaaactcttctcttccaagcgagcaacacggcgatgacttgattgtaactccttttgcccaggtccttgccagcttgcgaagtgtgagaaacaacttcactatactgacaaaccttcatggtacatctaacaagaggtccccagctgctagtcagcctcctgtctccagagtcaacccacaagaagaatcttatcaaaaattagcaatggaaacgctggaggaattagactggtgtttagaccagctagagaccatacagacctaccggtctgtcagtgagatggcttctaacaagttcaaaagaatgctgaaccgggagctgacacacctctcagagatgagccgatcagggaaccaggtgtctgaatacatttcaaatactttcttagacaagcagaatgatgtggagatcccatctcctacccagaaagacagggagaaaaagaaaaagcagcagctcatgacccagataagtggagtgaagaaattaatgcatagttcaagcctaaacaatacaagcatctcacgctttggagtcaacactgaaaatgaagatcacctggccaaggagctggaagacctgaacaaatggggtcttaacatctttaatgtggctggatattctcacaatagacccctaacatgcatcatgtatgctatattccaggaaagagacctcctaaagacattcagaatctcatctgacacatttataacctacatgatgactttagaagaccattaccattctgacgtggcatatcacaacagcctgcacgctgctgatgtagcccagtcgacccatgttctcctttctacaccagcattagacgctgtcttcacagatttggagatcctggctgccatttttgcagctgccatccatgacgttgatcatcctggagtctccaatcagtttctcatcaacacaaattcagaacttgctttgatgtataatgatgaatctgtgttggaaaatcatcaccttgctgtgggtttcaaactgctgcaagaagaacactgtgacatcttcatgaatctcaccaagaagcagcgtcagacactcaggaagatggttattgacatggtgttagcaactgatatgtctaaacatatgagcctgctggcagacctgaagacaatggtagaaacgaagaaagttacaagttcaggcgttcttctcctagacaactataccgatcgcattcaggtccttcgcaacatggtacactgtgcagacctgagcaaccccaccaagtccttggaattgtatcggcaatggacagaccgcatcatggaggaatttttccagcagggagacaaagagcgggagaggggaatggaaattagcccaatgtgtgataaacacacagcttctgtggaaaaatcccaggttggtttcatcgactacattgtccatccattgtgggagacatgggcagatttggtacagcctgatgctcaggacattctcgataccttagaagataacaggaactggtatcagagcatgatacctcaaagtccctcaccaccactggacgagcagaacagggactgccagggtctgatggagaagtttcagtttgaactgactctcgatgaggaagattctgaaggacctgagaaggagggagagggacacagctatttcagcagcacaaagacgctttgtgtgattgatccagaaaacagagattccctgggagagactgacatagacattgcaacagaagacaagtcccccgtggatacataatccccctctccctgtggagatgaacattctatccttgatgagcatgccagctatgtggtagggccagcccaccatgggggccaagacctgcacaggacaagggccacctggcctttcagttacttgagtttggagtcagaaagcaagaccaggaagcaaatagcagctcaggaaatcccacggttgacttgccttgatggcaagcttggtggagagggctgaagctgttgctgggggccgattctgatcaagacacatggcttgaaaatggaagacacaaaactgagagatcattctgcactaagtttcgggaacttatccccgacagtgactgaactcactgactaataacttcatttatgaatcttctcacttgtccctttgtctgccaacctgtgtgccttttttgtaaaacattttcatgtctttaaaatgcctgttgaatacctggagtttagtatcaacttctacacagataagctttcaaagttgacaaacttttttgactctttctggaaaagggaaagaaaatagtcttccttctttcttgggcaatatccttcactttactacagttacttttgcaaacagacagaaaggatacacttctaaccacattttacttccttcccctgttgtccagtccaactccacagtcactcttaaaacttctctctgtttgcctgcctccaacagtacttttaactttttgctgtaaacagaataaaattgaacaaattagggggtagaaaggagcagtggtgtcgttcaccgtgagagtctgcatagaactcagcagtgtgccctgctgtgtcttggaccctgccccccacaggagttgtacagtccctggccctgttccctacctcctctcttcaccccgttaggctgttttcaatgtaatgctgccgtccttctcttgcactgccttctgcgctaacacctccattcctgtttataaccgtgtatttattacttaatgtatataatgtaatgttttgtaagttattaatttatatatctaacattgcctgccaatggtggtgttaaatttgtgtagaaaactctgcctaagagttacgactttttcttgtaatgttttgtattgtgtattatataacccaaacgtcacttagtagagacatatggcccccttggcagagaggacaggggtgggcttttgttcaaagggtctgccctttccctgcctgagttgctacttctgcacaacccctttatgaaccagttttggaaacaatattctcacattagatactaaatggtttatactgagcttttacttttgtatagcttgataggggcagggggcaatgggatgtagtttttacccaggttctatccaaatctatgtgggcatgagttgggttataactggatcctactatcattgtggctttggttcaaaaggaaacactacatttgctcacagatgattcttctgaatgctcccgaactactgactttgaagaggtagcctcctgcctgccattaagcaggaatgtcatgttccagttcattacaaaagaaaacaataaaacaatgtgaatttttataataaaatgtgaactgatgtagcaaattacgcaaatgtgaagcctcttctgataacacttgttaggcctcttactgatgtcagtttcagtttgtaaaatatgtttcatgctttcagttcagcattgtgactcagtaattacagaaaatggcacaaatgtgcatgaccaatgtatgtctatgaacactgcattgtttcaggtggacattttatcattttcaaatgtttctcacaatgtatgttatagtattattattatatattgtgttcaaatgcattctaaagagacttttatatgaggtgaataaagaaaagcatgattagattaaaaaaa

SEQ ID NO: 97 - protein, 721 aa, Homo sapiens
MTAKDSSKELTASEPEVCIKTFKEQMHLELELPRLPGNRPTSPKISPRSSPRNSPCFFRKLLVNKSIRQRRRFTVAHTCFDVENGPSPGRSPLDPQASSSAGLVLHATFPGHSQRRESFLYRSDSDYDLSPKAMSRNSSLPSEQHGDDLIVTPFAQVLASLRSVRNNFTILTNLHGTSNKRSPAASQPPVSRVNPQEESYQKLAMETLEELDWCLDQLETIQTYRSVSEMASNKFKRMLNRELTHLSEMSRSGNQVSEYISNTFLDKQNDVEIPSPTQKDREKKKKQQLMTQISGVKKLMHSSSLNNTSISRFGVNTENEDHLAKELEDLNKWGLNIFNVAGYSHNRPLTCIMYAIFQERDLLKTFRISSDTFITYMMTLEDHYHSDVAYHNSLHAADVAQSTHVLLSTPALDAVFTDLEILAAIFAAAIHDVDHPGVSNQFLINTNSELALMYNDESVLENHHLAVGFKLLQEEHCDIFMNLTKKQRQTLRKMVIDMVLATDMSKHMSLLADLKTMVETKKVTSSGVLLLDNYTDRIQVLRNMVHCADLSNPTKSLELYRQWTDRIMEEFFQQGDKERERGMEISPMCDKHTASVEKSQVGFIDYIVHPLWETWADLVQPDAQDILDTLEDNRNWYQSMIPQSPSPPLDEQNRDCQGLMEKFQFELTLDEEDSEGPEKEGEGHSYFSSTKTLCVIDPENRDSLGETDIDIATEDKSPVDT

SEQ ID NO: 98 - DNA, 4309 bp, Homo sapiens
gtgcgtaatccttcagctctggtggtaagggagatgcagtgagctcccggctgggagagagggttattttgcaaaactcccctggtaccgtgcccgcggaatattgcaggaggtctgtgaggtattaaaaagtgtcagcaaactgcattgaataacagacatcctaagaggggatattttccacctctataatgaagaaaagcaggagtgtgatgacggtgatggctgatgataatgttaaagattattttgaatgtagcttgagtaaatcctacagttcttccagtaacacacttgggatcgacctctggagagggagaaggtgttgctcaggaaacttacagttaccaccactgtctcaaagacagagtgaaagggcaaggactcctgagggagatggtatttccaggccgaccacactgcctttgacaacgcttccaagcattgctattacaactgtaagccaggagtgctttgatgtggaaaatggcccttccccaggtcggagtccactggatccccaggccagctcttccgctgggctggtacttcacgccacctttcctgggcacagccagcgcagagagtcatttctctacagatcagacagcgactatgacttgtcaccaaaggcgatgtcgagaaactcttctcttccaagcgagcaacacggcgatgacttgattgtaactccttttgcccaggtccttgccagcttgcgaagtgtgagaaacaacttcactatactgacaaaccttcatggtacatctaacaagaggtccccagctgctagtcagcctcctgtctccagagtcaacccacaagaagaatcttatcaaaaattagcaatggaaacgctggaggaattagactggtgtttagaccagctagagaccatacagacctaccggtctgtcagtgagatggcttctaacaagttcaaaagaatgctgaaccgggagctgacacacctctcagagatgagccgatcagggaaccaggtgtctgaatacatttcaaatactttcttagacaagcagaatgatgtggagatcccatctcctacccagaaagacagggagaaaaagaaaaagcagcagctcatgacccagataagtggagtgaagaaattaatgcatagttcaagcctaaacaatacaagcatctcacgctttggagtcaacactgaaaatgaagatcacctggccaaggagctggaagacctgaacaaatggggtcttaacatctttaatgtggctggatattctcacaatagacccctaacatgcatcatgtatgctatattccaggaaagagacctcctaaagacattcagaatctcatctgacacatttataacctacatgatgactttagaagaccattaccattctgacgtggcatatcacaacagcctgcacgctgctgatgtagcccagtcgacccatgttctcctttctacaccagcattagacgctgtcttcacagatttggagatcctggctgccatttttgcagctgccatccatgacgttgatcatcctggagtctccaatcagtttctcatcaacacaaattcagaacttgctttgatgtataatgatgaatctgtgttggaaaatcatcaccttgctgtgggtttcaaactgctgcaagaagaacactgtgacatcttcatgaatctcaccaagaagcagcgtcagacactcaggaagatggttattgacatggtgttagcaactgatatgtctaaacatatgagcctgctggcagacctgaagacaatggtagaaacgaagaaagttacaagttcaggcgttcttctcctagacaactataccgatcgcattcaggtccttcgcaacatggtacactgtgcagacctgagcaaccccaccaagtccttggaattgtatcggcaatggacagaccgcatcatggaggaatttttccagcagggagacaaagagcgggagaggggaatggaaattagcccaatgtgtgataaacacacagcttctgtggaaaaatcccaggttggtttcatcgactacattgtccatccattgtgggagacatgggcagatttggtacagcctgatgctcaggacattctcgataccttagaagataacaggaactggtatcagagcatgatacctcaaagtccctcaccaccactggacgagcagaacagggactgccagggtctgatggagaagtttcagtttgaactgactctcgatgaggaagattctgaaggacctgagaaggagggagagggacacagctatttcagcagcacaaagacgctttgtgtgattgatccagaaaacagagattccctgggagagactgacatagacattgcaacagaagacaagtcccccgtggatacataatccccctctccctgtggagatgaacattctatccttgatgagcatgccagctatgtggtagggccagcccaccatgggggccaagacctgcacaggacaagggccacctggcctttcagttacttgagtttggagtcagaaagcaagaccaggaagcaaatagcagctcaggaaatcccacggttgacttgccttgatggcaagcttggtggagagggctgaagctgttgctgggggccgattctgatcaagacacatggcttgaaaatggaagacacaaaactgagagatcattctgcactaagtttcgggaacttatccccgacagtgactgaactcactgactaataacttcatttatgaatcttctcacttgtccctttgtctgccaacctgtgtgccttttttgtaaaacattttcatgtctttaaaatgcctgttgaatacctggagtttagtatcaacttctacacagataagctttcaaagttgacaaacttttttgactctttctggaaaagggaaagaaaatagtcttccttctttcttgggcaatatccttcactttactacagttacttttgcaaacagacagaaaggatacacttctaaccacattttacttccttcccctgttgtccagtccaactccacagtcactcttaaaacttctctctgtttgcctgcctccaacagtacttttaactttttgctgtaaacagaataaaattgaacaaattagggggtagaaaggagcagtggtgtcgttcaccgtgagagtctgcatagaactcagcagtgtgccctgctgtgtcttggaccctgccccccacaggagttgtacagtccctggccctgttccctacctcctctcttcaccccgttaggctgttttcaatgtaatgctgccgtccttctcttgcactgccttctgcgctaacacctccattcctgtttataaccgtgtatttattacttaatgtatataatgtaatgttttgtaagttattaatttatatatctaacattgcctgccaatggtggtgttaaatttgtgtagaaaactctgcctaagagttacgactttttcttgtaatgttttgtattgtgtattatataacccaaacgtcacttagtagagacatatggcccccttggcagagaggacaggggtgggcttttgttcaaagggtctgccctttccctgcctgagttgctacttctgcacaacccctttatgaaccagttttggaaacaatattctcacattagatactaaatggtttatactgagcttttacttttgtatagcttgataggggcagggggcaatgggatgtagtttttacccaggttctatccaaatctatgtgggcatgagttgggttataactggatcctactatcattgtggctttggttcaaaaggaaacactacatttgctcacagatgattcttctgaatgctcccgaactactgactttgaagaggtagcctcctgcctgccattaagcaggaatgtcatgttccagttcattacaaaagaaaacaataaaacaatgtgaatttttataataaaatgtgaactgatgtagcaaattacgcaaatgtgaagcctcttctgataacacttgttaggcctcttactgatgtcagtttcagtttgtaaaatatgtttcatgctttcagttcagcattgtgactcagtaattacagaaaatggcacaaatgtgcatgaccaatgtatgtctatgaacactgcattgtttcaggtggacattttatcattttcaaatgtttctcacaatgtatgttatagtattattattatatattgtgttcaaatgcattctaaagagacttttatatgaggtgaataaagaaaagcatgattagattaaaaaaa

SEQ ID NO: 99 - protein, 736 aa, Homo sapiens
MKKSRSVMTVMADDNVKDYFECSLSKSYSSSSNTLGIDLWRGRRCCSGNLQLPPLSQRQSERARTPEGDGISRPTTLPLTTLPSIAITTVSQECFDVENGPSPGRSPLDPQASSSAGLVLHATFPGHSQRRESFLYRSDSDYDLSPKAMSRNSSLPSEQHGDDLIVTPFAQVLASLRSVRNNFTILTNLHGTSNKRSPAASQPPVSRVNPQEESYQKLAMETLEELDWCLDQLETIQTYRSVSEMASNKFKRMLNRELTHLSEMSRSGNQVSEYISNTFLDKQNDVEIPSPTQKDREKKKKQQLMTQISGVKKLMHSSSLNNTSISRFGVNTENEDHLAKELEDLNKWGLNIFNVAGYSHNRPLTCIMYAIFQERDLLKTFRISSDTFITYMMTLEDHYHSDVAYHNSLHAADVAQSTHVLLSTPALDAVFTDLEILAAIFAAAIHDVDHPGVSNQFLINTNSELALMYNDESVLENHHLAVGFKLLQEEHCDIFMNLTKKQRQTLRKMVIDMVLATDMSKHMSLLADLKTMVETKKVTSSGVLLLDNYTDRIQVLRNMVHCADLSNPTKSLELYRQWTDRIMEEFFQQGDKERERGMEISPMCDKHTASVEKSQVGFIDYIVHPLWETWADLVQPDAQDILDTLEDNRNWYQSMIPQSPSPPLDEQNRDCQGLMEKFQFELTLDEEDSEGPEKEGEGHSYFSSTKTLCVIDPENRDSLGETDIDIATEDKSPVDT

SEQ ID NO: 100 - DNA, 4264 bp, Homo sapiens
agagcgctgcggccgcggcggtgcagcagaggcgcctcgggcaggaggagggcggcttctgcgagggcagcctgaggtattaaaaagtgtcagcaaactgcattgaataacagacatcctaagaggggatattttccacctctataatgaagaaaagcaggagtgtgatgacggtgatggctgatgataatgttaaagattattttgaatgtagcttgagtaaatcctacagttcttccagtaacacacttgggatcgacctctggagagggagaaggtgttgctcaggaaacttacagttaccaccactgtctcaaagacagagtgaaagggcaaggactcctgagggagatggtatttccaggccgaccacactgcctttgacaacgcttccaagcattgctattacaactgtaagccaggagtgctttgatgtggaaaatggcccttccccaggtcggagtccactggatccccaggccagctcttccgctgggctggtacttcacgccacctttcctgggcacagccagcgcagagagtcatttctctacagatcagacagcgactatgacttgtcaccaaaggcgatgtcgagaaactcttctcttccaagcgagcaacacggcgatgacttgattgtaactccttttgcccaggtccttgccagcttgcgaagtgtgagaaacaacttcactatactgacaaaccttcatggtacatctaacaagaggtccccagctgctagtcagcctcctgtctccagagtcaacccacaagaagaatcttatcaaaaattagcaatggaaacgctggaggaattagactggtgtttagaccagctagagaccatacagacctaccggtctgtcagtgagatggcttctaacaagttcaaaagaatgctgaaccgggagctgacacacctctcagagatgagccgatcagggaaccaggtgtctgaatacatttcaaatactttcttagacaagcagaatgatgtggagatcccatctcctacccagaaagacagggagaaaaagaaaaagcagcagctcatgacccagataagtggagtgaagaaattaatgcatagttcaagcctaaacaatacaagcatctcacgctttggagtcaacactgaaaatgaagatcacctggccaaggagctggaagacctgaacaaatggggtcttaacatctttaatgtggctggatattctcacaatagacccctaacatgcatcatgtatgctatattccaggaaagagacctcctaaagacattcagaatctcatctgacacatttataacctacatgatgactttagaagaccattaccattctgacgtggcatatcacaacagcctgcacgctgctgatgtagcccagtcgacccatgttctcctttctacaccagcattagacgctgtcttcacagatttggagatcctggctgccatttttgcagctgccatccatgacgttgatcatcctggagtctccaatcagtttctcatcaacacaaattcagaacttgctttgatgtataatgatgaatctgtgttggaaaatcatcaccttgctgtgggtttcaaactgctgcaagaagaacactgtgacatcttcatgaatctcaccaagaagcagcgtcagacactcaggaagatggttattgacatggtgttagcaactgatatgtctaaacatatgagcctgctggcagacctgaagacaatggtagaaacgaagaaagttacaagttcaggcgttcttctcctagacaactataccgatcgcattcaggtccttcgcaacatggtacactgtgcagacctgagcaaccccaccaagtccttggaattgtatcggcaatggacagaccgcatcatggaggaatttttccagcagggagacaaagagcgggagaggggaatggaaattagcccaatgtgtgataaacacacagcttctgtggaaaaatcccaggttggtttcatcgactacattgtccatccattgtgggagacatgggcagatttggtacagcctgatgctcaggacattctcgataccttagaagataacaggaactggtatcagagcatgatacctcaaagtccctcaccaccactggacgagcagaacagggactgccagggtctgatggagaagtttcagtttgaactgactctcgatgaggaagattctgaaggacctgagaaggagggagagggacacagctatttcagcagcacaaagacgctttgtgtgattgatccagaaaacagagattccctgggagagactgacatagacattgcaacagaagacaagtcccccgtggatacataatccccctctccctgtggagatgaacattctatccttgatgagcatgccagctatgtggtagggccagcccaccatgggggccaagacctgcacaggacaagggccacctggcctttcagttacttgagtttggagtcagaaagcaagaccaggaagcaaatagcagctcaggaaatcccacggttgacttgccttgatggcaagcttggtggagagggctgaagctgttgctgggggccgattctgatcaagacacatggcttgaaaatggaagacacaaaactgagagatcattctgcactaagtttcgggaacttatccccgacagtgactgaactcactgactaataacttcatttatgaatcttctcacttgtccctttgtctgccaacctgtgtgccttttttgtaaaacattttcatgtctttaaaatgcctgttgaatacctggagtttagtatcaacttctacacagataagctttcaaagttgacaaacttttttgactctttctggaaaagggaaagaaaatagtcttccttctttcttgggcaatatccttcactttactacagttacttttgcaaacagacagaaaggatacacttctaaccacattttacttccttcccctgttgtccagtccaactccacagtcactcttaaaacttctctctgtttgcctgcctccaacagtacttttaactttttgctgtaaacagaataaaattgaacaaattagggggtagaaaggagcagtggtgtcgttcaccgtgagagtctgcatagaactcagcagtgtgccctgctgtgtcttggaccctgccccccacaggagttgtacagtccctggccctgttccctacctcctctcttcaccccgttaggctgttttcaatgtaatgctgccgtccttctcttgcactgccttctgcgctaacacctccattcctgtttataaccgtgtatttattacttaatgtatataatgtaatgttttgtaagttattaatttatatatctaacattgcctgccaatggtggtgttaaatttgtgtagaaaactctgcctaagagttacgactttttcttgtaatgttttgtattgtgtattatataacccaaacgtcacttagtagagacatatggcccccttggcagagaggacaggggtgggcttttgttcaaagggtctgccctttccctgcctgagttgctacttctgcacaacccctttatgaaccagttttggaaacaatattctcacattagatactaaatggtttatactgagcttttacttttgtatagcttgataggggcagggggcaatgggatgtagtttttacccaggttctatccaaatctatgtgggcatgagttgggttataactggatcctactatcattgtggctttggttcaaaaggaaacactacatttgctcacagatgattcttctgaatgctcccgaactactgactttgaagaggtagcctcctgcctgccattaagcaggaatgtcatgttccagttcattacaaaagaaaacaataaaacaatgtgaatttttataataaaatgtgaactgatgtagcaaattacgcaaatgtgaagcctcttctgataacacttgttaggcctcttactgatgtcagtttcagtttgtaaaatatgtttcatgctttcagttcagcattgtgactcagtaattacagaaaatggcacaaatgtgcatgaccaatgtatgtctatgaacactgcattgtttcaggtggacattttatcattttcaaatgtttctcacaatgtatgttatagtattattattatatattgtgttcaaatgcattctaaagagacttttatatgaggtgaataaagaaaagcatgattagattaaaaaaa

SEQ ID NO: 101 - protein, 736 aa, Homo sapiens; identical to SEQ ID NO: 99

SEQ ID NO: 102 - DNA, 1355 bp, Homo sapiens
cagtggctggtaggcagtggctgggaggcagcggcccaattagtgtcgtgcggcccgtggcgaggcgaggtccggggagcgagcgagcaagcaaggcgggaggggtggccggagctgcggcggctggcacaggaggaggagcccgggcgggcgaggggcggccggagagcgccagggcctgagctgccggagcggcgcctgtgagtgagtgcagaaagcaggcgcccgcgcgctagccgtggcaggagcagcccgcacgccgcgctctctccctgggcgacctgcagtttgcaatatgactttggaggaattctcggctggagagcagaagaccgaaaggatggataaggtgggggatgccctggaggaagtgctcagcaaagccctgagtcagcgcacgatcactgtcggggtgtacgaagcggccaagctgctcaacgtcgaccccgataacgtggtgttgtgcctgctggcggcggacgaggacgacgacagagatgtggctctgcagatccacttcaccctgatccaggcgttttgctgcgagaacgacatcaacatcctgcgcgtcagcaacccgggccggctggcggagctcctgctcttggagaccgacgctggccccgcggcgagcgagggcgccgagcagcccccggacctgcactgcgtgctggtgacgaatccacattcatctcaatggaaggatcctgccttaagtcaacttatttgtttttgccgggaaagtcgctacatggatcaatgggttccagtgattaatctccctgaacggtgatggcatctgaatgaaaataactgaaccaaattgcactgaagtttttgaaatacctttgtagttactcaagcagttactccctacactgatgcaaggattacagaaactgatgccaaggggctgagtgagttcaactacatgttctgggggcccggagatagatgactttgcagatggaaagaggtgaaaatgaagaaggaagctgtgttgaaacagaaaaataagtcaaaaggaacaaaaattacaaagaaccatgcaggaaggaaaactatgtattaatttagaatggttgagttacattaaaataaaccaaatatgttaaagtttaagtgtgcagccatagtttgggtatttttggtttatatgccctcaagtaaaagaaaagccgaaagggttaatcatatttgaaaaccatattttattgtattttgatgagatattaaattctcaaagttttattataaattctactaagttattttatgacatgaaaagttatttatgctataaattttttgaaacacaatacctacaataaactggtatgaataattgcatcatt

SEQ ID NO: 103 - protein, 165 aa, Homo sapiens
MTLEEFSAGEQKTERMDKVGDALEEVLSKALSQRTITVGVYEAAKLLNVDPDNVVLCLLAADEDDDRDVALQIHFTLIQAFCCENDINILRVSNPGRLAELLLLETDAGPAASEGAEQPPDLHCVLVTNPHSSQWKDPALSQLICFCRESRYMDQWVPVINLPER

SEQ ID NO: 104 - DNA, 4414 bp, Homo sapiens
ggagccggcgcccggaggagcaagaggaggaggaggaggagaggtcggagccgtctccaggagcccttagagaccgagtcccggcggcgacggcggggcagcgcaccggcaggcggattcattccacttaaaacctgaaaacattggaccacacaaagtcttactgatttcaggtaaaaacaataattgaagatgtccagcaaaacagcaagcaccaacaatatagcccaggcaaggagaactgtgcagcagttaagattagaagcctccattgaaagaataaaggtttcgaaggcatcagcggacctcatgtcctactgtgaggaacatgccaggagtgaccctttgctgataggaataccaacttcagaaaaccctttcaaggataaaaaaacttgcatcatcttatagtggaatagagaaacagctcctcgcctcttcccaacaacgcaaattatgagcagctccttgaagagatttaccttcagcttatttggtaaccactgctaataactaaaatgttctcagcttggaataatggactctgaagtctctattttccaagttgtcctttctcttaaaataccctttactgatttaatacagaataacaatcttattttccacttggtaactatggctttatgttgggttactgtttaaggaaagttgatctgggcctttttaaaaacataattatatactttagaaatacaagggattccgatatgtcaggacctaaatggcctaagcacctgtcaaattaaaattccaaaattcattgaaatcctaaagccttgatattatattctttataaggcgtgtgccagcctgtatagtatataagagagaggggtgtttgtgtgtatatatatatgcctttgtgtatacacttatcaaagctattttcttatgaaaacgtccctctctccataccatcagtttctcagttccagaagttatacctttattttgagctgtgtataggtagaataaaaaattcctttcatatcgttattgtacaaaaagtaaagagtatcctaaagattgtattcattgtaatcaagtaatgcaatcatctctcctctcttgaaatcttgctggacctcttaggctacaataaactgtaccaaactaaactgacagtccttcgataatatgaaacattaatttacaaggacccgttagggcttcaatgatgctgagtctggaaaaggggaggagacccttgggaggactccaggcagctgtgctcccagggctcatgttctctactggattagggataggcacctctgaaatctccaccctgatgattggaatgaaacggagtgaacatgagcccagctgagagaggagcaggaatgtgtgaaaaacagctgctctccttgtcccagctttgtgattgagccctctgtcttgctctctctgccttccctgtgtctttcttctcttaccagagcatctgtttgcagaggtaacattaccttccccagccacaggtatgtggaatacggtgaggaaaaaaaaaattaaaaaaaaaatgcaagctgtcaggatgcttaagctcttttcagacatctgcagtttcatccctaccttgttcacataccatccaagaggcacataggctacccaagagagccttggattcagtggtacactccttgggcccaagggctttagcagctggatatggggttccttgattttcctctgggcccaaatatagccctcacactcttggaatttccaggtatgggggtagccccaaaaggaggaatctcctatggccaataaggtatcttgactttatcaaagtagaagagagggtcacttcggagtcaaatcatacactaggcctttgatgctttaattcttcttcagttcattaaaagtaactactaaggaaaggttaaaaacttcccctcaaaaaggaatcaaccccaggaagtaattatttacaacgattttcccaaattttgtacaatctgtcctggaaagcaaaccccttttaaaatctaatgtctgggctttgagtattagctcatttagggtggacaaatgcattactgttttcaaactgctcacatttattcagtatttctccaagttgctatctactcagccttatgaatgcccctcgcttttctaaggccatgtgaaaatcacggcactgcccttagccttgtgtcatctgctttttcgttctgcgatatgcccagttcccaaatcaattataggtacctgtttaggagagaggaagattttacctctcaaagggtgagatttgaaatttacactaaaaagacaactttacatttaatgcttcacttaatgagacattcttttttttataagtctatttttctactcagtttcagaacactaatctgattttcactctgatttttaacgtttctttaaatatttataatgtagcttctttcaaaatattttcatgaaaaattacttttattataccattatgtgcatgttattggtagcaggcatagtttattatttagtactgaaacatgctcttttacctaacagtaaacaagtatgttttgatatatatctgttaatatgcttatagtggtaagaaatggacttgaggtcccaggagatttcattttattcaccctggtcagatacaataaaggctatgagtataaatacataacttcctaaccaggtgtagggcatgttcatgaatatcaaatcttttgatgctggacccaagagaggaaaagttgtagctaaatgttgatttacttataactagacgtctatgtgagaaaatatatgtatacatatatatgatatgcagaagtcactttttttatcaggctttattctccttacaaagccacagtttaactgtctgcaacagttggtttatgttaatgatagacaaatacccagtgtttgttactttttccaactaccactgtaatgataatctttctcacgtatatacatgcaacttcttggcttcatttccatgaagctgtttcaatatattcagtatactttgtccttaatgctgcttctgttaacagtgatctctttctttttttcattcttatatcttcattagttcatcataaatctgtccagttgaggcctcaggaccacggcatgatttcatgactccgaagtattttacagaaacattttttaaataagggaaatattttatataccagatggttcacaagtgatggctcatagctagtttttttttttcttctaaaaaatgtcaggtttttaaaatcatttaccttattaaaatgaaaagtgccatacttaacttttaaaggaaagacctgacttgctttttctctatttagactgtttttgtactttactaatctttaaactatcaggaaaaaaaccaaaactttataccaatgatttagtaattttgaggcatagggtagcttacgtagtggaggatgtgccaaatattctcttcaaatgccaccttctcaatttataactaaaatagtgttatctgactaattcctctgaattttgatgtaagatctatataggcccccaaaatgatcgtagtacatgccagtcatttctcagtgaaataaatacaataccagagtacattatgggttttattgctttcttttatggtagacctgttaatggggaaaaaatacatcaaatcaaatagaatcttatatctgtatgttaaaatagagcacttacctgaagtcagtggcctggatcatagccctggatcatttcccagtctgtcctgtgctgtgtgaccttggacaaggcgcttcatctctctgggcctctatttctccatttgtaaaacaagtggctgcagtagatgatggctgagagcccttcctgttcccagatgccttggtccaaagaccccacccctctgctggtcctgccaacgtgttggtgctataagctgcttcagatataaaattggtttatctataatgtttgttcatttaatagcttctaaaaggcctttttgttatacagtgctttttttctagttttatggacttggttactgtaataatgtcttgtttttagccatgtaactacaaacagatattctcttgatgtcttagtaaatttgcatttgatatatcattgatgagattttgttgttatgtaatattctttggctacgcatctgtccagcatcttattaaccataatactgtgatcattatttggaaatatgtcctatggaaagaataaaagcatgtacttcacagctagcatgttcacagatttgaaagaagtttcattaaaagcaccattgctttctgtactgcgtcagtgcctcattgtatcatcctacttgtgttttgctcaataaatgaataaaagaccatttctcttcaaaaaaaaaaaaaaaaaa

SEQ ID NO: 105 - protein, 72 aa, Homo sapiens
MSSKTASTNNIAQARRTVQQLRLEASIERIKVSKASADLMSYCEEHARSDPLLIGIPTSENPFKDKKTCIIL

SEQ ID NO: 106 - DNA, 563 bp, Homo sapiens
aaaagattcattatacacagcctattcaggcgaagctacaaccgccccaggaaatataaactgtgtcggcaaagacagcaggggggagaggaagtaactgatgggaaggaagctaatcatgtgaagtttgtccaactccacacggtctaataaattcccgtttgtttccgctgggagcagccattaaacgcgccctgacacgtgggcgcaggaacctcccttctacctctggtgttcagagatttccttctcgacccacttgtttgtatacaaccacgcccggcaggatgaccaccagatgaccggccgcagcaatgcctccactcagtcccagttgggcaaagtttcactccactgcggcgacgtgaacaagaatcacggcttccttatcgctgctgtgaggttctgccattcatcttgtcctcttcctgggactgagtggatacttgtgccatttttcaagatcaagaatatggaaaaaatgactccttagctcttcctatccctgagattcctcgactttgtaatctatcaattacacaattctccaatgtttaataatt

SEQ ID NO: 107 - protein, 64 aa, Homo sapiens
MTGRSNASTQSQLGKVSLHCGDVNKNHGFLIAAVRFCHSSCPLPGTEWILVPFFKIKNMEKMTP

SEQ ID NO: 108 - DNA, 927 bp, Homo sapiens
atggccttgctgtgctacaactggggctgcggtcagcgcttcgatcctgagaccgattccgatgatgcttgcacataccacccaggtgttccagtcttttatgatgcattaaagggctgtaccaaaggtagacataatagtgagaagccacctgagccagtcaaacctgaagtcaagactactgagaagaaggaactatctgaattgaaacccaaatttcaggaacacataattcaagcccctaagccagtagaagcaataaaaatgccaagcccagatgaaccaatgacaaatttggaattaaaaatatctgcctctctaaaacaagctcttgataaactgtcatcagggaatgaagaagaaagaagaagacaatgatgaaattaagactgggacctcatgtaagaatagagggtgttcaaagacatattggggtctagaaagtctagaagaagtctgtgtatatcattctggagtacctattttccatgagggaatgaaatacctaagctgttgtagaagaaaaacttctgattttaatacattcttagcccaagagggctgtacaacagggaaacacatgtggactaaaaaggatgctggggaaaaagttgttccatgtagacataactggcatcagactggaggtgaagttaccatttcaacatatgctaaagattcacagaacttagttgagtagaagcaaatagcacattgttaaatgtgcacattgtatttgaaggagagaaggaatttgatcaaaatgtgaaaatatggggtgtgattgatgtaaagtgaagttatgtaactacgactgcaacaaagattgagatcactatgagaaaagctgagccgatgcagtgggcaagccttgaactccctgcagtgaaaaagcaggaaaagcaaaaagatgacccaacagattga

SEQ ID NO: 109 - DNA, 1125 bp, Homo sapiens
atggaggtaaaactgatgcccagtggccccaagcccaattccagctgtgaccgtcaccgccgggagcagaggatcatgatccaaaggaaccagagtagttgggaaaactgtttattggtgttctgagctttgaaacgacagatgatagtttaagagaacatttggaaaaatgggcacactcacagattgtatggtaatgagacacccccaaagaaaacgttccagggggtttggttttgtgacttactcttgtgttgaagaggtggatgcaacaacatgtgctcaaccacacaggttggtgggtgtctattggaaccaaagataactctttctagagaggagtcgataaagcctgatgcccatctaccagtgaagaaaaatttccttggtggtattaaagaagatacagaagaatataatttgagactactttgaaaagtatggcaagactgaaaccatggaagttatggaagacagacagagtgaaaaaaaggaaggatttgcttttgcaacttttgatgatcacgatacagttgataacattgttattcagaaataccacactattaatgggcataattgtgaagtgaaaaggccctttctaaacaagagatgcagtctgctggatcacagagagattgtggaggtggatccggcaattttatgggttgcggaggaaactttcgaggtggtggaggtaattttggccatggtggcaactttggtggaagaggaggctatgctggtggaggtggtggcagcggaaatagttatgaaggaggtgatggtggatataatggacttagaggcgatggtggcaactatgacagtcgtcctggttatagtagtagagggggctatggtggtggcggaccaggatatggaaaccaaggtggtagatatggtggtggtggtggaggatatgatggttgcaatggaggaaatttggtggtggtaactgtggtggtggtgggaactataatgattttggaaattatagtggacaacagcaatcaaattacgaacccatgtaagggggcagttttggtggaagaagctcatccctatgatggtggttatggatctggtgatggacatggtggatataggagcagaaggttttga

SEQ ID NO: 110 - DNA, 4768 bp, Homo sapiens
atccttgccgcccgccccggcccagccgcgtcccggagccgtcgggcatggagccgtggaagcagtgcgcgcagtggctcatccattgcaaggtgctgcccaccaaccaccgggtgacctgggactcggctcaggtgttcgaccttgcgcagaccctccgcgatggagtcctgctctgccagctgcttaacaacctccgggcgcactccatcaacctgaaggagatcaacctgaggccgcagatgtcccagtttctctgtttgaagaacataaggacatttctcacggcctgttgtgagacgtttggaatgaggaaaagtgaacttttcgaggcatttgacttgtttgatgttcgtgactttggaaaggttatagaaacattatcacgactttctcgaacacctatagcattggccacaggaatcaggcccttcccaacagaagaaagcattaatgatgaagacatctacaaaggccttcctgatttaatagatgaaacccttgtggaagatgaagaagatctctatgactgtgtttatggggaagatgaaggtggagaagtctatgaggacttaatgaaggcagaggaagcacatcagcccaaatgtccagaaaatgatatacgaagttgttgtctagcagaaattaagcagacagaagaaaaatatacagaaactttggagtcaatagaaaagtatttcatggcaccactaaaaagatttctgacagcagcagaatttgattcagtattcatcaacattcctgaacttgtaaaacttcatcggaacctaatgcaagagattcatgattccattgtaaataaaaatgaccagaacttgtaccaagtttttattaactacaaggaaagattggttatttacgggcagtactgcagtggagtggagtcagccatctctagtttagactacatttctaagtcaaaagaagatgtcaaactgaaattagaggaatgttccaaaagagcaaataatgggaaatttactcttcgagacttgcttgtggttcctatgcaacgtgttttaaagtaccaccttctcctccaggaactggtcaaacataccactgatccgactgagaaggcaaatctgaaactggctcttgatgccatgaaggacttggcacaatatgtgaatgaagtgaaaagagataatgagacccttcgtgaaattaaacagtttcagctatctatagagaatttgaaccaaccagttttgctttttggacgacctcagggagatggtgaaattcgaataaccactctagacaagcataccaaacaagaaaggcatatcttcttatttgatttggcagtgatcgtatgtaagagaaaaggtgataactatgaaatgaaggaaataatagatcttcagcagtacaagatagccaataatcctacaaccgataaagaaaacaaaaagtggtcttatggcttctacctcatccatacccaaggacaaaatgggttagaattttattgcaaaacaaaagatttaaagaagaaatggctagaacagtttgaaatggctttgtctaacataagaccagactatgcagactccaatttccacgacttcaagatgcataccttcactcgagtcacatcctgcaaagtctgccagatgctcctgaggggaacattttatcaaggctatttatgttttaagtgtggagcgagagcacacaaagaatgtttgggaagagtagacaattgtggcagagttaattctggtgaacaagggacactcaaactaccagagaaacggaccaatggactgcgaagaactcctaaacaggtggatccaggtttaccaaagatgcaggtcattaggaactattctggaacaccacccccagctctgcatgaaggaccccctttacagctccaggccggggataccgttgaacttctgaaaggagatgcacacagtctgttttggcagggcagaaatttagcatctggagaggttggattttttccaagtgatgcagtcaagccttgcccatgtgtgcccaaaccagtagattattcttgccaaccctggtatgctggagcaatggaaagattgcaagcagagaccgaacttattaatagggtaaatagtacttaccttgtgaggcacaggaccaaagagtcaggagaatatgcaattagcattaagtacaataatgaagcaaagcacatcaagattttaacaagagatggcttttttcacattgcagaaaatagaaaatttaaaagtttaatggaacttgtggagtactacaagcatcattctctcaaggaagggttcagaaccttagatacaactctgcagtttccatacaaggagccagaacattcagctggacagaggggtaatagagcaggcaacagcttgttaagtccaaaagtgctgggcattgccatcgctcggtatgacttctgtgcaagagatatgagagagttgtccttgttgaaaggagatgtggtgaagatttacacaaagatgagtgcaaatggctggtggagaggagaagtaaatggcagggtgggctggtttccatccacatatgtggaagaggatgaataaattcaaatcccgtgttgcaccctgcaccaaaaatttcagagaagggataaatagaagcctgcacagcatcgtgaattaactgaagtgtttaaaaagctgcatttctggctgttcaacatcctccctccttagcccctcctaagtcttaatgctgagatttctaaagatgctggtactgacagattaatggcttgcctagagctgtgcaagaaacagcctgccagtctgtcattgtcagggaccagggcaaaaccaagagctgttcttcccagaagagccctgcaaacacattggttcgtgcttccctttacttcttctggtcagataccatgaatgccagtcatcagtaaatcttaatacacttttgctttattctcacatgccattcaccagattatttgatggtacaaagaagcagaagtgtaattttccttttcccagcatgacgaaaaattggagttctgccatttgagcagcttactggaaagatccagccttacttgtcttaaattgtccaacaaggtgactcattgcccggcaaacacttttaccctcagatgttactcatgatattataaaatatgaggccagtgctcaggtttgcatcataagtgagctatccctgaagggttttaattacttatttggtgtcctgattatatttgcaaacttctttataaaaggtgaaaaaagcacacaaaagagagggtgtcttcatattaaaccttcacaaccttcatgatttcataggattattttggaaatatagcacttgactttatgaaaggatctgggctaggtatattaggggtagttgccaataacctgaagaagctggcattgtttacagaaacagatcaagggctataatttatgtcattttatagcagcagtatctattaatacatgccttttcctcccatccacctcccccgcacacacacaaagatgacctgggacatgatttttttattcccacattttcttggagcacaaacaactttgttgaggattttggaaggaaagcacaactgggtcctttattcatttctgggacagaaagagggtcagtggacttttgtgggcctccagcttctctcagagtctccccctctgcagcccatcctgggagtgtattaactggagggaagatgggtcttgcagtacatttgttttgcccagccatcactcttttttgtgaggagcctaaatacattcttcctggggtccagagtccccattcaaggcagtcaagttaagacactaacttggccctttcctgatggaaatatttcctccatagcagaagttgtgttctgacaagactgagagagttacatgttgggaaaaaaaagaagcattaacttagtagaactgaaccaggagcattaagttctgaaattttgaatcatctctgaaatgaagcaggtgtagcctgccctctcatcaatccgtctgggtgccagaactcaaggttcagtggacacatccccctgttagagaccctcatgggctaggacttttcatctaggatagattcaagacctttacctcagaattatgtaaactgtgattgtgttttagaaaaattattatttgctaaaaccatttaagtctttgtatatgtgtaaatgatcacaaaaatgtattttataaaatgttctgtacaataaagttacacctcaaagtgtactcttggaatggattctttcctgtaaagtcttatctgcgactctgtctcgggaatgttttgtctgttgccgtcagccgaactttgttatggagggagcagcctcacacaagcagaaacactcctgtggatggtattgtagcatgtattgtttattttagtcaatagaccctctccttataaatggtgtttagtcttcctgttgcatttcatgggcctgggggtttcctagcagaggatattggagcccctttttgtgacattaccaattacatctttgtccacgtttaatactttgttttggaaaatttaaatgctgcagatttgtgtagagttctaataccaaagacagaagtaaatgttttccatatactttgtcttgcctgtatgcagcccttgtgtaatatggtgaattagagtggtatttcactttgtattattttgtaaatatgtcaatataataaatagtgactaaaaaaaaaaaaaa

SEQ ID NO: 111 - protein, 847 aa, Homo sapiens
MEPWKQCAQWLIHCKVLPTNHRVTWDSAQVFDLAQTLRDGVLLCQLLNNLRAHSINLKEINLRPQMSQFLCLKNIRTFLTACCETFGMRKSELFEAFDLFDVRDFGKVIETLSRLSRTPIALATGIRPFPTEESINDEDIYKGLPDLIDETLVEDEEDLYDCVYGEDEGGEVYEDLMKAEEAHQPKCPENDIRSCCLAEIKQTEEKYTETLESIEKYFMAPLKRFLTAAEFDSVFINIPELVKLHRNLMQEIHDSIVNKNDQNLYQVFINYKERLVIYGQYCSGVESAISSLDYISKSKEDVKLKLEECSKRANNGKFTLRDLLVVPMQRVLKYHLLLQELVKHTTDPTEKANLKLALDAMKDLAQYVNEVKRDNETLREIKQFQLSIENLNQPVLLFGRPQGDGEIRITTLDKHTKQERHIFLFDLAVIVCKRKGDNYEMKEIIDLQQYKIANNPTTDKENKKWSYGFYLIHTQGQNGLEFYCKTKDLKKKWLEQFEMALSNIRPDYADSNFHDFKMHTFTRVTSCKVCQMLLRGTFYQGYLCFKCGARAHKECLGRVDNCGRVNSGEQGTLKLPEKRTNGLRRTPKQVDPGLPKMQVIRNYSGTPPPALHEGPPLQLQAGDTVELLKGDAHSLFWQGRNLASGEVGFFPSDAVKPCPCVPKPVDYSCQPWYAGAMERLQAETELINRVNSTYLVRHRTKESGEYAISIKYNNEAKHIKILTRDGFFHIAENRKFKSLMELVEYYKHHSLKEGFRTLDTTLQFPYKEPEHSAGQRGNRAGNSLLSPKVLGIAIARYDFCARDMRELSLLKGDVVKIYTKMSANGWWRGEVNGRVGWFPSTYVEEDE

SEQ ID NO: 112 - DNA, 2166 bp, Homo sapiens
gcaggctctgcctgtggccactagcagagaagctgctgtccttccaccaccagcaccggaccacctgctccaagaccagcctcctggggggaccaggcacccggccttcactggcacccagggagccgtcctcagcagcgtcaacatgtcaaggcccagcagcagagccatttacttgcaccggaaggagtactcccagaacctcacctcagagcccaccctcctgcagcacagggtggagcacttgatgacatgcaagcaggggagtcagagagtccaggggcccgaggatgccttgcagaagctgttcgagatggatgcacagggccgggtgtggagccaagacttgatcctgcaggtcagggacggctggctgcagctgctggacattgagaccaaggaggagctggactcttaccgcctagacagcatccaggccatgaatgtggcgctcaacacatgttcctacaactccatcctgtccatcaccgtgcaggagccgggcctgccaggcactagcactctgctcttccagtgccaggaagtgggggcagagcgactgaagaccagcctgcagaaggctctggaggaagagctggagcaaagacctcgacttggaggccttcagccaggccaggacagatggagggggcctgctatggaaaggccgctccctatggagcaggcacgctatctggagccggggatccctccagaacagccccaccagaggaccctagagcacagcctcccaccatccccaaggcccctgccacgccacaccagtgcccgagaaccaagtgcctttactctgcctcctccaaggcggtcctcttcccccgaggacccagagagggacgaggaagtgctgaaccatgtcctaagggacattgagctgttcatgggaaagctggagaaggcccaggcaaagaccagcaggaagaagaaatttgggaaaaaaaacaaggaccagggaggtctcacccaggcacagtacattgactgcttccagaagatcaagcacagcttcaacctcctgggaaggctggccacctggctgaaggagacaagtgcccctgagctcgtacacatcctcttcaagtccctgaacttcatcctggccaggtgccctgaggctggcctagcagcccaagtgatctcacccctcctcacccctaaagctatcaacctgctacagtcctgtctaagcccacctgagagtaacctttggatggggttgggcccagcctggaccactagccgggccgactggacaggcgatgagcccctgccctaccaacccacattctcagatgactggcaacttccagagccctccagccaagcacccttaggataccaggaccctgtttcccttcggccctccagccccaaacctgcccagccagccctgaaaatgcaagtcttgtacgagtttgaagctaggaacccacgggaactgactgtggtccagggagagaagctggaggttctggaccacagcaagcggtggtggctggtgaagaatgaggcgggacggagcggctacattccaagcaacatcctggagcccctacagccggggacccctgggacccagggccagtcaccctctcgggttccaatgcttcgacttagctcgaggcctgaagaggtcacagactggctgcaggcagagaacttctccactgccacggtgaggacacttgggtccctgacggggagccagctacttcgcataagacctggggagctacagatgctatgtccacaggaggccccacgaatcctgtcccggctggaggctgtcagaaggatgctggggataagcccttaggcaccagcttagacacctccaagaaccaggccccgctgatgcaagatggcagatctgatacccattagagccccgagaattcctcttctggatcccagtttgcagcaaaccccacaccccagctcacacagcaaaaacaatggacaggcccagaggctgaagcaaacagtgtcccttctggctgtgttggagcctccccagtaaccacctatttattttacctctttcccaaacctggagcatttatgcctaggcttgtcaagaatctgttcagtccctctccttctcaataaaagcatcttcaagcttgtaaaaaaaaaaaaaaaaaa

SEQ ID NO: 113 - protein, 563 aa, Homo sapiens
MSRPSSRAIYLHRKEYSQNLTSEPTLLQHRVEHLMTCKQGSQRVQGPEDALQKLFEMDAQGRVWSQDLILQVRDGWLQLLDIETKEELDSYRLDSIQAMNVALNTCSYNSILSITVQEPGLPGTSTLLFQCQEVGAERLKTSLQKALEEELEQRPRLGGLQPGQDRWRGPAMERPLPMEQARYLEPGIPPEQPHQRTLEHSLPPSPRPLPRHTSAREPSAFTLPPPRRSSSPEDPERDEEVLNHVLRDIELFMGKLEKAQAKTSRKKKFGKKNKDQGGLTQAQYIDCFQKIKHSFNLLGRLATWLKETSAPELVHILFKSLNFILARCPEAGLAAQVISPLLTPKAINLLQSCLSPPESNLWMGLGPAWTTSRADWTGDEPLPYQPTFSDDWQLPEPSSQAPLGYQDPVSLRPSSPKPAQPALKMQVLYEFEARNPRELTVVQGEKLEVLDHSKRWWLVKNEAGRSGYIPSNILEPLQPGTPGTQGQSPSRVPMLRLSSRPEEVTDWLQAENFSTATVRTLGSLTGSQLLRIRPGELQMLCPQEAPRILSRLEAVRRMLGISP

SEQ ID NO: 114 - DNA, 2256 bp, Homo sapiens
gcaggctctgcctgtggccactagcagagaagctgctgtccttccaccaccagcaccggaccacctgctccaagaccagcctcctggggggaccaggcacccggccttcactggcacccagggagccgtcctcagcagcgtcaacatgtcaaggcccagcagcagagccatttacttgcaccggaaggagtactcccagaacctcacctcagagcccaccctcctgcagcacagggtggagcacttgatgacatgcaagcaggggagtcagagagtccaggggcccgaggatgccttgcagaagctgttcgagatggatgcacagggccgggtgtggagccaagacttgatcctgcaggtcagggacggctggctgcagctgctggacattgagaccaaggaggagctggactcttaccgcctagacagcatccaggccatgaatgtggcgctcaacacatgttcctacaactccatcctgtccatcaccgtgcaggagccgggcctgccaggcactagcactctgctcttccagtgccaggaagtgggggcagagcgactgaagaccagcctgcagaaggctctggaggaagagctggagcaaagacctcgacttggaggccttcagccaggccaggacagatggagggggcctgctatggaaaggccgctccctatggagcaggcacgctatctggagccggggatccctccagaacagccccaccagaggaccctagagcacagcctcccaccatccccaaggcccctgccacgccacaccagtgcccgagaaccaagtgcctttactctgcctcctccaaggcggtcctcttcccccgaggacccagagagggacgaggaagtgctgaaccatgtcctaagggacattgagctgttcatgggaaagctggagaaggcccaggcaaagaccagcaggaagaagaaatttgggaaaaaaaacaaggaccagggaggtctcacccaggcacagtacattgactgcttccagaagatcaagcacagcttcaacctcctgggaaggctggccacctggctgaaggagacaagtgcccctgagctcgtacacatcctcttcaagtccctgaacttcatcctggccaggtgccctgaggctggcctagcagcccaagtgatctcacccctcctcacccctaaagctatcaacctgctacagtcctgtctaagcccacctgagagtaacctttggatggggttgggcccagcctggaccactagccgggccgactggacaggcgatgagcccctgccctaccaacccacattctcagatgactggcaacttccagagccctccagccaagcacccttaggataccaggaccctgtttcccttcggcggggaagtcataggttagggagcacctcacactttcctcaggagaagacacacaaccatgaccctcagcctggggaccccaactccaggccctccagccccaaacctgcccagccagccctgaaaatgcaagtcttgtacgagtttgaagctaggaacccacgggaactgactgtggtccagggagagaagctggaggttctggaccacagcaagcggtggtggctggtgaagaatgaggcgggacggagcggctacattccaagcaacatcctggagcccctacagccggggacccctgggacccagggccagtcaccctctcgggttccaatgcttcgacttagctcgaggcctgaagaggtcacagactggctgcaggcagagaacttctccactgccacggtgaggacacttgggtccctgacggggagccagctacttcgcataagacctggggagctacagatgctatgtccacaggaggccccacgaatcctgtcccggctggaggctgtcagaaggatgctggggataagcccttaggcaccagcttagacacctccaagaaccaggccccgctgatgcaagatggcagatctgatacccattagagccccgagaattcctcttctggatcccagtttgcagcaaaccccacaccccagctcacacagcaaaaacaatggacaggcccagaggctgaagcaaacagtgtcccttctggctgtgttggagcctccccagtaaccacctatttattttacctctttcccaaacctggagcatttatgcctaggcttgtcaagaatctgttcagtccctctccttctcaataaaagcatcttcaagcttgtaaaaaaaaaaaaaaaaaa

SEQ ID NO: 115 - protein, 593 aa, Homo sapiens
MSRPSSRAIYLHRKEYSQNLTSEPTLLQHRVEHLMTCKQGSQRVQGPEDALQKLFEMDAQGRVWSQDLILQVRDGWLQLLDIETKEELDSYRLDSIQAMNVALNTCSYNSILSITVQEPGLPGTSTLLFQCQEVGAERLKTSLQKALEEELEQRPRLGGLQPGQDRWRGPAMERPLPMEQARYLEPGIPPEQPHQRTLEHSLPPSPRPLPRHTSAREPSAFTLPPPRRSSSPEDPERDEEVLNHVLRDIELFMGKLEKAQAKTSRKKKFGKKNKDQGGLTQAQYIDCFQKIKHSFNLLGRLATWLKETSAPELVHILFKSLNFILARCPEAGLAAQVISPLLTPKAINLLQSCLSPPESNLWMGLGPAWTTSRADWTGDEPLPYQPTFSDDWQLPEPSSQAPLGYQDPVSLRRGSHRLGSTSHFPQEKTHNHDPQPGDPNSRPSSPKPAQPALKMQVLYEFEARNPRELTVVQGEKLEVLDHSKRWWLVKNEAGRSGYIPSNILEPLQPGTPGTQGQSPSRVPMLRLSSRPEEVTDWLQAENFSTATVRTLGSLTGSQLLRIRPGELQMLCPQEAPRILSRLEAVRRMLGISP

SEQ ID NO: 116 - DNA, 2259 bp, Homo sapiens
gcaggctctgcctgtggccactagcagagaagctgctgtccttccaccaccagcaccggaccacctgctccaagaccagcctcctggggggaccaggcacccggccttcactggcacccagggagccgtcctcagcagcgtcaacatgtcaaggcccagcagcagagccatttacttgcaccggaaggagtactcccagaacctcacctcagagcccaccctcctgcagcacagggtggagcacttgatgacatgcaagcaggggagtcagagagtccaggggcccgaggatgccttgcagaagctgttcgagatggatgcacagggccgggtgtggagccaagacttgatcctgcaggtcagggacggctggctgcagctgctggacattgagaccaaggaggagctggactcttaccgcctagacagcatccaggccatgaatgtggcgctcaacacatgttcctacaactccatcctgtccatcaccgtgcaggagccgggcctgccaggcactagcactctgctcttccagtgccaggaagtgggggcagagcgactgaagaccagcctgcagaaggctctggaggaagagctggagcaaagcagacctcgacttggaggccttcagccaggccaggacagatggagggggcctgctatggaaaggccgctccctatggagcaggcacgctatctggagccggggatccctccagaacagccccaccagaggaccctagagcacagcctcccaccatccccaaggcccctgccacgccacaccagtgcccgagaaccaagtgcctttactctgcctcctccaaggcggtcctcttcccccgaggacccagagagggacgaggaagtgctgaaccatgtcctaagggacattgagctgttcatgggaaagctggagaaggcccaggcaaagaccagcaggaagaagaaatttgggaaaaaaaacaaggaccagggaggtctcacccaggcacagtacattgactgcttccagaagatcaagcacagcttcaacctcctgggaaggctggccacctggctgaaggagacaagtgcccctgagctcgtacacatcctcttcaagtccctgaacttcatcctggccaggtgccctgaggctggcctagcagcccaagtgatctcacccctcctcacccctaaagctatcaacctgctacagtcctgtctaagcccacctgagagtaacctttggatggggttgggcccagcctggaccactagccgggccgactggacaggcgatgagcccctgccctaccaacccacattctcagatgactggcaacttccagagccctccagccaagcacccttaggataccaggaccctgtttcccttcggcggggaagtcataggttagggagcacctcacactttcctcaggagaagacacacaaccatgaccctcagcctggggaccccaactccaggccctccagccccaaacctgcccagccagccctgaaaatgcaagtcttgtacgagtttgaagctaggaacccacgggaactgactgtggtccagggagagaagctggaggttctggaccacagcaagcggtggtggctggtgaagaatgaggcgggacggagcggctacattccaagcaacatcctggagcccctacagccggggacccctgggacccagggccagtcaccctctcgggttccaatgcttcgacttagctcgaggcctgaagaggtcacagactggctgcaggcagagaacttctccactgccacggtgaggacacttgggtccctgacggggagccagctacttcgcataagacctggggagctacagatgctatgtccacaggaggccccacgaatcctgtcccggctggaggctgtcagaaggatgctggggataagcccttaggcaccagcttagacacctccaagaaccaggccccgctgatgcaagatggcagatctgatacccattagagccccgagaattcctcttctggatcccagtttgcagcaaaccccacaccccagctcacacagcaaaaacaatggacaggcccagaggctgaagcaaacagtgtcccttctggctgtgttggagcctccccagtaaccacctatttattttacctctttcccaaacctggagcatttatgcctaggcttgtcaagaatctgttcagtccctctccttctcaataaaagcatcttcaagcttgtaaaaaaaaaaaaaaaaaa

SEQ ID NO: 117 - protein, 594 aa, Homo sapiens
MSRPSSRAIYLHRKEYSQNLTSEPTLLQHRVEHLMTCKQGSQRVQGPEDALQKLFEMDAQGRVWSQDLILQVRDGWLQLLDIETKEELDSYRLDSIQAMNVALNTCSYNSILSITVQEPGLPGTSTLLFQCQEVGAERLKTSLQKALEEELEQSRPRLGGLQPGQDRWRGPAMERPLPMEQARYLEPGIPPEQPHQRTLEHSLPPSPRPLPRHTSAREPSAFTLPPPRRSSSPEDPERDEEVLNHVLRDIELFMGKLEKAQAKTSRKKKFGKKNKDQGGLTQAQYIDCFQKIKHSFNLLGRLATWLKETSAPELVHILFKSLNFILARCPEAGLAAQVISPLLTPKAINLLQSCLSPPESNLWMGLGPAWTTSRADWTGDEPLPYQPTFSDDWQLPEPSSQAPLGYQDPVSLRRGSHRLGSTSHFPQEKTHNHDPQPGDPNSRPSSPKPAQPALKMQVLYEFEARNPRELTVVQGEKLEVLDHSKRWWLVKNEAGRSGYIPSNILEPLQPGTPGTQGQSPSRVPMLRLSSRPEEVTDWLQAENFSTATVRTLGSLTGSQLLRIRPGELQMLCPQEAPRILSRLEAVRRMLGISP

SEQ ID NO: 118 - DNA, 2749 bp, Homo sapiens
gagggctggccagtgaggctcggcccggggaaagtgaaagtttgcctgggtcctctcggcgccagagccgctctccgcatcccaggacagcggtgcggccctcggccggggcgcccactccgcagcagccagcgagcgagcgagcgagcgagggcggccgacgcgcccggccgggacccagctgcccgtatgaccgcgccgggcgccgccgggcgctgccctcccacgacatggctgggctccctgctgttgttggtctgtctcctggcgagcaggagtatcaccgaggaggtgtcggagtactgtagccacatgattgggagtggacacctgcagtctctgcagcggctgattgacagtcagatggagacctcgtgccaaattacatttgagtttgtagaccaggaacagttgaaagatccagtgtgctaccttaagaaggcatttctcctggtacaagacataatggaggacaccatgcgcttcagagataacacccccaatgccatcgccattgtgcagctgcaggaactctctttgaggctgaagagctgcttcaccaaggattatgaagagcatgacaaggcctgcgtccgaactttctatgagacacctctccagttgctggagaaggtcaagaatgtctttaatgaaacaaagaatctccttgacaaggactggaatattttcagcaagaactgcaacaacagctttgctgaatgctccagccaagatgtggtgaccaagcctgattgcaactgcctgtaccccaaagccatccctagcagtgacccggcctctgtctcccctcatcagcccctcgccccctccatggcccctgtggctggcttgacctgggaggactctgagggaactgagggcagctccctcttgcctggtgagcagcccctgcacacagtggatccaggcagtgccaagcagcggccacccaggagcacctgccagagctttgagccgccagagaccccagttgtcaaggacagcaccatcggtggctcaccacagcctcgcccctctgtcggggccttcaaccccgggatggaggatattcttgactctgcaatgggcactaattgggtcccagaagaagcctctggagaggccagtgagattcccgtaccccaagggacagagctttccccctccaggccaggagggggcagcatgcagacagagcccgccagacccagcaacttcctctcagcatcttctccactccctgcatcagcaaagggccaacagccggcagatgtaactggtacagccttgcccagggtgggccccgtgaggcccactggccaggactggaatcacaccccccagaagacagaccatccatctgccctgctcagagaccccccggagccaggctctcccaggatctcatcactgcgcccccagggcctcagcaacccctccaccctctctgctcagccacagctttccagaagccactcctcgggcagcgtgctgccccttggggagctggagggcaggaggagcaccagggatcggaggagccccgcagagccagaaggaggaccagcaagtgaaggggcagccaggcccctgccccgttttaactccgttcctttgactgacacaggccatgagaggcagtccgagggatcctccagcccgcagctccaggagtctgtcttccacctgctggtgcccagtgtcatcctggtcttgctggccgtcggaggcctcttgttctacaggtggaggcggcggagccatcaagagcctcagagagcggattctcccttggagcaaccagagggcagccccctgactcaggatgacagacaggtggaactgccagtgtagagggaattctaagctggacgcacagaacagtctctccgtgggaggagacattatggggcgtccaccaccacccctccctggccatcctcctggaatgtggtctgccctccaccagagctcctgcctgccaggactggaccagagcagccaggctggggcccctctgtctcaacccgcagacccttgactgaatgagagaggccagaggatgctccccatgctgccactatttattgtgagccctggaggctcccatgtgcttgaggaaggctggtgagcccggctcaggaccctcttccctcaggggctgcaccctcctctcactcccttccatgccggaacccaggccagggacccaccggcctgtggtttgtgggaaagcagggtggacgctgaggagtgaaagaaccctgcacccagagggcctgcctggtgccaaggtatcccagcctggacaggcatggacctgtctccagagagaggagcctgaagttcgtggggcgggacagcgtcggcctgatttcccgtaaaggtgtgcagcctgagagacgggaagaggaggcctctggacctgctggtctgcactgacagcctgaagggtctacaccctcggctcacctaagtgccctgtgctggttgccaggcgcagaggggaggccagccctgccctcaggacctgcctgacctgccagtgatgccaagagggggatcaagcactggcctctgcccctcctccttccagcacctgccagagcttctccaggaggccaagcagaggctcccctcatgaaggaagccattgcactgtgaacactgtacctgcctgctgaacagcctgcccccgtccatccatgagccagcatccgtccgtcctccactctccagcctctcccca

SEQ ID NO: 119 - protein, 554 aa, Homo sapiens
MTAPGAAGRCPPTTWLGSLLLLVCLLASRSITEEVSEYCSHMIGSGHLQSLQRLIDSQMETSCQITFEFVDQEQLKDPVCYLKKAFLLVQDIMEDTMRFRDNTPNAIAIVQLQELSLRLKSCFTKDYEEHDKACVRTFYETPLQLLEKVKNVFNETKNLLDKDWNIFSKNCNNSFAECSSQDVVTKPDCNCLYPKAIPSSDPASVSPHQPLAPSMAPVAGLTWEDSEGTEGSSLLPGEQPLHTVDPGSAKQRPPRSTCQSFEPPETPVVKDSTIGGSPQPRPSVGAFNPGMEDILDSAMGTNWVPEEASGEASEIPVPQGTELSPSRPGGGSMQTEPARPSNFLSASSPLPASAKGQQPADVTGTALPRVGPVRPTGQDWNHTPQKTDHPSALLRDPPEPGSPRISSLRPQGLSNPSTLSAQPQLSRSHSSGSVLPLGELEGRRSTRDRRSPAEPEGGPASEGAARPLPRFNSVPLTDTGHERQSEGSSSPQLQESVFHLLVPSVILVLLAVGGLLFYRWRRRSHQEPQRADSPLEQPEGSPLTQDDRQVELPV

SEQ ID NO: 120 - DNA, 1519 bp, Homo sapiens
gagggctggccagtgaggctcggcccggggaaagtgaaagtttgcctgggtcctctcggcgccagagccgctctccgcatcccaggacagcggtgcggccctcggccggggcgcccactccgcagcagccagcgagcgagcgagcgagcgagggcggccgacgcgcccggccgggacccagctgcccgtatgaccgcgccgggcgccgccgggcgctgccctcccacgacatggctgggctccctgctgttgttggtctgtctcctggcgagcaggagtatcaccgaggaggtgtcggagtactgtagccacatgattgggagtggacacctgcagtctctgcagcggctgattgacagtcagatggagacctcgtgccaaattacatttgagtttgtagaccaggaacagttgaaagatccagtgtgctaccttaagaaggcatttctcctggtacaagacataatggaggacaccatgcgcttcagagataacacccccaatgccatcgccattgtgcagctgcaggaactctctttgaggctgaagagctgcttcaccaaggattatgaagagcatgacaaggcctgcgtccgaactttctatgagacacctctccagttgctggagaaggtcaagaatgtctttaatgaaacaaagaatctccttgacaaggactggaatattttcagcaagaactgcaacaacagctttgctgaatgctccagccaagatgtggtgaccaagcctgattgcaactgcctgtaccccaaagccatccctagcagtgacccggcctctgtctcccctcatcagcccctcgccccctccatggcccctgtggctggcttgacctgggaggactctgagggaactgagggcagctccctcttgcctggtgagcagcccctgcacacagtggatccaggcagtgccaagcagcggccacccaggagcacctgccagagctttgagccgccagagaccccagttgtcaaggacagcaccatcggtggctcaccacagcctcgcccctctgtcggggccttcaaccccgggatggaggatattcttgactctgcaatgggcactaattgggtcccagaagaagcctctggagaggccagtgagattcccgtaccccaagggacagagctttccccctccaggccaggagggggcagcatgcagacagagcccgccagacccagcaacttcctctcagcatcttctccactccctgcatcagcaaagggccaacagccggcagatgtaactggccatgagaggcagtccgagggatcctccagcccgcagctccaggagtctgtcttccacctgctggtgcccagtgtcatcctggtcttgctggccgtcggaggcctcttgttctacaggtggaggcggcggagccatcaagagcctcagagagcggattctcccttggagcaaccagagggcagccccctgactcaggatgacagacaggtggaactgccagtgtagagggaattctaag

SEQ ID NO: 121 - protein, 438 aa, Homo sapiens
MTAPGAAGRCPPTTWLGSLLLLVCLLASRSITEEVSEYCSHMIGSGHLQSLQRLIDSQMETSCQITFEFVDQEQLKDPVCYLKKAFLLVQDIMEDTMRFRDNTPNAIAIVQLQELSLRLKSCFTKDYEEHDKACVRTFYETPLQLLEKVKNVFNETKNLLDKDWNIFSKNCNNSFAECSSQDVVTKPDCNCLYPKAIPSSDPASVSPHQPLAPSMAPVAGLTWEDSEGTEGSSLLPGEQPLHTVDPGSAKQRPPRSTCQSFEPPETPVVKDSTIGGSPQPRPSVGAFNPGMEDILDSAMGTNWVPEEASGEASEIPVPQGTELSPSRPGGGSMQTEPARPSNFLSASSPLPASAKGQQPADVTGHERQSEGSSSPQLQESVFHLLVPSVILVLLAVGGLLFYRWRRRSHQEPQRADSPLEQPEGSPLTQDDRQVELPV

SEQ ID NO: 122 - DNA, 1855 bp, Homo sapiens
gagggctggccagtgaggctcggcccggggaaagtgaaagtttgcctgggtcctctcggcgccagagccgctctccgcatcccaggacagcggtgcggccctcggccggggcgcccactccgcagcagccagcgagcgagcgagcgagcgagggcggccgacgcgcccggccgggacccagctgcccgtatgaccgcgccgggcgccgccgggcgctgccctcccacgacatggctgggctccctgctgttgttggtctgtctcctggcgagcaggagtatcaccgaggaggtgtcggagtactgtagccacatgattgggagtggacacctgcagtctctgcagcggctgattgacagtcagatggagacctcgtgccaaattacatttgagtttgtagaccaggaacagttgaaagatccagtgtgctaccttaagaaggcatttctcctggtacaagacataatggaggacaccatgcgcttcagagataacacccccaatgccatcgccattgtgcagctgcaggaactctctttgaggctgaagagctgcttcaccaaggattatgaagagcatgacaaggcctgcgtccgaactttctatgagacacctctccagttgctggagaaggtcaagaatgtctttaatgaaacaaagaatctccttgacaaggactggaatattttcagcaagaactgcaacaacagctttgctgaatgctccagccaaggccatgagaggcagtccgagggatcctccagcccgcagctccaggagtctgtcttccacctgctggtgcccagtgtcatcctggtcttgctggccgtcggaggcctcttgttctacaggtggaggcggcggagccatcaagagcctcagagagcggattctcccttggagcaaccagagggcagccccctgactcaggatgacagacaggtggaactgccagtgtagagggaattctaagctggacgcacagaacagtctctccgtgggaggagacattatggggcgtccaccaccacccctccctggccatcctcctggaatgtggtctgccctccaccagagctcctgcctgccaggactggaccagagcagccaggctggggcccctctgtctcaacccgcagacccttgactgaatgagagaggccagaggatgctccccatgctgccactatttattgtgagccctggaggctcccatgtgcttgaggaaggctggtgagcccggctcaggaccctcttccctcaggggctgcaccctcctctcactcccttccatgccggaacccaggccagggacccaccggcctgtggtttgtgggaaagcagggtggacgctgaggagtgaaagaaccctgcacccagagggcctgcctggtgccaaggtatcccagcctggacaggcatggacctgtctccagagagaggagcctgaagttcgtggggcgggacagcgtcggcctgatttcccgtaaaggtgtgcagcctgagagacgggaagaggaggcctctggacctgctggtctgcactgacagcctgaagggtctacaccctcggctcacctaagtgccctgtgctggttgccaggcgcagaggggaggccagccctgccctcaggacctgcctgacctgccagtgatgccaagagggggatcaagcactggcctctgcccctcctccttccagcacctgccagagcttctccaggaggccaagcagaggctcccctcatgaaggaagccattgcactgtgaacactgtacctgcctgctgaacagcctgcccccgtccatccatgagccagcatccgtccgtcctccactctccagcctctcccca

SEQ ID NO: 123 - protein, 256 aa, Homo sapiens
MTAPGAAGRCPPTTWLGSLLLLVCLLASRSITEEVSEYCSHMIGSGHLQSLQRLIDSQMETSCQITFEFVDQEQLKDPVCYLKKAFLLVQDIMEDTMRFRDNTPNAIAIVQLQELSLRLKSCFTKDYEEHDKACVRTFYETPLQLLEKVKNVFNETKNLLDKDWNIFSKNCNNSFAECSSQGHERQSEGSSSPQLQESVFHLLVPSVILVLLAVGGLLFYRWRRRSHQEPQRADSPLEQPEGSPLTQDDRQVELPV

SEQ ID NO: 124 - DNA, 2545 bp, Homo sapiens
gagggctggccagtgaggctcggcccggggaaagtgaaagtttgcctgggtcctctcggcgccagagccgctctccgcatcccaggacagcggtgcggccctcggccggggcgcccactccgcagcagccagcgagcgagcgagcgagcgagggcggccgacgcgcccggccgggacccagctgcccgtatgaccgcgccgggcgccgccgggcgctgccctcccacgacatggctgggctccctgctgttgttggtctgtctcctggcgagcaggagtatcaccgaggaggtgtcggagtactgtagccacatgattgggagtggacacctgcagtctctgcagcggctgattgacagtcagatggagacctcgtgccaaattacatttgagtttgtagaccaggaacagttgaaagatccagtgtgctaccttaagaaggcatttctcctggtacaagacataatggaggacaccatgcgcttcagagataacacccccaatgccatcgccattgtgcagctgcaggaactctctttgaggctgaagagctgcttcaccaaggattatgaagagcatgacaaggcctgcgtccgaactttctatgagacacctctccagttgctggagaaggtcaagaatgtctttaatgaaacaaagaatctccttgacaaggactggaatattttcagcaagaactgcaacaacagctttgctgaatgctccagccaagatgtggtgaccaagcctgattgcaactgcctgtaccccaaagccatccctagcagtgacccggcctctgtctcccctcatcagcccctcgccccctccatggcccctgtggctggcttgacctgggaggactctgagggaactgagggcagctccctcttgcctggtgagcagcccctgcacacagtggatccaggcagtgccaagcagcggccacccaggagcacctgccagagctttgagccgccagagaccccagttgtcaaggacagcaccatcggtggctcaccacagcctcgcccctctgtcggggccttcaaccccgggatggaggatattcttgactctgcaatgggcactaattgggtcccagaagaagcctctggagaggccagtgagattcccgtaccccaagggacagagctttccccctccaggccaggagggggcagcatgcagacagagcccgccagacccagcaacttcctctcagcatcttctccactccctgcatcagcaaagggccaacagccggcagatgtaactggtacagccttgcccagggtgggccccgtgaggcccactggccaggactggaatcacaccccccagaagacagaccatccatctgccctgctcagagaccccccggagccaggctctcccaggatctcatcactgcgcccccagggcctcagcaacccctccaccctctctgctcagccacagctttccagaagccactcctcgggcagcgtgctgccccttggggagctggagggcaggaggagcaccagggatcggaggagccccgcagagccagaaggaggaccagcaagtgaaggggcagccaggcccctgccccgttttaactccgttcctttgactgacacaggccatgagaggcagtccgagggatcctccagcccgcagctccaggagtctgtcttccacctgctggtgcccagtgtcatcctggtcttgctggccgtcggaggcctcttgttctacaggtggaggcggcggagccatcaagagcctcagagagcggattctcccttggagcaaccagagggcagccccctgactcaggatgacagacaggtggaactgccagtgtagagggaattctaagacccctcaccatcctggacacactcgtttgtcaatgtccctctgaaaatgtgacgcccagccccggacacagtactccagatgttgtctgaccagctcagagagagtacagtgggactgttaccttccttgatatggacagtattcttctatttgtgcagattaagattgcattagtttttttcttaacaactgcatcatactgttgtcatatgttgagcctgtggttctataaaacccctagttccatttcccataaacttctgtcaagccagaccatctctaccctgtacttggacaacttaacttttttaaccaaagtgcagtttatgttcacctttgttaaagccacctttgtggtttctgcccatcacctgaacctactgaagttgtgtgaaatcctaattctgtcatctccgtagccctcccagttgtgcctcctgcacattgatgagtgcctgctgttgtctttgcccatgttgttgatgtagctgtgaccctattgttcctcacccctgccccccgccaaccccagctggcccacctcttccccctcccacccaagcccacagccagcccatcaggaagccttcctggcttctccacaaccttctgactgtcttttcagtcatgccccctgctcttttgtatttggctaatagtatatcaatttgcactt

SEQ ID NO: 125 - protein, 554 aa, Homo sapiens; identical to SEQ ID NO: 119

SEQ ID NO: 126 - DNA, 3346 bp, Homo sapiens
gcggaggcgggcgcgcgccccgcaggggagggggcggagagcgcgagaaggagggaggaggcgtccccgtgcgggagcccggctgaccgcgccagacccagacagagcatcgcggctttggctgcaacaggcggtgggctcggctcgggggcggaggcggcgaaagggcggggagcgcgaggaggagcgacctggcctcaccgctgccgcctcttccccgccgcatggacgagcgcctcagccttctgcgctcgccgccgccgccctcagcccgccaccgcgcccaccctcctcagcgcccagcgagcagcggcggtgcccacacgctggtgaaccacggctacgcggagcccgccgcaggccgcgagctgccgcccgacatgaccgtggtgcccggggaccacctgctggagccggaggtggccgatggtggaggggccccgcctcaaggcggctgtggcggcggcggctgcgaccgctacgagccgctgccgccctcactgccggccgcgggcgagcaggactgctgcggggagcgcgtggtcatcaacatctccgggctgcgcttcgagacgcagctgaagaccctttgccagttccccgagacgctgctgggcgaccccaagcggcgcatgaggtacttcgacccgctccgcaacgagtacttcttcgaccgcaaccggcccagcttcgacgccatcctctactactatcagtccgggggccgcatccgccggccggtcaacgtgcccatcgacattttctccgaggagatccgcttctaccagctgggcgaggaggccatggagaagttccgcgaggacgagggcttcctgcgggaggaggagcggcccttgccccgccgcgacttccagcgccaggtgtggctgctcttcgagtaccccgagagctccgggccggcccggggcatcgccatcgtgtccgtgctggtcatcctcatctccattgtcatcttctgcctggagacgctgccggagttccgcgacgagaaggactaccccgcctcgacgtcgcaggactcattcgaagcagccggcaacagcacgtcggggtcccgcgcaggagcctccagcttctccgatcccttcttcgtggtggagacgctgtgcatcatctggttctccttcgaactgctggtgcggttcttcgcttgtcctagcaaagccaccttctcgcgaaacatcatgaacctgatcgacattgtggccatcattccttattttatcactctgggtaccgagctggccgaacgacagggcaatggacagcaggccatgtctctggccatcctgagggtcatccgcctggtaagggtcttccgcatcttcaagctgtcgcgccactccaaggggctgcagatcctcgggcaaacgctgaaggcgtccatgcgggagctgggattgctcatcttcttcctctttattggggtcatccttttctccagcgcggtctactttgccgaggcagacgaccccacttcaggtttcagcagcatcccggatgccttctggtgggcagtggtaaccatgacaacagtgggttacggcgatatgcacccagtgaccatagggggcaagattgtgggatctctctgtgccatcgccggtgtcttgaccatcgcattgccagttcccgtgattgtttccaacttcaattacttctaccaccgggagacagaaggggaagagcaatcccagtacatgcacgtgggaagttgccagcacctctcctcttcagccgaggagctccgaaaagcaaggagtaactcgactctgagtaagtcggagtatatggtgatcgaagaggggggtatgaaccatagcgctttcccccagacccctttcaaaacgggcaattccactgccacctgcaccacgaacaataatcccaactcttgtgtcaacatcaaaaagatattcaccgatgtttaatatgtgatacaagtgacatgctgtgctcagtattgtgtggaacgtgcccccttggtctgcctatgcccttgttttatacatttccagaccattcatcaaggaaaggacctgaagaagtggaaagcacacttcattctccctctccctgctgcttcatactgaaacaggtgcctgttttgcaagtgggctgcattctctcagctctccttttccctcttaccctctctctcttaacattgtaaacaacagacttacgttaaacttcatttctagtacacgccctatttaaaaaagagcagtacatcctgggaggaaatgaaactaaagaacagttagagtaactgtttaacctcagaattttaaaggcagttgtttctttcctaagcacatcaattcgtagtaaatgatgcttcggtttgatggacctttcaacgttatttattgaatatgtatttcggttgcctaccctgtagatatgtggatgaagagtctaactagaataatgacttgtaaacccaccatgagttatttggtttttgacttaaattcctatttgaatcccctttcccggaattttaagtgtctctacaactttgaataaagggaaatgcccaagatgtcctgatctgactaattagtttaattctttcgggcttgctaagcatttctaaagcattagactaacagattcctgtgaagttctgtgcatatgtcccagccccaacaactatcaaagtctagaaacagatgttttcagtgttgctgagagaaacaaaaaatttcctaatgcatctgagagataagcttcggcagtatcacaagaagattaaagtggcagacaccccttccagcggaagttactaattcggacctgactgatgcagtttccatagcaacccatgtttcctgggaaacccgaaaaaggttgtcatggcatctcttgctctctagccccacctcccagcccctgccgtttccacagtaacctttccagatggttcctacttaaatgatttcataaggaaaaccactgtttgaataagccgcacaaaaaataaagttaagtctgagactctaaggaggtgaaatgaatcccaaatgcattttttaactatgaaaatcattatgtcattccataatgactgaatcaaggaggaaaatatggtgtttggaatgttagatattaaccacaataaggcatgatctggattaaatgccatttattaggcaataatttttaaagatgcttctctacagttttctttctccaagaactttcaagccaacaaatgaaatttaaaagcaaatgtaaaagtgttctgtacataagcaaatgagagattcgatcagtgtgcctgaaaccttactacaagggaccttcaggctttctcttt

SEQ ID NO: 127 - protein, 575 aa, Homo sapiens
MDERLSLLRSPPPPSARHRAHPPQRPASSGGAHTLVNHGYAEPAAGRELPPDMTVVPGDHLLEPEVADGGGAPPQGGCGGGGCDRYEPLPPSLPAAGEQDCCGERVVINISGLRFETQLKTLCQFPETLLGDPKRRMRYFDPLRNEYFFDRNRPSFDAILYYYQSGGRIRRPVNVPIDIFSEEIRFYQLGEEAMEKFREDEGFLREEERPLPRRDFQRQVWLLFEYPESSGPARGIAIVSVLVILISIVIFCLETLPEFRDEKDYPASTSQDSFEAAGNSTSGSRAGASSFSDPFFVVETLCIIWFSFELLVRFFACPSKATFSRNIMNLIDIVAIIPYFITLGTELAERQGNGQQAMSLAILRVIRLVRVFRIFKLSRHSKGLQILGQTLKASMRELGLLIFFLFIGVILFSSAVYFAEADDPTSGFSSIPDAFWWAVVTMTTVGYGDMHPVTIGGKIVGSLCAIAGVLTIALPVPVIVSNFNYFYHRETEGEEQSQYMHVGSCQHLSSSAEELRKARSNSTLSKSEYMVIEEGGMNHSAFPQTPFKTGNSTATCTTNNNPNSCVNIKKIFTDV

SEQ ID NO: 128 - DNA, 7085 bp, Homo sapiens
ctcgcctgctcgcaagatggcggacgaggacggggaagggattcatccctcagcccctcacaggaacggaggtggcggcggcggcggggggtctgggctccactgcgccgggaacggcggcgggggaggcggcggcccgcgggtcgtgcgcatcgtcaagtccgagtccggctacggcttcaacgtgcggggccaagtgagcgagggcgggcaactgcggagcatcaacggggagctgtacgcgccgctgcagcatgtgagcgccgtgctgcccgggggggcggccgatcgggccggggtgcgcaagggggaccgcatcctggaggtgaaccacgtgaatgttgagggggcgacacacaagcaggtggtggacctgattcgagcaggcgagaaggaattgatcttgacagtgttatctgtacctcctcatgaggcagataacctagatcccagtgacgactcgttgggacaatcattttatgattacacagaaaagcaagcagtgcccatatcggtccccagatacaaacatgtggagcagaatggtgagaagtttgtggtatataatgtttacatggcagggaggcagctgtgttctaagcggtaccgggagtttgctatcctacaccagaacctgaagagagagtttgccaactttacatttcctcgactcccagggaagtggccattttcattatcagaacaacaattagatgcccgacgtcggggattggaagaatatctagaaaaagtgtgttcaatacgagtaattggtgagagtgacatcatgcaggaattcctatcagaatccgatgagaactacaatggtgtgtccgacgtagagctgagagtagcattaccagatggaacaacggttacagtcagggttaaaaagaacagtactacagaccaagtatatcaggctatcgcagcaaaggttggcatggacagtacgacagtgaattactttgccttatttgaagtgatcagtcactcctttgtacgtaaattggcacctaatgagtttcctcacaaactctacattcagaattatacatcagctgtgccaggcacctgcttgaccattcgaaagtggctttttacaacagaagaagaaattctcttaaatgacaatgaccttgctgttacctacttctttcatcaggcagtcgatgatgtgaagaaaggttacatcaaagcagaagaaaagtcctatcaattacagaagctatacgaacaaagaaaaatggtcatgtacctcaacatgctaaggacttgtgagggctacaatgaaatcatctttccccactgtgcctgtgactccaggaggaaggggcacgttatcacagccatcagcatcacgcactttaaactgcatgcctgcactgaagaaggacagctggagaaccaggtaattgcatttgaatgggatgagatgcagcgatgggacacagatgaagaagggatggccttctgtttcgaatatgcacgaggagagaagaagccccgatgggttaaaatcttcacgccatatttcaattacatgcatgagtgcttcgagagggtgttctgcgagctcaagtggagaaaagaggaatattagttagagactgattatctcatgtgagccaggacattcttccagcaaggttggcctctggatggtgaacgggctgtgcaaaaaagccctgcttcttcccttgtctagagggtggacattggctacaggctcttccatctctcatgacttcatggaccctcctctgccagttttttaaatcagatcaccctccatgttgttcctgacccacaggggaagctgtcctcagttgtagccgtcttgactggatgagtcctggcagtctttctaggcgaaccaagaatgtttgtgtgagggaaggtgtttgctgttgctttactgctgtctgtatgtgccagtgctggaacagaatttggaagattctgaataattagttacttattctcaaagaaaatctttgaaagaatcaggaggtcaagtcaagaacatgaaaatttatattttagtacagtagaaagaacattgggctctgggaattttatctgggttttctcctggcttttttttccctctgtgtaattttgggtaaatcagcctccctagctttcagttttctcttctgtgaaacaggaagactgaaccacgtaattaatatccaaggtcccttccggctctaaaaggctatgattctagatgagaagttatatcaagaaagatgtggccaatcagattgagtcatccaggcatacctttttagcttctgtttgtggagttgtctccagataagaggagatgtgccttcccaataactctttttttttttcctttcagaacattttccagatggcgaggtcacagcagagagatgtggccacctagcctttccttatccccttcccttcccttcacccccatcctcttactcctttcatgtcccatttcagacagagtaaccattaacaaaaaagaagagaaaaagttaaagtcgttatattcaaaagccctaaactaaatattattaataaccccctctgaatttcatgtctctggaattgaggtggtagtgaacagcagatcggtcagcaccagaagtcaactgagttaaggcaggaaaagaaataagcccaaccaacttgccaaaggtatctttgtcctttcacctgggcctcataccaacagcctctccttgtactatatttttaaaactggaactatgaacttcatccatttgcactgttcagacatatatatgtatgtatgtaaaaattatatatacacaaattagctgcacgtatatacatatatatatttctttttaaatttcatattgatggcagtaccttttttagcttgtgtttttacacacctttcactagaatccatgacctccctcgtgctctctttcttttgaaacaaactttaaaaaggaaaaaaaagcattttacagggaaaaatacctctcctcatgaaggacttgaaaagtttacaacctgcttggatttttgcccctttttttgtattgagtatagattccggctcatgggttgccatagagtctaggaacaaggagtatagtttctttatcttccaagagggtgctggggaggagaaagaggtgtgtttctcaaggttaacaggctgtagttctgcagggagagcctgaagtcctggtatgggctcttgattctgtgacaatttttttgatccatctatttctctcactcctggctttctagccacattctgcacctccttcctgctttcctagagcctcggtatgctttccctcaaccgaccctggctcaggaggttgatgccatgggaacctgaacctgaaacacttcatggtagtaatttcctgttttccttgccttttttttttttttttttttttttttctgagacagggtcttactctgtcgcccagactggaatgtggtggcatgaacatagctcactgttaccttgaattctgggctcaggtgatccttccgcctcaccctcctgagtagctgggactacaggtgtgcaccaccacacctggctaattcttcttaaaatttttttgtagagacagggtctcactatgttgcccaggctggtctcaaactcctggcctcaggtgatcctcttgtctcagcctcccaaagtgctgggattacaggcatgagccactgtgtccttccctgccttttttgcagcagggatagtactcaggaccagagttaagctgataccttaggcacacaggttggacttacatagaggaaagaaagcaagaaatgccctatgtacatgaggttttacctcctccattcctgaccaataaccacccataactacggcattctctgtgacttccttaaacagcagtgatgggaagggatccaatagtatcttcaaggccttggggaaacttgcagtgggtcagtggtctgtgccaaccaaacgatagccccatccaagccagctgagaacctaggaaggagtagtaggaatatggttgattagattggatctcccaagttttaattgaaaggagactgaacgaaaacctttctgctttctgtccgttaaagagctcctcatctgatcttgcagctagaccctttgagacttaagagctgcatcccaggatcagaagccagggctaattggggtaggacaatattcccagcccctaagctctgtagataatgcataagaagcaccaagtcaggctcagatgcaactaaaacacatctttgagccttttctttttcccttctcccctttctaaacaaaaaccttcctaggatggcatcttttgctctaactgggagacagtcataattggttgtagtcaattctactaagcagtgttggggtggttggaaagtctcttttttgtaatttgtttttgcaaatcattgtgaggccactttttctttctttctttctttctttctttctttctttctttctttcgttctttcgttctttcgttctttctttctttctttctttctctttctttcttttgctttccttctttcatctcttttttgtaatttgttgttgcaaatcattgtgaggccacttttctttccccttccttccttcctttttttctgttttttttttttttttttcccagagtcttgctctgtcgcccaggttggagtgcagtggcacgatctcggctcactgcaccctctgcctcttgggttcaagcgattctcctgcctcagcctcccaagtagctgggattacaggcatacaccaccacgccccactaattttttgtatttttggtagggcggggtttcaccatgatggccaggttggttttgaactcctgacctcaagtaatctgcccacctcggcctcccaaagtgctaggattacaggagtgagccactgcgcctggcccacttttctttctttccttcttattttgttatgctggcagccatttgcccctgcatggtatgggatcaaagaggacagcctttcctccctcaccttctccaaatctaggtgaaatcacagagtacaaaacgtgagaatgctgaatgtgtaaagttgcagagggatccctaatttgaagactttgacacagaactaacttcttttgacttaaatgaatttaaaatgagccaaaggaccctgaaaagaagacatgttgatttcccactcctagatgctaaagagacttggcaccagctttgttcaaactgtaaaaatagcaatttgcccctactcgctcagagtgggacagtagtgaacagagctgggattccatgcgacagcttgaatgctgaccttcagacatgagacatagggatttggaggccccttagaatgggtagatggtgttatgttccctttctggcatagcattcacttggtgctttggagattaggtgagggccctataggtagttggcctgttggcagaatttatttaggaacagcccttttgaaagtgtcccagtaacaacgcacccagctgcagcaaggaggtggggaaggagggcaccccaaaggacagcgccttcttctcttccacccatgcacggccttgggtgatggaggcgggttccctgtggctgcgtggatcccataggatcaagcccttctttgcatgaagcagtgttgtgactcttctctctccccttcctctgcacttcctttctgtaatccctactgttcttcttagtcccagcttctgcccagggaggcttctacccagacttcttttgcaatttgtccctgggaagagggggtctcccagtgcccccagcttcatcccagcagaaccagcaggatcctcctggtctctcactggccttcctccacacttggtttctatcctcaggggtagaagctcagagctttttatggcccaggagaaaatgtagaccctgagaaacctgtccctgcagaaaggttcccttgggccatgctttgggccctctgctctttatatgtttattctattctccatttttccaccccgtccttaccctaggcctaaacacaggtacagatatgtgcatgctcagggcagctcctaggcctggactgagctctcaggggggaattagataaatattccaacatcctcatgcctggcccatttagtttcatcctttagttacccaggccagtagctttgggttatcccttcctgtagctccaaacccagcacttggagcagcaaaatagggcactgacaggagatgaaactctctcctatctcagaatttgccaacttctgggctgggctcctaggaggtagttttcttgaaggggactgcatcctagttgacctgaattttccagaccaggagggactgctgtgctctcccttctcgccatcatactgtttggctagattcattcagcagtagaagctgtttgatctgttgaccccagcatactgctgtttcttcaccagcttcattgtgtcacagtagcttcctttgggaggatgatgtgatagaacactcagagagagggagggagaagagagatagtgggtatgcttctctagctccccatcttccaggtccacctcttgacttcctgttcccctaaacctgagcacatcacgccaggcctctttgctgccaggacagcatcagctcactcctcagcaataatctagggtatgtgggaaggtcagggctgtggtaaggaatagaatcaaagaggggagtgatacggggtgggggcacttggccgcctgctaaacttggacattaattttatatcatgacccccttttaagccagtgagctgggcttcagtttttcccaggccatgcacatttaatttatttcagagaaactctaattgtattttcactgcagtatcttgtattttttatttgtgatttaagaaatgtgaagagaaaatacacagacacaataatggctaacattgtttctttcattccttgttctagagctaaccactctaaaattgtttggtaatgtcacttagtgtaattaattgtaacatattcttttaaataaattgatttattgatcaaacactt

SEQ ID NO: 129 - protein, 528 aa, Homo sapiens
MADEDGEGIHPSAPHRNGGGGGGGGSGLHCAGNGGGGGGGPRVVRIVKSESGYGFNVRGQVSEGGQLRSINGELYAPLQHVSAVLPGGAADRAGVRKGDRILEVNHVNVEGATHKQVVDLIRAGEKELILTVLSVPPHEADNLDPSDDSLGQSFYDYTEKQAVPISVPRYKHVEQNGEKFVVYNVYMAGRQLCSKRYREFAILHQNLKREFANFTFPRLPGKWPFSLSEQQLDARRRGLEEYLEKVCSIRVIGESDIMQEFLSESDENYNGVSDVELRVALPDGTTVTVRVKKNSTTDQVYQAIAAKVGMDSTTVNYFALFEVISHSFVRKLAPNEFPHKLYIQNYTSAVPGTCLTIRKWLFTTEEEILLNDNDLAVTYFFHQAVDDVKKGYIKAEEKSYQLQKLYEQRKMVMYLNMLRTCEGYNEIIFPHCACDSRRKGHVITAISITHFKLHACTEEGQLENQVIAFEWDEMQRWDTDEEGMAFCFEYARGEKKPRWVKIFTPYFNYMHECFERVFCELKWRKEEY

SEQ ID NO: 130 - DNA, 3297 bp, Homo sapiens
tggaggggggaggtttttgttgaggagagcgcggccggagagcagagctccgggacccaggtgaccgggaaagcaggcagccccagcggcgggagcagccggcagcagcccaggcccggggactggggtgggggtgggaggggggctgaggggaggacctgaaggggggcggcagggcaaaagggacccctggagccctgccgccatcagagatcaagcatctggcatcagggatcttcggacccagcagaaggatccgccacaggggaggtgtcctcccagggaagccaacgagagattcacctgccccacatcaggagtgggccccccttactgacgctgctggcaaccatagcaggccccttaacccctcagtctcctccccatcaccctcctcaggccctttccccgcctccagctctcatctcaactcccagttcccagccctctaagccctagcacccccggctaccacctaaccctccaggtcttggccatactcacccccatcctgggacatttgccagatctctgggagggagatcgtttgtttaggcgatgccccctggtggcatgacagcgtctgcctagacccctgacccctagcactcaactccctgggcctcctttgtgtgaagagccgcccctctgcttagcagcgtggttgggggccaaagggaaagccagccccagctgggcccccgggccccaccacttatctccttgctgggcagctccccttggcctttgggcctctccctgctcccctcggcccctcctcctgggccgcctcaatgaaggagccggatgccatcaagctgtttgtggggcagatcccgaggcatctggaggagaaggacctgaagcccatcttcgaacagtttggtcggatctttgagctgactgtcatcaaggacaagtacaccgggctgcacaagggatgtgccttcctgacatactgtgcccgggattcagccctgaaggcccagagcgccctgcacgaacagaagacgcttccagggatgaacaggccgatccaggtcaagccagccgacagcgagagccgaggagaagaccggaagctctttgtggggatgctagggaagcagcagacagatgaggacgtccggaagatgtttgagcccttcgggaccatcgacgagtgcactgtgctccgggggccagatggcaccagcaaaggctgcgccttcgtgaagttccagacccacgctgaggcccaggcggccatcaacacccttcacagcagccggaccctgccaggtgcctcgtccagcctggtggtgaagtttgctgacactgagaaggagcgaggtctccgccgcatgcagcaggtggccacccagttgggcatgttcagccccatcgccctccagtttggagcctacagcgcctacacccaggccctgatgcagcagcaggcggccctggtagcggctcacagtgcctacctcagccccatggccaccatggctgccgtgcagatgcagcacatggctgccatcaatgccaatggcctcatcgccacccccatcaccccatcctcaggaaccagcacccctcctgccatcgctgccacgcctgtctctgccattccggctgccctgggcgtcaacggctacagcccggtgcccacccagcccactgggcagcctgcccctgatgctctgtatcccaacggggttcacccctacccagcccagagccccgcggcccccgtggaccccctgcagcaggcctacgcggggatgcagcactacacagcagcctacccagcagcctacagcctggttgcacctgcgttcccgcagcctccagccctggtcgcccagcagcccccaccaccacctcaacagcagcagcagcagcagcagcagcaacagcagcagcagcaaagagaaggccctgatggctgcaacatcttcatctaccacctgccccaggagttcactgactcagagatcctccagatgtttgtcccctttggccacgtcatctcagccaaagtctttgttgaccgagccaccaatcaaagcaaatgttttggctttgtgagtttcgacaatccggccagtgcccaggctgccatccaggccatgaatggcttccagatcggcatgaagcgcctcaaagtccagctaaagcggcctaaggatgccaaccggccctactgagggcccccaggtctggagatcccagaggaaggggcgcctcacaccctcttcccacgactggccccggccctctccgcacacctgccctgggccttgactgggttctggggcaaacgctgcttcgtggcccccgggggcacaagacaccggcccctcccacccccctgcctctctgaagggccatggctatgcttccctggctccaagggcccatttcctcctagatgcccttttggcctttgtgagggagcgaggaacaggctcgaaggctccggggtatctgccttctgctgggctcctgtgacaggccttctgtacccagcgtttgtacttgcctcccccaacagtgggcctgttctacccgtgcaggccccaggagagccgcaggggcctgccacacactcccagctcaccctcaccccagcctcttccccacattaggggtttcttggaagctggctctcactcccctccaccctcagctagaggtaggatatccctgattcctgggctcccagccttaaaactcactgcctcccccaagggccccctctaaggagggtgtgggggagccctgagggctgcctctctgccagtcagccacagagaccctcctcctttcacgaggaaaagaccttcccctgaacccctaaaaatgtttacagtctctgctggttccctctgtgtaaataccactaccacccgtgcgttatccagcccgcccggcctggcccggacgctgccatctctctttctgggagtttagacaatgttgcccttggatttttttctctctcttaatttctccctttgctttggggggtaattgggtattgggaggaggggtgtggggaggggtcaaggggtttattacctgatcattttctttaggaagaggttttagggaaaagaaaatggggtgggggtgggggtggtaaggggagaccggggagtcagtttcagacagttctctatgcttaacttatttatttattgcattttacttttaaagagttggtcttttctgtctaaataaagaaaaaagtttaaaagcatcaaataagagtcttggaaggttgagggtaggggattgttccctacccac

SEQ ID NO: 131 - protein, 465 aa, Homo sapiens
MKEPDAIKLFVGQIPRHLEEKDLKPIFEQFGRIFELTVIKDKYTGLHKGCAFLTYCARDSALKAQSALHEQKTLPGMNRPIQVKPADSESRGEDRKLFVGMLGKQQTDEDVRKMFEPFGTIDECTVLRGPDGTSKGCAFVKFQTHAEAQAAINTLHSSRTLPGASSSLVVKFADTEKERGLRRMQQVATQLGMFSPIALQFGAYSAYTQALMQQQAALVAAHSAYLSPMATMAAVQMQHMAAINANGLIATPITPSSGTSTPPAIAATPVSAIPAALGVNGYSPVPTQPTGQPAPDALYPNGVHPYPAQSPAAPVDPLQQAYAGMQHYTAAYPAAYSLVAPAFPQPPALVAQQPPPPPQQQQQQQQQQQQQQQREGPDGCNIFIYHLPQEFTDSEILQMFVPFGHVISAKVFVDRATNQSKCFGFVSFDNPASAQAAIQAMNGFQIGMKRLKVQLKRPKDANRPY

SEQ ID NO: 132 - DNA, 656 bp, Homo sapiens
atggatacttctatggatgattggcaggctccacgatctggagggagcgtgacccctccatgcactgggcccactcagagcacgccctcagtgcagggattatctgtggacatcaaaccttgggccgggcttgggggcagggcggggccgggggcggggcctcgccggctcgcggccggtcgccttgacgaccgcagcaagatggagacgctgccaggcttgctgcagcggcccgaccccggggcgcttagcgcagcgcagctggagcagctgcgaaaattcaagattcagactcggattgctaacgaaaagtacctaaggacccacaaagaagtagagtggctcataagtggtttcttcagagaaatatttttgaaaagaccagacaacatcctagaatttgctgcagactacttcacggatccaagacttcccaacaagattcacatgcagctaattaaagacaagaaagcggcttaattagcaaaatcatgatgctcagctgttgggagagaccagacggaatccagcctcgggggtcatctggaggcatgagagccctactgccatcagtgtgggtttccaagctgccttgggctctgtctactgtcgcaaaagcttttaaagatattcattaaacacggaccttcctgctc

SEQ ID NO: 133 - protein, 159 aa, Homo sapiens
MDTSMDDWQAPRSGGSVTPPCTGPTQSTPSVQGLSVDIKPWAGLGGRAGPGAGPRRLAAGRLDDRSKMETLPGLLQRPDPGALSAAQLEQLRKFKIQTRIANEKYLRTHKEVEWLISGFFREIFLKRPDNILEFAADYFTDPRLPNKIHMQLIKDKKAA

SEQ ID NO: 134 - DNA, 1314 bp, Homo sapiens
ggcgcgccgcaggcagcactggcgggggcctttcctgccgccgacgccggggtcctccctcaggtctcattctgtgcctgtgaacatggcggcgcccgttgtcacggccccgggcagagctctgctgcgggcgggcgctggacggctgcttcggggaggcgtccaggagctactgcggccgcgacatgaagggaacgcccctgacctggcctgcaacttcagcctttctcaaaatcggggcacggtcatcgtggagcgctggtggaaggtaccgctggccggggagggccggaagccgcgcctgcaccggcgacatcgcgtctataagctggtggaggacacgaagcatcggcccaaagaaaacctggagctcatcctgacgcagtcggtggagaatgttggagtccggggtgacctggtctcagtgaagaaatctttaggccggaatcgactccttcctcagggactggctgtatatgcatcccctgaaaacaagaagctgtttgaagaggagaaattgctgagacaagaaggaaaattagagaagatccagaccaaggcaggtgaggcgacagtgaaatttctaaaaagctgtcgcctggaggtagggatgaagaacaatgtcaaatgggagctgaaccctgaaatagttgcccgccacttctttaagaatcttggtgttgtggttgccccacatacattaaagttaccagaagagcctatcacacggtggggcgagtattggtgtgaggtgacggtaaatgggcttgatactgtgagagtgcctatgtctgtcgtgaactttgagaagcccaagaccaaaagatataagtactggttagcccagcaagctgccaaggctatggcccccaccagcccccagatctaaatctactctccctccaaggcagcaaagcagaatcgggagcagtggagcagaaatgtgcaagcaccctgatctcactcccagctctgaccaaatacagaattttagagaacatctgaagacatcagactgcactgcgtatacatgttgaattcttcatttttgccatctttaactgtcatcactggggcagggaagtcctgttccagaagtaccaggctgtagatttgataagctagatgcagtagaccgaaaccatccaaaacctgtttagcttcttcctccattggagtttattgggacaaacaggagagccagccattgtctccagtacttgcctcattctcatcatccaaactgaacatttgtatcccaagcagaaataaagagaatatgttctttttaaaaaaaaaaaaaaaaaaaaaaaa

SEQ ID NO: 135 - protein, 267 aa, Homo sapiens [sequence omitted]

SEQ ID NO: 136 - DNA, 887 bp, Homo sapiens
gttgcctaaacctctgccacccacctgtgaacttcactttgccacagggaggcactgaactgaaaaactgccttgtaagaggtgtcgcccctctgtctactccctttcttatatcaagaggggaaaaacacgtaactacctctacccgatctggtcaccatacgcctattacctttactgttacaagtaccggatcactctccgggagaagatgctgcctcgttgttataaaagcatcacttataaggaagaggaggacttgacactccagccccgttcctgcctccagtgctcctgagtccctagtaggcctccaggagggcaaaagcaccgagcagggtaaccacgaccagcttaaagaactgtattcggctgggaacttgacggtgctggctactgaccccctgctccaccaggacccagtacagttagactttcacttccgccttacctcccagacctctgcccattggcacggccttctctgtgaccgtcgactcttcctggatatcccatatcaggccttggatcaaggcaaccgggaaagtttgactgcaaccctggagtacgtggaagagaagacaaatgtggactctgtgtttgtgaacttccagaatgatcggaacgacagaggtgccctgctgcgggccttcagctacatgggctttgaggtggtcagaccagatcaccctgccctccctcccttggacaatgtcatctttatggtgtatccccttgaaagggatgttggccacctgcccagtgagcctccttgaacatgcttattccaacgctttgaggggctggaagccttgacacatggaatcaggggcccgggatgtgattcaggacactttccatcctaggaataaagggtagtgccatcc

SEQ ID NO: 137 - protein, 187 aa, Homo sapiens
MLPRCYKSITYKEEEDLTLQPRSCLQCSESLVGLQEGKSTEQGNHDQLKELYSAGNLTVLATDPLLHQDPVQLDFHFRLTSQTSAHWHGLLCDRRLFLDIPYQALDQGNRESLTATLEYVEEKTNVDSVFVNFQNDRNDRGALLRAFSYMGFEVVRPDHPALPPLDNVIFMVYPLERDVGHLPSEPP

SEQ ID NO: 138 - DNA, 2331 bp, Homo sapiens
cggctgaagcgccgccggcggggctcactgtggtggtgtgagtgggaggcggcggcgctggtggctgcagctggggtgaggcgcgaggcggcgcactcgacggctgactggagcagcggtaaaggcgaggatggagaccgaaggatataagtcaaagagtacagcagaaaatgtctactgaacggacttcttggacaagcctgtccaccattcagaaaatagccctgggccttgggatcccagccagtgcaacagttgcctatatcctataccgcaggtatagggaaagcagagaagagcggctgacatttgttggggaagatgacattgagatagagatgcgggttccccaggaggctgtgaaactcatcattggccggcaaggagccaatattaaacagctgcggaaacagacaggtgctcggattgatgtggacacagaggatgtaggcgatgagcgagtgctgcttatcagtggttttcctgttcaggtgtgcaaggccaaagcagcaatccatcagatcctgacagagaataccccagtgtctgagcagctttcagttccccagagatctgtgggcagaatcatagggagaggcggcgagacaattcgttctatctgtaaggcatctggagccaaaattacctgtgacaaagaatcagaagggacattactactatcaagacttataaaaatctcaggaacacagaaggaagtggcagcagccaagcatttgatactggagaaagtttcagaagatgaagaacttcggaagagaattgctcattctgcagaaaccagggtcccacgcaaacagccaatcagtgtgagaagagaagacatgacagagccaggtggagctggagagccagcattatggaaaaacaccagttctagcatggagccgactgcacccctggtgactcctccacccaaaggaggaggcgacatggctgtggtagtgtcaaaggaaggttcctgggagaaacctagtgatgacagctttcagaagtctgaagcccaggccatcccagagatgcccatgtttgaaatccccagtcctgacttcagttttcatgctgatgagtacctagaagtctacgtttctgcttctgagcaccctaaccacttctggatccagatcgttggctcccgcagcctgcaattggataagcttgtcaatgagatgacccagcactatgagaatagtgtgcctgaagacttgactgtgcatgtaggagacattgtagcagcacctttacctacaaatggttcctggtatcgagcccgggtcctcggcaccttggagaatgggaacttggacctctattttgttgactttggagataatggagattgcccactgaaggacctcagggctctcaggagtgacttcctaagccttccatttcaagcaatagaatgtagtctggcacggattgctccctcaggtgaccagtgggaagaggaagctttggatgagtttgatagactcactcattgtgctgactggaagcctctggtagccaagatctctagctatgtccagactgggatctcaacttggccaaagatctacttatatgatactagcaatgggaagaaacttgatattgggctagaattagtacacaaaggatacgcaattgagcttcctgaagacatagaagaaaacagagctgtcccagacatgttgaaggacatggccacagaaacagatgcctctctcagcacgttgctcactgagaccaaaaagagctctggagagataacacataccctgtcctgcctcagcttatcagaagctgcttccatgtctggtgatgataaccttgaagatgactacttactcggaagtctgggcttcagtttgctcagccatctgctttgctgtatgttgcctgcaatgaactcgctgaagcatgctcagccctggaactggtgctaccagagttccgtagggaacctttactctttagaggttccctgatataaatcattcataagacttcctaccctggaaaatgagtaatgtctcattcttacctgcagtttgttactatgtataaaagtctttttctttaatatgcctttaagtcttacctgtttacagcccattctgatgggttctttgtcattctgttagtataacccagtacttttcctgctgcctggaatgccctcttctatgttacctattctgtccgttgagatgccccaacttgggccaaagccaagagatctatgtgccttctctggttttctccacatctatagcacctcaactgaaatatatggataaaaacagcctaacaaaaaaaaaaaaaaaa

SEQ ID NO: 139 - protein, 606 aa, Homo sapiens
MSTERTSWTSLSTIQKIALGLGIPASATVAYILYRRYRESREERLTFVGEDDIEIEMRVPQEAVKLIIGRQGANIKQLRKQTGARIDVDTEDVGDERVLLISGFPVQVCKAKAAIHQILTENTPVSEQLSVPQRSVGRIIGRGGETIRSICKASGAKITCDKESEGTLLLSRLIKISGTQKEVAAAKHLILEKVSEDEELRKRIAHSAETRVPRKQPISVRREDMTEPGGAGEPALWKNTSSSMEPTAPLVTPPPKGGGDMAVVVSKEGSWEKPSDDSFQKSEAQAIPEMPMFEIPSPDFSFHADEYLEVYVSASEHPNHFWIQIVGSRSLQLDKLVNEMTQHYENSVPEDLTVHVGDIVAAPLPTNGSWYRARVLGTLENGNLDLYFVDFGDNGDCPLKDLRALRSDFLSLPFQAIECSLARIAPSGDQWEEEALDEFDRLTHCADWKPLVAKISSYVQTGISTWPKIYLYDTSNGKKLDIGLELVHKGYAIELPEDIEENRAVPDMLKDMATETDASLSTLLTETKKSSGEITHTLSCLSLSEAASMSGDDNLEDDYLLGSLGFSLLSHLLCCMLPAMNSLKHAQPWNWCYQSSVGNLYSLEVP

SEQ ID NO: 140 - DNA, 2609 bp, Homo sapiens
gtcgcggccgcagcagcaacagcagcagcagcagcggcaggcagcagccgggcagccaggcagcgggggttgaggcacacagggaaggtgcaggggcctgaggtgcagctcgaatgggacagggcccccagcgctggacagatgcagtgccaaacttgatgccaccttccagcttctccggactgaagagggaatggatgcagccacagctccaaagcaagcctggcccccatggcccccgctccttttcctcctcctcctacctggagggagcggtggcagctgccctgctgtgtgtgactgcacctcccagccccaggctgtgctctgtggccacaggcaactggaggctgtacctggaggactcccactggacactgagctcctggacctgagtgggaaccgcctgtgggggctccagcagggaatgctctcccgcctgagcctgctccaggaattggacctcagctacaaccagctctcaacccttgagcctggggccttccatggcctacaaagcctactcaccctgaggctgcagggcaatcggctcagaatcatggggcctggggtcttctcaggcctctctgctctgaccctgctggacctccgcctcaaccagattgttctcttcctagatggagcttttggggagctaggcagcctccagaagctggaggttggggacaaccacctggtatttgtggctccgggggcctttgcagggctagccaagttgagcaccctcaccctggagcgctgcaacctcagcacagtgcctggcctagcccttgcccgtctcccggcactagtggccctaaggcttagagaactggatattgggaggctgccagctggggccctgcgggggctggggcagctcaaggagctggagatccacctctggccatctctggaggctctggaccctgggagcctggttgggctcaatctcagcagcctggccatcactcgctgcaatctgagctcggtgcccttccaagcactgtaccacctcagcttcctcagggtcctggatctgtcccagaatcccatctcagccatcccagcccgaaggctcagccccctggtgcggctccaggagctacgcctgtcaggggcatgcctcacctccattgctgcccatgccttccatggcttgactgccttccacctcctggatgtggcagataacgcccttcagacactagaggaaacagctttcccttctccagacaaactggtcaccttgaggctgtctggcaaccccctaacctgtgactgccgcctcctctggctgctccggctccgccgccacctggactttggcatgtccccccctgcctgtgctggcccccatcatgtccaggggaagagcctgaaggagttttcagacatcctgcctccagggcacttcacctgcaaaccagccctgatccgaaagtcggggcctcgatgggtcattgcagaggagggcgggcatgcggttttctcctgctctggagatggagacccagcccccactgtctcctggatgaggcctcatggggcttggctgggcagggctgggagagtaagggtcctagaggatgggacactggagatccgctcagtgcagctacgggacagaggggcctatgtctgtgtggttagcaatgtcgctgggaatgactccctgaggacctggctggaagtcatccaggtggaaccaccaaacggcacactttctgaccccaacatcaccgtgccagggatcccagggcctttttttctggatagcagaggtgtggccatggtgctggcagtcggcttcctccccttcctcacctcagtgaccctctgctttggcctgattgccctttggagcaagggcaaaggtcgggtcaaacatcacatgacctttgactttgtggcacctcggccctctggggataaaaactctgggggtaaccgggtcactgccaagctcttctgacctttccttccccagtggggaacccaccaagtccgcttcagataccaaaggggaagacagaaccaaggctgcttgaaccagaacctagtcccgagcagcaccgctctcctgcacctcccgcctgcgttgtgcctcctgccggagagtctgcttcctgagcttttccggtctgaggatagcattgtcatttcttctctgagggtcccagggagctgcagatgcagaccccgttgttagtccagcccccgcttcaccccctccacacacaaaacaggaaacataatcaaagcgctagtcagctagtctaaccactaggctttcttcacacatgcttatatcctttaataaccaattgccaaccacggctataagattatttcagaggtggggctgggaagtgccacttgctccttagagtctgtttgtcaaccaggcagagtccctttcttttctgctccccaccccaaccctgcccctatgtacaggaataagagcaaaggacccacaggctacagagaagaggatggggacagagtgtgggatggagaggacagaccatatactgcactgtgtttgcatgagcctctaccaccttcctctatctaccagatcattaaacctgctgtcaaagggc

SEQ ID NO: 141 - protein, 593 aa, Homo sapiens
MDAATAPKQAWPPWPPLLFLLLLPGGSGGSCPAVCDCTSQPQAVLCGHRQLEAVPGGLPLDTELLDLSGNRLWGLQQGMLSRLSLLQELDLSYNQLSTLEPGAFHGLQSLLTLRLQGNRLRIMGPGVFSGLSALTLLDLRLNQIVLFLDGAFGELGSLQKLEVGDNHLVFVAPGAFAGLAKLSTLTLERCNLSTVPGLALARLPALVALRLRELDIGRLPAGALRGLGQLKELEIHLWPSLEALDPGSLVGLNLSSLAITRCNLSSVPFQALYHLSFLRVLDLSQNPISAIPARRLSPLVRLQELRLSGACLTSIAAHAFHGLTAFHLLDVADNALQTLEETAFPSPDKLVTLRLSGNPLTCDCRLLWLLRLRRHLDFGMSPPACAGPHHVQGKSLKEFSDILPPGHFTCKPALIRKSGPRWVIAEEGGHAVFSCSGDGDPAPTVSWMRPHGAWLGRAGRVRVLEDGTLEIRSVQLRDRGAYVCVVSNVAGNDSLRTWLEVIQVEPPNGTLSDPNITVPGIPGPFFLDSRGVAMVLAVGFLPFLTSVTLCFGLIALWSKGKGRVKHHMTFDFVAPRPSGDKNSGGNRVTAKLF

SEQ ID NO: 142 - DNA, 3054 bp, Homo sapiens
agagagctaggtgcagagcttcaggctgaggcgctgctgagagggcctcgccccgcctctgccgccagctgcaccccactcctggaccaccccctgctgagaaggacagggagccaaggccggcagagccaaggctcagtcatgagaacacaaattgaagtgatcccttgcaaaatctgtggggacaagtcgtctgggatccactacggggttatcacctgtgaggggtgcaagggcttcttccgccggagccagcgctgtaacgcggcctactcctgcacccgtcagcagaactgccccatcgaccgcaccagccgaaaccgatgccagcactgccgcctgcagaaatgcctggcgctgggcatgtcccgagatgctgtcaagttcggccgcatgtccaagaagcagagggacagcctgcatgcagaagtgcagaaacagctgcagcagcggcaacagcagcaacaggaaccagtggtcaagacccctccagcaggggcccaaggagcagataccctcacctacaccttggggctcccagacgggcagctgcccctgggctcctcgcctgacctgcctgaggcttctgcctgtccccctggcctcctgaaagcctcaggctctgggccctcatattccaacaacttggccaaggcagggctcaatggggcctcatgccaccttgaatacagccctgagcggggcaaggctgagggcagagagagcttctatagcacaggcagccagctgacccctgaccgatgtggacttcgttttgaggaacacaggcatcctgggcttggggaactgggacagggcccagacagctacggcagccccagtttccgcagcacaccggaggcaccctatgcctccctgacagagatagagcacctggtgcagagcgtctgcaagtcctacagggagacatgccagctgcggctggaggacctgctgcggcagcgctccaacatcttctcccgggaggaagtgactggctaccagaggaagtccatgtgggagatgtgggaacggtgtgcccaccacctcaccgaggccattcagtacgtggtggagttcgccaagaggctctcaggctttatggagctctgccagaatgaccagattgtgcttctcaaagcaggagcaatggaagtggtgctggttaggatgtgccgggcctacaatgctgacaaccgcacggtcttttttgaaggcaaatacggtggcatggagctgttccgagccttgggctgcagcgagctcatcagctccatctttgacttctcccactccctaagtgccttgcacttttccgaggatgagattgccctctacacagcccttgttctcatcaatgcccatcggccagggctccaagagaaaaggaaagtagaacagctgcagtacaatctggagctggcctttcatcatcatctctgcaagactcatcgccaaagcatcctggcaaagctgccacccaaggggaagcttcggagcctgtgtagccagcatgtggaaaggctgcagatcttccagcacctccaccccatcgtggtccaagccgctttccctccactctacaaggagctcttcagcactgaaaccgagtcacctgtggggctgtccaagtgacctggaagagggactccttgcctctccctatggcctgctggcccacctccctggaccccgttccaccctcacccttttcctttcccatgaaccctggagggtggtccccaccagctctttggaagtgagcagatgctgcggctggctttctgtcagcaggccggcctggcagtgggacaatcgccagagggtggggctggcagaacaccatctccagcctcagctttgacctgtctcatttcccatattccttcacacccagcttctggaaggcatggggtggctgggatttaaggacttctgggggaccaagacatcctcaagaaaacaggggcatccagggctccctggatgaatagaatgcaattcattcagaagctcagaagctaagaataagcctttgaaatacctcattgcatttccctttgggcttcggcttggggagatggatcaagctcagagactggcagtgagagcccagaaggacctgtataaaatgaatctggagctttacattttctgcctctgccttcctcccagctcagcaaggaagtatttgggcaccctaccctttacctggggtctaaccaaaaatggatgggatgaggatgagaggctggagataattgttttatgggatttgggtgtgggactagggtacaatgaaggccaagagcatctcagacatagagttaaaactcaaacctcttatgtgcactttaaagatagactttaggggctggcacaaatctgatcagagacacatatccatacacaggtgaaacacatacagactcaacagcaatcatgcagttccagagacacatgaacctgacacaatctctcttatccttgaggccacagcttggaggagcctagaggcctcaggggaaagtcccaatcctgagggaccctcccaaacatttccatggtgctccagtccactgatcttgggtctggggtgatccaaataccaccccagctccagctgtcttctaccactagaagacccaagagaagcagaagtcgctcgcactggtcagtcggaaggcaagatcagatcctggaggactttcctggcctgcccgccagccctgctcttgttgtggagaaggaagcagatgtgatcacatcaccccgtcattgggcaccgctgactccagcatggaggacaccagggagcagggcctgggcctgtttccccagctgtgatcttgcccagaacctctcttggcttcataaacagctgtgaaccctcccctgagggattaacagcaatgatgggcagtcgtggagttgggggggttgggggtgggattgtgtcctctaaggggacgggttcatctgagtaaacataaaccccaacttgtgccattctttataaaatgattttaaaggcaaaaaaaaaaaaaaaaaaaa

SEQ ID NO: 143 - protein, 497 aa, Homo sapiens
MRTQIEVIPCKICGDKSSGIHYGVITCEGCKGFFRRSQRCNAAYSCTRQQNCPIDRTSRNRCQHCRLQKCLALGMSRDAVKFGRMSKKQRDSLHAEVQKQLQQRQQQQQEPVVKTPPAGAQGADTLTYTLGLPDGQLPLGSSPDLPEASACPPGLLKASGSGPSYSNNLAKAGLNGASCHLEYSPERGKAEGRESFYSTGSQLTPDRCGLRFEEHRHPGLGELGQGPDSYGSPSFRSTPEAPYASLTEIEHLVQSVCKSYRETCQLRLEDLLRQRSNIFSREEVTGYQRKSMWEMWERCAHHLTEAIQYVVEFAKRLSGFMELCQNDQIVLLKAGAMEVVLVRMCRAYNADNRTVFFEGKYGGMELFRALGCSELISSIFDFSHSLSALHFSEDEIALYTALVLINAHRPGLQEKRKVEQLQYNLELAFHHHLCKTHRQSILAKLPPKGKLRSLCSQHVERLQIFQHLHPIVVQAAFPPLYKELFSTETESPVGLSK

SEQ ID NO: 144 - DNA, 3084 bp, Homo sapiens
gccaggtgctcccgccttccaccctccgccctcctccctcccctgggccctgctccctgccctcctgggcagccagggcagccaggacggcaccaagggagctgccccatggacagggccccacagagacagcaccgagcctcacgggagctgctggctgcaaagaagacccacacctcacaaattgaagtgatcccttgcaaaatctgtggggacaagtcgtctgggatccactacggggttatcacctgtgaggggtgcaagggcttcttccgccggagccagcgctgtaacgcggcctactcctgcacccgtcagcagaactgccccatcgaccgcaccagccgaaaccgatgccagcactgccgcctgcagaaatgcctggcgctgggcatgtcccgagatgctgtcaagttcggccgcatgtccaagaagcagagggacagcctgcatgcagaagtgcagaaacagctgcagcagcggcaacagcagcaacaggaaccagtggtcaagacccctccagcaggggcccaaggagcagataccctcacctacaccttggggctcccagacgggcagctgcccctgggctcctcgcctgacctgcctgaggcttctgcctgtccccctggcctcctgaaagcctcaggctctgggccctcatattccaacaacttggccaaggcagggctcaatggggcctcatgccaccttgaatacagccctgagcggggcaaggctgagggcagagagagcttctatagcacaggcagccagctgacccctgaccgatgtggacttcgttttgaggaacacaggcatcctgggcttggggaactgggacagggcccagacagctacggcagccccagtttccgcagcacaccggaggcaccctatgcctccctgacagagatagagcacctggtgcagagcgtctgcaagtcctacagggagacatgccagctgcggctggaggacctgctgcggcagcgctccaacatcttctcccgggaggaagtgactggctaccagaggaagtccatgtgggagatgtgggaacggtgtgcccaccacctcaccgaggccattcagtacgtggtggagttcgccaagaggctctcaggctttatggagctctgccagaatgaccagattgtgcttctcaaagcaggagcaatggaagtggtgctggttaggatgtgccgggcctacaatgctgacaaccgcacggtcttttttgaaggcaaatacggtggcatggagctgttccgagccttgggctgcagcgagctcatcagctccatctttgacttctcccactccctaagtgccttgcacttttccgaggatgagattgccctctacacagcccttgttctcatcaatgcccatcggccagggctccaagagaaaaggaaagtagaacagctgcagtacaatctggagctggcctttcatcatcatctctgcaagactcatcgccaaagcatcctggcaaagctgccacccaaggggaagcttcggagcctgtgtagccagcatgtggaaaggctgcagatcttccagcacctccaccccatcgtggtccaagccgctttccctccactctacaaggagctcttcagcactgaaaccgagtcacctgtggggctgtccaagtgacctggaagagggactccttgcctctccctatggcctgctggcccacctccctggaccccgttccaccctcacccttttcctttcccatgaaccctggagggtggtccccaccagctctttggaagtgagcagatgctgcggctggctttctgtcagcaggccggcctggcagtgggacaatcgccagagggtggggctggcagaacaccatctccagcctcagctttgacctgtctcatttcccatattccttcacacccagcttctggaaggcatggggtggctgggatttaaggacttctgggggaccaagacatcctcaagaaaacaggggcatccagggctccctggatgaatagaatgcaattcattcagaagctcagaagctaagaataagcctttgaaatacctcattgcatttccctttgggcttcggcttggggagatggatcaagctcagagactggcagtgagagcccagaaggacctgtataaaatgaatctggagctttacattttctgcctctgccttcctcccagctcagcaaggaagtatttgggcaccctaccctttacctggggtctaaccaaaaatggatgggatgaggatgagaggctggagataattgttttatgggatttgggtgtgggactagggtacaatgaaggccaagagcatctcagacatagagttaaaactcaaacctcttatgtgcactttaaagatagactttaggggctggcacaaatctgatcagagacacatatccatacacaggtgaaacacatacagactcaacagcaatcatgcagttccagagacacatgaacctgacacaatctctcttatccttgaggccacagcttggaggagcctagaggcctcaggggaaagtcccaatcctgagggaccctcccaaacatttccatggtgctccagtccactgatcttgggtctggggtgatccaaataccaccccagctccagctgtcttctaccactagaagacccaagagaagcagaagtcgctcgcactggtcagtcggaaggcaagatcagatcctggaggactttcctggcctgcccgccagccctgctcttgttgtggagaaggaagcagatgtgatcacatcaccccgtcattgggcaccgctgactccagcatggaggacaccagggagcagggcctgggcctgtttccccagctgtgatcttgcccagaacctctcttggcttcataaacagctgtgaaccctcccctgagggattaacagcaatgatgggcagtcgtggagttgggggggttgggggtgggattgtgtcctctaaggggacgggttcatctgagtaaacataaaccccaacttgtgccattctttataaaatgattttaaaggcaaaaaaaaaaaaaaaaaaaa

SEQ ID NO: 145 - protein, 518 aa, Homo sapiens
MDRAPQRQHRASRELLAAKKTHTSQIEVIPCKICGDKSSGIHYGVITCEGCKGFFRRSQRCNAAYSCTRQQNCPIDRTSRNRCQHCRLQKCLALGMSRDAVKFGRMSKKQRDSLHAEVQKQLQQRQQQQQEPVVKTPPAGAQGADTLTYTLGLPDGQLPLGSSPDLPEASACPPGLLKASGSGPSYSNNLAKAGLNGASCHLEYSPERGKAEGRESFYSTGSQLTPDRCGLRFEEHRHPGLGELGQGPDSYGSPSFRSTPEAPYASLTEIEHLVQSVCKSYRETCQLRLEDLLRQRSNIFSREEVTGYQRKSMWEMWERCAHHLTEAIQYVVEFAKRLSGFMELCQNDQIVLLKAGAMEVVLVRMCRAYNADNRTVFFEGKYGGMELFRALGCSELISSIFDFSHSLSALHFSEDEIALYTALVLINAHRPGLQEKRKVEQLQYNLELAFHHHLCKTHRQSILAKLPPKGKLRSLCSQHVERLQIFQHLHPIVVQAAFPPLYKELFSTETESPVGLSK

SEQ ID NO: 146 - DNA, 984 bp, Homo sapiens
atgtggctcttggaaaaagctggctataaggtgggggccgcggagcctgcggcccgttgggcgccttccggcctgttctccaagcgtcgcgccccgggcccgcccacaagcgcctgccccaacgtcctcaccccggatcgcatcccgcaccccgcgacctgctcgctgcctcacctggcgggccgcgaaggctgggccttcctgcccgagagcccgcacacgcgccggcgggaatccctgttccacgggccgccacctgccccggccgggggactccccgcggcgcagtcccggctgcacgtctccgccccggacctgcgcctctgccgggcccccgacagcgacacggcctcgtcgccggactcgtcgcccttcggctccccgcggccaggcctgggccggcgccgggtgtccaggcctcactctctgtccccagaaaaagcgagctcggccgataccagcccgcactcgccgcgccgcgccgggccgcccacgccgccgctcttccacctggacttcctgtgctgccagctgcggcccacgcgcgagagcgtgctgcgcctggggccccgcggcgggcagctgcggctctccaccgaatatcaggccgggcccgggcggctgcggctgcgcctagtgagcgccgagggcctgccccggccgcggtcccgccccgggagcggcggcggcggctgctgtgtggtgctgaggctgcggccccgcgtccggccgcgggagcagcagagccgcgtggtcaagtgcagcgccaaccccatcttcaacgaggatttctttttcgacgggctcggccccccggacctggccgcccgcagcctgagagccaaggtgctagacaggggcgcgggacttcgcagggatgtgctgctgggggagtgcgagacgcccctcattgcgctgctgcccccgctgggtgggggactaggtcccgggtcatccctggcgcccacccatctcagcctgtag

SEQ ID NO: 147 - protein, 327 aa, Homo sapiens
MWLLEKAGYKVGAAEPAARWAPSGLFSKRRAPGPPTSACPNVLTPDRIPHPATCSLPHLAGREGWAFLPESPHTRRRESLFHGPPPAPAGGLPAAQSRLHVSAPDLRLCRAPDSDTASSPDSSPFGSPRPGLGRRRVSRPHSLSPEKASSADTSPHSPRRAGPPTPPLFHLDFLCCQLRPTRESVLRLGPRGGQLRLSTEYQAGPGRLRLRLVSAEGLPRPRSRPGSGGGGCCVVLRLRPRVRPREQQSRVVKCSANPIFNEDFFFDGLGPPDLAARSLRAKVLDRGAGLRRDVLLGECETPLIALLPPLGGGLGPGSSLAPTHLSL

SEQ ID NO: 148 - DNA, 2442 bp, Homo sapiens
agcctcgcctagctctctgaaagaaagcctgcaacagaagggagagaagcggccccaagtgcagctgaaagcactccttgggagtcagccaagaccctccatccaagcagggctggatccttgcacttggccatgataaggagatgcttccaggtggcagcaagacttggccaccacagaggccttcttgaggccccccgtatcctgcccagactcaaccctgcctcagcatttggatcctccacagactccatgttctcaagattcttgccagagaagacagacttgaaggattatgctcttcccaatgccagctggtgttcggacatgctgagcctgtaccaagaatttctggagaagactaagtctagcggctggatcaagctgccctccttcaagtccaacagagaccacatccggggactcaagctcccatctggactggcagtttcctcagacaaaggtgactgtcgcatcttcaccaggtgcatccaagtggaaggacaaggctttgagtatgtcatctttttccagccaacccagaagaagtcggtctgtcttttccaaccaggctcctacctggaggggcccccagggtttgctcacggcgggtccctggcagccatgatggacgagaccttttctaaaactgccttcctggctggagaggggctgttcacactaagtctcaacatcaggttcaaaaacttgatccccgtggactctctggttgtaatggacgtagaagtggacaagattgaggaccagaagctttacatgtcctgcatcgcccacagcagagaccagcagacagtttatgccaagtcctcaggtgttttccttcagctgcagttggaagaagagtctccccagtaacagtcactgtgcctgcaggagagccactgcctcccctgcctgcctcctgcctcctgcctcccctgcctgcctcctgcctcctgcctcccctgcctgcctcctgcctcctgcctcccctgcctgcctgggacccatcaaagagcagggaggggtcctcaagcagcaattggtgaggcgagggaaaggacccttttctctgagtaaataaagtctcacagtcccattctcggcccagggcctttctgtggttggaaatcaaaatccttccagggcatctcacatacccaccttcccattcagcaccgactgaaaagatttactgagtacccgccaggtgtcaggcactgtgtgaggcaccaggcacccagaagtgaaggacagggccccggtctcaagatgcacaatgcgggagccaggtgccaagtcagagtgccctatcacgctcctcccacacccaccctggcttccatcatgagtgcagtgtcatctcagcgggaggaagggctaattttactctacaaaagcaatcagaaaacatcttctagaagaagctcttcctgaactgtctcaaaagttaagtggtgttcattaggcaggcaggggagaggaggatatcccaggcagaagggaagtaagaagtaagacaaaggtgcagaggtgtgaaagtgtacagggactttggagaagagcaaggtgttgaggagggcaggcgtttagggaaagagaaggtgggcaggagcaaaccacaggaaggcttcataatccctgctggagagctggaactttgtcttgcaggcaacagggagcctccaaagggcttgggctggggagtgacagagctttgttatttagaaagatgactcagtggcagtaaggcgtcagcaagactgaaggcaggagtactagttaggagatccccacaggctttacactagagacagtaagggcctgcaggggtcagagctgcgaagctgagagatatgagaaaatgttacaaatacaggaagtgcaggactgtgccactagttatacaatgtggatctgtgaagacgagctccaagtttctggcttatgagtttccaggtggttatcactggaaatacagaaagaggtgggggtaaacaatgagctcagttttacatgcatcgagcttgaagtgcccatggaacttgtaccatgtggcaagtgccagcaggaacgtggatattgtgatatggagcttggagagataagctactgactcaaatcgtgagccaatataaaatgtgacatgaggccggacacggtggctcatgcctgtaatcccagcactttgggaggccgatgcgggctgatcacttgagcgattcgagagtcgagaggctggtcgggagttcgagaccagcctgaccaacatggagaaaccctatctctactaaaaacacaaaaaattagccgggtgtggtggcgcatgcctgtaatcccagcatttggatcctccacttgaacccgagaggcggaggttgcagtgagccgagatcacaccattgcactccagcctgggcaacaagagcaaaactccgtccc

SEQ ID NO: 149 - protein, 247 aa, Homo sapiens
MIRRCFQVAARLGHHRGLLEAPRILPRLNPASAFGSSTDSMFSRFLPEKTDLKDYALPNASWCSDMLSLYQEFLEKTKSSGWIKLPSFKSNRDHIRGLKLPSGLAVSSDKGDCRIFTRCIQVEGQGFEYVIFFQPTQKKSVCLFQPGSYLEGPPGFAHGGSLAAMMDETFSKTAFLAGEGLFTLSLNIRFKNLIPVDSLVVMDVEVDKIEDQKLYMSCIAHSRDQQTVYAKSSGVFLQLQLEEESPQ

SEQ ID NO: 150 - DNA, 2224 bp, Homo sapiens
cctacccggaccccgccggcctcacaccccggccagccagccgccagtagtgcgcaccgcctcctccccaagccccgccctgcgtccaccccaggggttaactcgcacgcgcgctcttgtggcggaggtagagtgcgccgtccagggctagagcaagcgcggccccgcggcccggagccatgctgaggagctgcgccgcgcgcctccgcacgctgggggctctgtgcctgccgccagtaggccggcgcctgccgggaagcgagccgcgacccgagctgaggtcattttcttctgaggaagtcattcttaaggactgttctgtccccaaccccagctggaacaaggacctaagactgctctttgaccagtttatgaagaaatgtgaagacggctcctggaaacgtttgccttcatataaacgtacacctactgaatggattcaagacttcaaaacccattttcttgacccaaagcttatgaaagaagaacaaatgtcacaggcccagctcttcaccagaagctttgatgatggcctgggctttgaatacgtgatgttctacaatgacattgagaaaaggatggtttgcttatttcaaggaggcccttacctggaaggaccacctggattcattcatggaggtgccattgcaaccatgattgatgctactgttggtatgtgtgcaatgatggctgggggaatcgtcatgactgccaatctcaacatcaattataaaagacctatccctctttgttctgttgttatgataaatagccaacttgataaagttgaaggaaggaaattttttgtttcctgtaatgttcagagtgttgatgagaagaccctatactcagaggcgacaagcttatttataaagctgaatcctgctaaaagtctgacataaagagctgctggtgaactccatctcattctcgcccctccagaagaagcagttgtcccccaaatactctgctccctcactgctgaatccctgtagggagaagcctgccaacagtgaccttccgaaacagccttctgaatacaaagaggattcagtttccatcttctcaactttttaacacagaaatacttcctgcgagcatatcgacaactctcgggccaggcgctgtggctcacacctataatcccagcactttaggaggccgaggcaggcggattgcctgagctcaggagttcaagatcagtctgggcaacacgatgaaactccgtctctactaaaatacaaaaaattatccaggcatggtggcgtacgcctgtagtcccagctactcaggaggctgaggcaggagaattgcttgaacccaggaggaagaggttgcagtgagccaagatcatgccacatcactccaacctgggcaacagaacaagaacccatctcaaacaaacaaacaaacaaaaaaaaaaaactcttgtctccttaggatatgttacctgctccactgcagactagagaaataaatgtgtattgaaccttttactgcaaacttgaaaatgctagaaaaccaagcatgaagaataaatacatggtgggaaacacacaggcatgtgcatatgcatatacattgtaagttagtaagttagaaagctagctttgttgtatctgaacacatgaatcttttttggtcagtgtaggaagcacagccagatcctataggaatgaatacctcaaatctgttgtctgagattctagagattaaaccactgtgccatttttaacccaggctgtactgttgtttcttaccaacagcataggttttcatcactggaaggagcctgtgttcatttcctagggctgctgtagcaaagtagtacaaactggattgtttaaaccaacaaaaactcattgtctctcagttctggaggccagaagttcaaaatcaaggtgttgaccaaggccattctcctgaaagtgctagggaaggagctgtccacgcctccctcctggcttctgggagcctcaggtgttccttggcttctagatgcatcattccagtcctccatcttcacatggcattccctctgtgtgtctccacagtgtcttccctctgtgcagatctatctctgtgtccaagtctcctctttttataaggaaaccagtcataatggacccacctgaatgacctcattttaacttgattacctctgtaaaaaatgtatttccaaataaagtgaccttatgaggtattgaaaaaaaaaaaaaaaaaa

SEQ ID NO: 151 - protein, 240 aa, Homo sapiens
MLRSCAARLRTLGALCLPPVGRRLPGSEPRPELRSFSSEEVILKDCSVPNPSWNKDLRLLFDQFMKKCEDGSWKRLPSYKRTPTEWIQDFKTHFLDPKLMKEEQMSQAQLFTRSFDDGLGFEYVMFYNDIEKRMVCLFQGGPYLEGPPGFIHGGAIATMIDATVGMCAMMAGGIVMTANLNINYKRPIPLCSVVMINSQLDKVEGRKFFVSCNVQSVDEKTLYSEATSLFIKLNPAKSLT

SEQ ID NO: 152 - DNA, 1860 bp, Homo sapiens
atgtggcagacacaacccccactctctccctccttgtctgacagaaagaggctctctaaaagaagacaaggcccacctagaagcagtttctcggctccttctcgagtctctatgtggttccacttgcctgcctccacttctgcctacaccatgtctaccagggtgacctggaagtcctacggggtgtcccccttggccccagggccctcagcagctgctcctacaagaatgggctggtgcctgcatcagctcctggagctcctcccaaatgggcagcagcagcagcttctggagtggctgggtatcagcatgggtctgggtggaggctatgccagggccagtagtatgggaggcatcacagccgccatggtgaaccagagcctgctaagccccttaagctggaggtggaccccaacatccaagccgtgagcacccaggagaaggagcagatcaacaccctcaacaagtttgcctccttcatcaacaacgtgggggttcctggagcaacagaacaagatgctgaagaccaagtggagcctccagcagcaggagaggaggctggaagcaacatagacagcgtgttccatagctacatcaacaaccttgggtggcagctggacactctgggccaggaaaagcagaggctgctggaggacttcaagaagaagtaggagggtgagactgataagccaacagagatggagaatcaatctgtcctcatcaagaaggacgcgcatgaagcttaagtgaacaaggtagagctggagtctcgcttgggagagctgactgatgagatcagcctcctcaggcagctgtatgaagaggagacctccagactcggacacatctgtggtcctgtctatggccaaaagccgcacactggatgtgggcagtgacatggccaagtccccaagtgggaggagatagccaaagcagctgggcgaggctgagagggcaccagatctaagtgtgaggggttgcagacactggctgggaaacacagggatgccctgtggtgcacaaagatgcagatctcagagatgaacccgaacatcatctggctccagctgatactaagggcctcaaaggccagagggcttccctggggttcaccatcggagagccaagccgctggctataaaggagccaacgccacgctggcagagctggaggccaccctgcagtgggacaagcagggcatgacatagcaggtacgcgagtgccaggagctgatgaacgccaggctcccctggacactgagttcaccacctacgggaagctgccggaggacaaggacagcagcctggagtctgggatgcagaacatgagtatccatacaaagaccaccagtggctgctcagatgggctgagctcggcctactgggcctcacaagctctggcctcaatcacagcctgggttccagctttgactctggcaagagctctgactccttcagccgtaccagcgcttccaaggccacggttttgaaaaagatccaaaccagcaataacaagctggtgtccagccctctgctgtcctgccccagtgaacggccatggcagcccctcccagcctcctgctcctgtggctgccccagagcctgcaggggaggccgctgtaagccccggaagtggcccggctgttggccgcagcgggaggtcttcggaaagaaaaggccggaaccagaagatagactcaacagcgatgccctacccggaccccgccggcctcacaccccggccagccagccgccagtagtgcgcaccgcctcctccccaagccccgccctgcgtccaccccaggggttaactcgcacgcgcgctcttgtggcggaggtagagtgcgccgtccagggctag

SEQ ID NO: 153 - DNA, 1069 bp, Homo sapiens
aagtaattcctagacccgtaggtggccgcagagccggttacctctggttctgcgccagcgtgccccacccgcaggacggccgggttctttgatttgtacactttctaaaaccaaacccgagaggaagggcaggctcagggtggggatgccctgaaatattcgagagcaggaccgtttctactgaagagaagtttacaagaacgctctgtctggggcgggcgaggcctctgcgaggcgggtccgggagcgagggcagggcgtgggccgcgcgcccggggtcgggggagtcgggggcaggaagagggggaggagacagggctgggggagcgccctgccgagcgcccgccaggctcctcccgctcccgcgccgcctccctctacccacccgccgcacgtactaaggaaggcgcacagcccgccgcgctcgcctctccgccccgcgtccagctcgcccagctcgcccagcgtccgccgcgcctcggccaaggcttcaacggaccacaccaaaatgccatctcaaatggaacacgccatggaaaccatgatgtttacatttcacaaattcgctggggataaaggctacttaacaaaggaggacctgagagtactcatggaaaaggagttccctggatttttggaaaatcaaaaagaccctctggctgtggacaaaataatgaaggacctggaccagtgtagagatggcaaagtgggcttccagagcttcttttccctaattgcgggcctcaccattgcatgcaatgactattttgtagtacacatgaagcagaagggaaagaagtaggcagaaatgagcagttcgctcctccctgataagagttgtcccaaagggtcgcttaaggaatctgccccacagcttcccccatagaaggatttcatgagcagatcaggacacttagcaaatgtaaaaataaaatctaactctcatttgacaagcagagaaagaaaagttaaataccagataagcttttgatttttgtattgtttgcatccccttgccctcaataaataaagttcttttttagttccaaatttgaaaaaaaaaaaaaaa

SEQ ID NO: 154 - protein, 97 aa, Homo sapiens
MPSQMEHAMETMMFTFHKFAGDKGYLTKEDLRVLMEKEFPGFLENQKDPLAVDKIMKDLDQCRDGKVGFQSFFSLIAGLTIACNDYFVVHMKQKGKK

SEQ ID NO: 155 - DNA, 595 bp, Homo sapiens
gggcaaggctgggccgggaagggcgtgggttgaggagaggctccagacccgcacgccgcgcgcacagagctctcagcgccgctcccagccacagcctcccgcgcctcgctcagctccaacatggcaaaaatctccagccctacagagactgagcggtgcatcgagtccctgattgctgtcttccagaagtatgctggaaaggatggttataactacactctctccaagacagagttcctaagcttcatgaatacagaactagctgccttcacaaagaaccagaaggaccctggtgtccttgaccgcatgatgaagaaactggacaccaacagtgatggtcagctagatttctcagaatttcttaatctgattggtggcctagctatggcttgccatgactccttcctcaaggctgtcccttcccagaagcggacctgaggaccccttggccctggccttcaaacccaccccctttccttccagcctttctgtcatcatctccacagcccacccatcccctgagcacactaaccacctcatgcaggccccacctgccaatagtaataaagcaatgtcacttttttaaaacatgaaa

SEQ ID NO: 156 - protein, 105 aa, Homo sapiens
MAKISSPTETERCIESLIAVFQKYAGKDGYNYTLSKTEFLSFMNTELAAFTKNQKDPGVLDRMMKKLDTNSDGQLDFSEFLNLIGGLAMACHDSFLKAVPSQKRT

SEQ ID NO: 157 - DNA, 1059 bp, Homo sapiens
atggaaaacatccagtacaagaccacaggccagaaccacaagatcagtcaggtcaacaagagtgagagacaacagatgagtgctcagacctcagcaccaatggatgaagagagacatctagtgagagaactgagctcatatactcaaaatagtggaagacagcaaattagagagcagagactatctccaagagaagatgaaagactgggagtcagtgatcagacaccaatgctacaggaaaatgggaaacacaagataaagattcagtccctagggacaaagaataatgagaaatgccaagtgagagacctgagcccacagcccaggaagtatgagagacatcaagttaggaagcagacaccagaacccagaaatgatgggagacaacaagtcagagatatgagcccagaacccagaaatgatgggacatgtcaatttagggagcagagatcagttccaagacaacatgacagactccaagatagtaaccgggccccaatgccaagggatgatggaagacatcaagtgagagacctgagcccacaacctgggaatgatgggagacaccaagttagaaaacagacatcagctccaacagaaagtgagagacaccaagtgagatatgaaaacccagcatcaagggatgatgagagttatccagtgagtgacctgagcctacaaaccatgaatgatgtgagatgccaagggagagatggaagcctggcatccagagataacaggagatgtccagtgagagacttgagcccaaaacccaggaatgataggagataccaagttagggatcagagatcagctctaacaaaaaataagagacacaaagtgagagatgaaagcccaacatcaagagatgatgggagatatccagtgagagacctgggcccacagaccagaagtgatgggagatgccaagttggggatcagagatcagctccaacagaagatgaaagacaccaagtaagagataaaagcccagcaccaagagataatgggagatatccagtaagaggtaagagacatgagcccgcaacccaggaatga

SEQ ID NO: 158 - protein, 352 aa, Homo sapiens [sequence omitted]

SEQ ID NO: 159 - DNA, 3603 bp, Homo sapiens
acagcccgctgccccacgttctacctgctctcgcttgtgaactagcctctcctgagtttgtaaagatgcctcagctcctgagaaatgtcctctgtgtaattgagacattccacaaatatgccagtgaggacagtaacggggcaacactgactggcagagagctgaaacaactcatccagggcgagtttggggacttttttcagccctgtgtccttcatgctgtggaaaaaaattcaaatcttctgaatattgacagtaatggcatcatcagttttgatgaatttgttcttgcaatcttcaacttgttgaacctctgttatcttgacataaaatcattactaagttctgaactaagacaggtgactaaaccagagaaggagaagctagatgatgtggatgttcaggcaaccaccggagatggtcagtggacagtgggaacttcaccaactcaagaaaagaggatgcttccttcaggaatggcatcatcatctcagctcatccctgaagaaagtggagcagttggaaataacagagtggacccatggagagaagccaagactcacaactttccaggagaagcatctgaacacaatgatcctaagaacaaacacctggaaggagatgaacaaagtcaggaagtggctcaagatatacaaacaacagaagacaatgaaggccaacttaagacaaataagccaatggcaggatcaaaaaagaccagcagtcccacagagaggaagggacaagataaggagatctcccaggaaggagatgaaccagccagagagcaaagtgtttccaagataagagaccagtttggagaacaggaaggaaacttggcaacccaaagttcaccaccaaaagaagcaacacaaagaccatgtgaagatcaggaagttagaacagaaaaggaaaaacactctaatatacaagaaccacccctacaaagagaagatgagcccagttcacagcatgctgacctgccagaacaagctgctgccaggtcaccatctcagacacagaaatcaactgattccaaggatgtctgtagaatgtttgacactcaagaaccaggaaaggatgctgaccagacaccagctaaaacaaagaatttgggtgaacctgaggattatggcagaacatctgagacccaagaaaaagaatgtgaaacaaaggacctgccagtccaatatggtagcagaaatggttcagaaacatctgacatgagagatgaaaggaaagagaggagaggtcctgaggcccatggaacagcagggcagaaagaacgtgacagaaaaactcggccactagtcctggaaacccaaacacaggatgggaagtatcaggaactccaaggattatcaaaatcaaaagatgctgaaaaaggttctgagacacaatatctaagctcagaaggaggagatcagactcaccctgaacttgaaggaacagcagtctcaggagaagaggcagaacacaccaaagaaggcacagcagaagcatttgtgaacagcaaaaacgcacctgcagcagaaaggacactgggggcaagagaaagaacacaagatttagcaccacttgagaagcagtctgtaggagaaaatactagggtcaccaagactcatgaccaaccagttgaggaggaggatggttaccagggggaggaccctgagtcaccattcacacagagtgatgaggggtcttctgaaactcccaacagcctggcttcagaggaaggcaatagcagctcagagacaggtgaactgcctgtgcaaggggactcccagagtcaaggggaccaacatggagagtctgtgcaaggaggtcacaataataacccagatacccagaggcagggaacacctggtgagaaaaacagagctctggaggcagtggtaccagcagtcagaggagaggatgtacagctcacagaggaccaggaacagcctgccagaggagaacacaagaatcaaggcccagggaccaaaggcccaggtgcagctgtggagcccaatggacacccagaagcacaggaatccacagcaggagatgaaaatagaaagtccctggaaatagagatcacaggtgccctggatgaagacttcactgaccagctttccctaatgcagctccctggaaagggagatagcagaaatgaattaaaggtccaaggcccaagtagcaaagaagagaaaggaagagcaacagaggcccagaatactctgttagaaagtctagatgaggacaattcagcctccctcaagatacaacttgaaacaaaggaacctgtaacatcagaggaggaagatgaaagtccccaagagctggcaggagaaggtggtgaccaaaaaagtccagccaagaaagagcacaattcttcagtcccctggtcaagtcttgaaaagcagatgcagagagaccaagagccctgttctgtggagaggggtgcagtctattccagtccactataccagtacctacaggagaagatactgcagcaaacaaatgtaacccaagaggagcatcaaaagcaagttcagatagcccaggcatcaggcccagagctttgcagtgtatccctcaccagtgagatctcagattgttctgtctttttcaactacagccaagcatcacaaccatataccaggggacttccacttgatgagagtcctgctggtgcacaggaaacaccagctccccaggccttggaagataagcaaggtcaccctcagagagagaggctggtactacaaagggaggcaagcaccacaaagcaatgaatcattatcatctcaacatgcccccaatttctctcccaatcaccctcaatactcacgtgtacacattcagatgcagattaacaatcttttaaattctcttcctaaatttctacaaaaacaaataataaaatattcagcagtgggggacaccactaaagaaacatctgagcaaacaaatacagtcagtaaaactcctaccaaacaatgctacttccaaatgccaaaatgggctttgtcatgagacagtttatctcaatgtacctgtcattaaaaatggaaaaattccttccatatctttagcaggtgccagtttttccaactgattcattgaatttaaaatagagcagtaggaaattataagactctgcaataatatctcataatcataaaatattaattcatatatatagattactctgcttcatgacatttcctagaagtatttcaagttcatcctaaaattttatccttcaaaataattttagacaatgccataacttaattatgattttctagcacttgattaaagtaaatttatgactctgctcatgttcaggtgcagctgaatctatcgccatggattcattctttcaattactcatccaacaaatttttattaaatcccactccttacacaaacttttcatagcttttggctcaaataaacaatcaagaataattatgagagaaaacacaaatctaaagtatgtttgattttataagaagctcttgtaaccaaccatccagtgagtctactaagtgtttacctatatggtttgatgagggtattaaattaaaattgataattaaacaacctgatgat

SEQ ID NO: 160 - protein, 904 aa, Homo sapiens
MPQLLRNVLCVIETFHKYASEDSNGATLTGRELKQLIQGEFGDFFQPCVLHAVEKNSNLLNIDSNGIISFDEFVLAIFNLLNLCYLDIKSLLSSELRQVTKPEKEKLDDVDVQATTGDGQWTVGTSPTQEKRMLPSGMASSSQLIPEESGAVGNNRVDPWREAKTHNFPGEASEHNDPKNKHLEGDEQSQEVAQDIQTTEDNEGQLKTNKPMAGSKKTSSPTERKGQDKEISQEGDEPAREQSVSKIRDQFGEQEGNLATQSSPPKEATQRPCEDQEVRTEKEKHSNIQEPPLQREDEPSSQHADLPEQAAARSPSQTQKSTDSKDVCRMFDTQEPGKDADQTPAKTKNLGEPEDYGRTSETQEKECETKDLPVQYGSRNGSETSDMRDERKERRGPEAHGTAGQKERDRKTRPLVLETQTQDGKYQELQGLSKSKDAEKGSETQYLSSEGGDQTHPELEGTAVSGEEAEHTKEGTAEAFVNSKNAPAAERTLGARERTQDLAPLEKQSVGENTRVTKTHDQPVEEEDGYQGEDPESPFTQSDEGSSETPNSLASEEGNSSSETGELPVQGDSQSQGDQHGESVQGGHNNNPDTQRQGTPGEKNRALEAVVPAVRGEDVQLTEDQEQPARGEHKNQGPGTKGPGAAVEPNGHPEAQESTAGDENRKSLEIEITGALDEDFTDQLSLMQLPGKGDSRNELKVQGPSSKEEKGRATEAQNTLLESLDEDNSASLKIQLETKEPVTSEEEDESPQELAGEGGDQKSPAKKEHNSSVPWSSLEKQMQRDQEPCSVERGAVYSSPLYQYLQEKILQQTNVTQEEHQKQVQIAQASGPELCSVSLTSEISDCSVFFNYSQASQPYTRGLPLDESPAGAQETPAPQALEDKQGHPQRERLVLQREASTTKQ

SEQ ID NO: 161 - DNA, 2529 bp, Homo sapiens
atggctcaactcctgaatagcatactcagtgtgattgacgtattccacaaatatgccaaagggaatggggactgtgccttactatgcaaggaagagttgaaacaactgctcttggctgagtttggagacatcctccagagaccaaatgacccagagactgtggaaaccatcttgaacctcttagatcaagaccgagatggacatattgattttcatgagtacctcttgttggtgttccagttggtccaagcctgctatcataagctagacaataagtcacatggaggcaggacctcacagcaagaaagggggcaggaaggagcacaagactgtaagttcccaggaaacacaggcagacaacacagacagaggcacgaggaagaaaggcagaactcccaccacagtcagcctgagagacaagacggagattcccaccatggtcagcctgagagacaagacagagattcccaccatggtcagtctgagaaacaagacagagattcccaccacagtcagcctgagagacaagacagagattctcaccacaatcagtctgagagacaagacaaggatttcagctttgatcagtcagagagacaaagtcaagactccagctctggtaaaaaagtgagtcacaaatctaccagtggccaggctaaatggcagggacatatctttgccttaaatcggtgtgaaaaaccaattcaggattctcattatggtcagtctgaaagacatacacaacaatctgaaacacttggacaagcctctcactttaaccagacaaatcaacagaaatcaggctcttattgtggacagtctgagaggctaggtcaggaattaggctgtggtcagacagacagacaaggccagagttcccactacggtcagacggacagacaagaccagagttatcattatggtcagacagacagacaaggccagagttcccactacagtcagacggacagacaaggccagagttcccactacagtcagccagacagacaaggtcagagttcccactatggtcaaatggacagaaaaggccagtgttatcattatgatcagacaaacagacaaggccagggttcccactacagtcaaccaaacagacaaggtcagagttcccactatggtcagccagacacacaagatcagagttctcactatggtcagacagacagacaagaccaaagttctcactatggtcagacagagagacaaggccagagttcccactacagtcagatggaccgacaaggccagggttctcactacggtcagacagacagacaaggccagagttcccactatggtcagccagacagacaaggccagaattcccactatggtcagacagacagacaaggccagagttcccactatggtcagacagacagacaaggccagagttcccactacagtcagccagacaaacaaggccagagttcccactatggtaagatagacagacaagaccagagttatcattatggtcagccagacggacaaggccaaagttcccactatggtcagacagacagacaaggccagagtttccactatggtcagccagacagacaaggccagagttcccactacagtcagatggacagacaaggccagagttcccactatggtcagacagacagacaaggccagagttcccactacggtcagacagacagacaaggccagagctatcattatggtcagacagacagacaaggccagagttcccactatattcaatcacagactggggaaatacaagggcaaaataagtacttccaagggactgaaggaacaagaaaagcctcttatgttgaacaatcaggaagatcagggaggctaagtcaacagactccaggacaggaagggtaccaaaaccagggacagggattccagtctagggactcacagcagaacggccaccaggtatgggagcctgaagaggatagccaacatcaccaacacaaactcttagcacaaatccaacaagaaagaccactttgtcacaaagggagagactggcaatcatgcagtagtgagcagggccacagacaggcccagaccaggcagagtcatggtgaggggctgagccactgggcagaggaagagcagggccatcaaacttgggatagacacagccatgagagtcaggaaggtccatgtgggacacaggacaggcgaacccataaagatgagcagaaccatcagagacgagacagacaaacccatgaacatgagcagagccatcagagacgagacaggcaaacccatgaagacaagcagaaccgtcagagacgagacaggcaaacccatgaagacgagcagaaccatcagagatgagacaggcaaactcatgaagaggatcaaaaccatcagcaacaacataatagacaaaactatgaggagaaagagaggtatcaaggatctcagaatcaaaaatcccaagtgacccacagaagctgtcctaacagagaaaaattccacatgaaagaggatgaccagagccaaggctca

SEQ ID NO: 162 - protein, 784 aa, Homo sapiens
MAQLLNSILSVIDVFHKYAKGNGDCALLCKEELKQLLLAEFGDILQRPNDPETVETILNLLDQDRDGHIDFHEYLLLVFQLVQACYHKLDNKSHGGRTSQQERGQEGAQDCKFPGNTGRQHRQRHEEERQNSHHSQPERQDGDSHHGQPERQDRDSHHGQSEKQDRDSHHSQPERQDRDSHHNQSERQDKDFSFDQSERQSQDSSSGKKVSHKSTSGQAKWQGHIFALNRCEKPIQDSHYGQSERHTQQSETLGQASHFNQTNQQKSGSYCGQSERLGQELGCGQTDRQGQSSHYGQTDRQDQSYHYGQTDRQGQSSHYSQTDRQGQSSHYSQPDRQGQSSHYGQMDRKGQCYHYDQTNRQGQGSHYSQPNRQGQSSHYGQPDTQDQSSHYGQTDRQDQSSHYGQTERQGQSSHYSQMDRQGQGSHYGQTDRQGQSSHYGQPDRQGQNSHYGQTDRQGQSSHYGQTDRQGQSSHYSQPDKQGQSSHYGKIDRQDQSYHYGQPDGQGQSSHYGQTDRQGQSFHYGQPDRQGQSSHYSQMDRQGQSSHYGQTDRQGQSSHYGQTDRQGQSYHYGQTDRQGQSSHYIQSQTGEIQGQNKYFQGTEGTRKASYVEQSGRSGRLSQQTPGQEGYQNQGQGFQSRDSQQNGHQVWEPEEDSQHHQHKLLAQIQQERPLCHKGRDWQSCSSEQGHRQAQTRQSHGEGLSHWAEEEQGHQTWDRHSHESQEGPCGTQDRRTHKDEQNHQRRDRQTHEHEQSHQRRDRQTHEDKQNRQRRDRQTHEDEQNHQR

SEQ ID NO: 163 - DNA, 9623 bp, Homo sapiens
accctgaaagctgtttctgtctctaccctacttgttcctctggtgagctaggttactcaaacttgcaaaaaaaaaaatgcctaaactcctacaaggcgtcatcactgtcatcgatgttttctaccaatatgccacccagcatggggagtatgatacgttgaacaaggcagagctgaaagaacttctggaaaatgagtttcatcaaattctgaagaatccaaacgatccagatactgtggatatcatcttgcaaagtctggatcgagaccataacaagaaagtggattttactgagtatcttctgatgatattcaagctggttcaggctcgtaataaaatcattggcaaagattactgccaagtttcagggtcaaagctgagagatgacactcaccagcaccaagaggaacaagaagaaactgaaaaagaggagaacaaacggcaagaatcctcttttagtcattcaagttggagtgcaggagagaatgattcctattccagaaacgtcagaggaagtcttaaacctgggactgaatccatatccagaagactgagttttcaaagagacttttctggccaacataactcctactcaggtcagtcttccagctatggtgagcaaaactccgactcccatcagtcttcaggccgcggccaatgtgggtctgggtcagggcagtctcccaactatggccaacacggctctggctccggacagtcttccagcaatgacacacatgggtctggctcaggccagtcttctggctttagtcaacacaagtctagctcagggcagtcctctggttacagtcagcatggatctggctcaggtcactcctctggctacggacaacacggctctaggtcaggacagtcatctaggggtgaacgacacagatctagctcaggttcgtcttccagctatggtcagcatgggtctggttcccgtcagtctttgggccacggccgacaagggtctggatctcgccagtctcctagccacgtccgacatgggtccggttcggggcactcctccagccacggccaacacgggtctggctcaagttactcttacagccgtggccattatgagtctggctcaggccagacttctggctttgggcaacatgagtctggctcaggacagtcctctggctatagtaagcatggttctggctcaggtcactcctctagccagggacaacatggatctacgtcagggcaggcatcaagctctggccaacatggctccagctcacgtcagtcttccagctatggtcagcatgagtctgcctcccgtcactcttcaggccgcggccaacacagctctggatctggccagtctccaggccacggccagcgtgggtctgggtcagggcagtctcccagctccggccaacatgggactggctttggtcgatcttccagcagtggcccatatgtgtctggttcaggctactcttctggctttggtcaccacgagtctagctcagagcattcctctggttacactcagcatggatctggctcaggtcactcctccggccacggacaacacggctctaggtcaggacagtcatctaggggtgaacgacaaggatctagtgcaggttcatcttccagctatggtcagcatgggtctggctcccgtcaatctttgggacacagccgacatgggtctggatctggccagtctcctagccctagccgtggccgacatgagtctggttccaggcagtcttccagctatggcccacatgggtatggctcagggaggtcttcaagccgtggcccatatgagtctggctccggtcactcttctggcttaggtcaccaagagtctcgctcaggacagtcctctggctacggtcaacacggatctagctcgggtcattcctctacccatgggcaacatggttctacatcaggacagtcatcgagctgtggccaacatggagctacctcaggtcagtcttccagccacggtcagcatggctctggctcaagtcagtcttctcgctatggccaacagggctctggatctggccagtctcctagtcgcggccgacatgggtccgattttgggcactcttccagctacggccaacatgggtctggctccggttggtcttcaagcaatggcccacatgggtctgtctcaggccagtcttccggctttggtcacaagtctggctcagggcagtcctctggttacagtcagcatggatctggctcaagtcactcctccggctacagaaaacacggctctaggtcaggacagtcatctaggagtgaacaacacggatctagctcaggtttgtcttccagctatggtcagcatgggtcgggctcccatcaatcttcgggccacggccgacaagggtctggatctggccactctcctagccgtgtccgacatgggtccagttcagggcactcctccagccacggccaacacgggtctggcacaagttgttcttccagctgtggccattatgagtctggctcaggccaggcttctggttttgggcaacacgagtctggctcaggacagggctatagtcagcatggttctgcctcaggtcacttctctagccagggacgacatggatctacgtcagggcagtcatcaagctccggccaacatgactctagctcaggtcaatcttccagctatggtcagcatgagtctgcctcccatcacgcttcgggccgcggccgacatggctctggatctggccagtctccaggccacggccagcgtgggtctgggtcagggcagtctcccagctatggccgacatgggtctggctccggtcggtcttccagcagtggccgacatgggtctggctcaggccagtcttctggctttggtcacaagtctagctcagggcagtcctctggttacactcagcatggatctggctcaggtcactcctccagctacgaacaacacggctctaggtcaggacagtcatctaggagcgaacaacatggatctagctcaggttcgtcttccagctatggtcagcatgggtctggctcccgtcagtctttgggccacggccaacatgggtctggatctggccagtctcctagccctagccgtggccgacatgggtctggttccgggcagtcttccagctatggcccatataggtctggctcagggtggtcttcaagccgtggcccatatgagtctggctccggtcactcttctggcttaggtcaccgagagtctcgctcaggacagtcctctggctacggtcaacatggatctagctcaggtcattcctctacccatgggcaacacggttctacatcaggacagtcatcgagctgtggccaacatggagctagctcaggtcagtcttccagccacggtcagcatggctctggctcaagtcagtcttctggctatggccgacagggctctggatctggccagtctccaggccacggccagcgtgggtctgggtcaaggcagtctcccagctacggccgacatgggtctggctccggtcggtcttccagcagtggccaacatgggtctggcttaggcgagtcttctggctttggtcaccacgagtctagctcagggcagtcctctagttacagtcagcatgggtctggctcaggtcactcctctggctacggacaacacggctctagatcaggacagtcatctaggggtgaacgacacggatctagctcaggttcgtcttcccactatggtcagcatgggtctggctcccgtcagtcttcgggccacggccgacaagggtctggatctggccattcccctagccgcggccgacatgggtccggtttggggcactcctccagccacggccaacatgggtctggctcaggtcgttcttccagccgtggcccatatgagtctcgctcgggtcactcttctgtctttggtcaacatgagtctggctcaggacattcctctgcttacagtcagcatggtagtggctcagggcacttctgtagccaaggacagcatggttctacatcaggacagtcatcaacctttgaccaggagggatctagcacaggccagtcttccagctatggccaccgtggctctggctccagtcagtcttctggctatggccgacatggggctggatctggccagtctcctagtcgcggccgacatgggtccggttctgggcactcttccagctacggccaacatgggtctggctccggttggtcttccagcagtggccgacatgggtctggctcaggtcagtcttctggatttggtcaccacgagtctagctcatggcagtcctctggttgcactcagcatggatctggctcaggtcactcctccagctacgaacaacacggctctaggtcaggacagtcatctaggggtgaacgacacggatctagctcaggttcatcttccagctatggtcagcatgggtctggctcccgtcagtctttgggccacggccaacatgggtctggatctggccagtctcctagccctagccgtggccgacatgggtctggttctgggcagtcttccagctacagcccatatgggtctggctcagggtggtcttccagccgtggcccatatgagtctggctccagtcactcttctggcttaggtcaccgagagtctcgctcaggacagtcctctggctacggtcaacatggatctagctcaggtcattcctctacccatgggcaacatggttctacatcaggacagtcatcgagctgtggccaacatggagctagctcaggtcagtcttccagccacggtcagcatggctctggctcaagtcagtcttctggctatggccgacagggctctggatctggccagtctccaggccacggccagcgtgggtctgggtcaaggcagtctcccagctacggccgacatgggtctggctccggtcggtcttccagcagtggccaacatgggtctggcttaggcgagtcttctggctttggtcaccacgagtctagctcagggcagtcctctagttacagtcagcatgggtctggctcaggtcactcctctggctacggacaacacggctctagatcaggacagtcatctaggggtgaacgacacggatctagctcacgttcgtcttcccgctatggtcagcatgggtctggctcccgtcagtcttcgggccacggccgacaagggtctggatctggccagtcccctagccgcggccgacatgggtccggtttggggcactcctccagccacggccaacatgggtctggctcaggtcgttcttccagccgtggcccatatgagtctcgctcgggtcactcttctgtctttggtcaacatgagtctggctcaggacattcctctgcttacagtcagcatggtagtggctcagggcacttctgtagccaaggacagcatggttctacatcaggacagtcatcaacctttgaccaggagggatctagcacaggtcagtcttccagccacggtcagcatggctctggctcaagtcagtcttctagctatggccaacagggctctggatctggccagtctcctagtcgcggccgacatgggtccggttccgggcactcttccagctacggccaacatgggtctggctccggttggtcttccagcagtggccgacatgggtctggctcaggtcagtcttctggatttggtcaccatgagtctagctcatggcagtcctctggttacactcagcatggatctggctcaggtcactcctccagctacgaacaacacggctctaggtcaggacagtcatctaggggtgaacaacacggatctagctcaggttcatcttccagctatggtcagcatgggtctggctcccgtcagtctttgggccacggccaacatgggtctggatctggccagtctcctagccctagccgtggccgacatgggtctggttctgggcagtcttccagctacggcccatatgggtctggctcagggtggtcttccagccgtggcccatatgagtctggctccggtcactcttctggcttaggtcaccgagagtctcgctcaggacagtcctctggctacggtcaacatggatctagctcaggtcattcctctacccatgggcaacatggttctgcatcaggacagtcatcgagctgtggccaacatggagctagctcaggtcagtcttccagccacggtcagcatggctctggctcaagtcagtcttctggctatggccgacagggctctggatctggccagtctccaggccacggccagcgtgggtctgggtcaaggcagtctcccagctatggccgacatgggtctggctccggtcggtcttccagcagtggccaacatgggcctggcttaggcgagtcttctggctttggtcaccacgagtctagctcagggcagtcctctagttacagtcagcatgggtctggctcaggtcactcctctggctacggacaacacggctctagatcaggacagtcatctaggggtgaacgacacggatctagctcaggttcgtcttcccgctatggtcagcatgggtctggctcccgtcagtcttcgggccacggccgacaagggtctggatctggccattcccctagccgcggccgacatgggtccggttcggggcactcctccagccacggccaacatgggtctggctcaggtcgttcttccagccgtggcccatatgagtctcgctcgggtcactcttctgtctttggtcaacatgagtctggctcaggacattcctctgcttacagtcagcatggtagtggctcagggcacttctgtagccaaggacagcatggttctacatcaggacagtcatcaacctttgaccaggagggatctagcacaggtcagtcttccagccacggtcagcatggctctggctcaagtcagtcttctagctatggccaacagggctctggatctggccagtctcctagtcgcggccgacatgggtccggttccgggcactcttccagctacggccaacatgggtctggctccggttggtcttccagcagtggccgacatgggtctggctcaggtcagtcttctggatttggtcaccacgagtctagctcatggcagtcctctggttacactcagcatggatctggctcaggtcactcctccagctacgaacaacacggctctaggtcaggacagtcatctaggggtgaacgacacggatctagctcaggttcatcttccagctatggtcagcatgggtctggctcccgtcagtctttgggccacggccaacatgggtctggatctggccagtctcctagccctagccgtggccgacatgggtctggttctgggcagtcttccagctacagcccatatgggtctggctcagggtggtcttccagccgtggcccatatgagtctggctccggtcactcttctggcttaggtcaccgagagtctcgctcaggacagtcctctggctacggtcaacatggatctagctcaggtcattcctctacccatgggcaacatggttctacatcaggacagtcatcgagctgtggccaacatggagctagctcaggtcagtcttccagccacggtcagcatggctctggctcaagtcagtcttctggctatggccgacagggctctggatctggccagtctccaggccacggccagcgtgggtctgggtcaaggcagtctcccagctacggccgacatgggtctggctccggtcggtcttccagcagtggccaacatgggtctggcttaggcgagtcttctggctttggtcaccacgagtctagctcagggcagtcctctagttacagtcagcatgggtctggctcaggtcactcctctggctacggacaacacggctctagatcaggacagtcatctaggggtgaacgacacggatctagctcaggttcgtcttcccactatggtcagcatgggtctggctcccgtcagtcttcgggccacggccgacaagggtctggatctggccagtcccctagccgcggccgacatgggtccggtttggggcactcctccagccacggccaacatgggtctggctcaggtcgttcttccagccgtggcccatatgagtctcgcttgggtcactcttctgtctttggtcaacatgagtctggctcaggacattcctctgcttacagtcagcatggtagtggctcagggcacttctgtagccaaggacagcatggttctacatcaggacagtcatcaacctttgaccaggagggatctagcacaggccagtcttccagctatggccaccgtggctctggctccagtcagtcttctggctatggccgacatggggctggatctggccagtctcttagccacggccgacacgggtctggttcagggcagtcttccagctacggccaacatgggtctggctcaggacagtcctctggttatagtcagcatggaagtggctcagggcaagatgggtattcttattgcaaaggaggaagtaaccatgatgggggaagttctggctcatattttctcagttttcctagtagcacttcaccctatgaatatgtccaagagcagaggtgctacttttatcagtgaataataaacataaatgcaatttactcaagtagcaatttaagaaataggaaagtcatctatgaattcatcatgaaagacaagcaatccatcatgaaattcgttctaaaagtgaatcaatgcatttctgtctctttctttagagcctaaaactgtagcatatatcttgttatggggttccttccaaagactgttaggcatttgtgctactttgttagaaaatactgagtggaataacttgttagaatgagggttaaactttgaggaataatgaaaagcttttaaagagctttgggtttagttggagttgtctttttgagagctcatcattcatttatagatggtgccaaagctaaccttacatttcttagaagcaaaatattacaaatgcattaccagtcctagatacaaagctttgttttacagcaattagtgtaccctaatttttagtgtgccccaagtttggtgtgtcccaatttttggtattgtggcagaaggtgaaggctctgaaagcaaagatgcagcagcggtagtgtctttacttatcaaaaccatcaagtcctttttcttgggtatatatttaatcagtaagttaattagtggcataaaaaagtagcatcagggtcttttcccaagccagtgagcaagagcattatttcataaagaatagggatttatcatttcaggaaaaaaaaaaacattcaaatgtgggctttagcttgttttcagcagaaagatcttgctccctatttctaagaggctgctcaatattgggaaatatattgaggagttattccatggaaatacaatgctttccacctactactgtagttcaataacgtttccacctgaaaaaatatcatccatgcccagatgaaaaggaagagtatctgtcactgctacatagttccttaatttgactgtaacacatttgtttcaagtctttggattcaaacaaccggattgtattaaaattgacaataaataaatgttgatt

SEQ ID NO: 164 - protein, 2850 aa, Homo sapiens
MPKLLQGVITVIDVFYQYATQHGEYDTLNKAELKELLENEFHQILKNPNDPDTVDIILQSLDRDHNKKVDFTEYLLMIFKLVQARNKIIGKDYCQVSGSKLRDDTHQHQEEQEETEKEENKRQESSFSHSSWSAGENDSYSRNVRGSLKPGTESISRRLSFQRDFSGQHNSYSGQSSSYGEQNSDSHQSSGRGQCGSGSGQSPNYGQHGSGSGQSSSNDTHGSGSGQSSGFSQHKSSSGQSSGYSQHGSGSGHSSGYGQHGSRSGQSSRGERHRSSSGSSSSYGQHGSGSRQSLGHGRQGSGSRQSPSHVRHGSGSGHSSSHGQHGSGSSYSYSRGHYESGSGQTSGFGQHESGSGQSSGYSKHGSGSGHSSSQGQHGSTSGQASSSGQHGSSSRQSSSYGQHESASRHSSGRGQHSSGSGQSPGHGQRGSGSGQSPSSGQHGTGFGRSSSSGPYVSGSGYSSGFGHHESSSEHSSGYTQHGSGSGHSSGHGQHGSRSGQSSRGERQGSSAGSSSSYGQHGSGSRQSLGHSRHGSGSGQSPSPSRGRHESGSRQSSSYGPHGYGSGRSSSRGPYESGSGHSSGLGHQESRSGQSSGYGQHGSSSGHSSTHGQHGSTSGQSSSCGQHGATSGQSSSHGQHGSGSSQSSRYGQQGSGSGQSPSRGRHGSDFGHSSSYGQHGSGSGWSSSNGPHGSVSGQSSGFGHKSGSGQSSGYSQHGSGSSHSSGYRKHGSRSGQSSRSEQHGSSSGLSSSYGQHGSGSHQSSGHGRQGSGSGHSPSRVRHGSSSGHSSSHGQHGSGTSCSSSCGHYESGSGQASGFGQHESGSGQGYSQHGSASGHFSSQGRHGSTSGQSSSSGQHDSSSGQSSSYGQHESASHHASGRGRHGSGSGQSPGHGQRGSGSGQSPSYGRHGSGSGRSSSSGRHGSGSGQSSGFGHKSSSGQSSGYTQHGSGSGHSSSYEQHGSRSGQSSRSEQHGSSSGSSSSYGQHGSGSRQSLGHGQHGSGSGQSPSPSRGRHGSGSGQSSSYGPYRSGSGWSSSRGPYESGSGHSSGLGHRESRSGQSSGYGQHGSSSGHSSTHGQHGSTSGQSSSCGQHGASSGQSSSHGQHGSGSSQSSGYGRQGSGSGQSPGHGQRGSGSRQSPSYGRHGSGSGRSSSSGQHGSGLGESSGFGHHESSSGQSSSYSQHGSGSGHSSGYGQHGSRSGQSSRGERHGSSSGSSSHYGQHGSGSRQSSGHGRQGSGSGHSPSRGRHGSGLGHSSSHGQHGSGSGRSSSRGPYESRSGHSSVFGQHESGSGHSSAYSQHGSGSGHFCSQGQHGSTSGQSSTFDQEGSSTGQSSSYGHRGSGSSQSSGYGRHGAGSGQSPSRGRHGSGSGHSSSYGQHGSGSGWSSSSGRHGSGSGQSSGFGHHESSSWQSSGCTQHGSGSGHSSSYEQHGSRSGQSSRGERHGSSSGSSSSYGQHGSGSRQSLGHGQHGSGSGQSPSPSRGRHGSGSGQSSSYSPYGSGSGWSSSRGPYESGSSHSSGLGHRESRSGQSSGYGQHGSSSGHSSTHGQHGSTSGQSSSCGQHGASSGQSSSHGQHGSGSSQSSGYGRQGSGSGQSPGHGQRGSGSRQSPSYGRHGSGSGRSSSSGQHGSGLGESSGFGHHESSSGQSSSYSQHGSGSGHSSGYGQHGSRSGQSSRGERHGSSSRSSSRYGQHGSGSRQSSGHGRQGSGSGQSPSRGRHGSGLGHSSSHGQHGSGSGRSSSRGPYESRSGHSSVFGQHESGSGHSSAYSQHGSGSGHFCSQGQHGSTSGQSSTFDQEGSSTGQSSSHGQHGSGSSQSSSYGQQGSGSGQSPSRGRHGSGSGHSSSYGQHGSGSGWSSSSGRHGSGSGQSSGFGHHESSSWQSSGYTQHGSGSGHSSSYEQHGSRSGQSSRGEQHGSSSGSSSSYGQHGSGSRQSLGHGQHGSGSGQSPSPSRGRHGSGSGQSSSYGPYGSGSGWSSSRGPYESGSGHSSGLGHRESRSGQSSGYGQHGSSSGHSSTHGQHGSASGQSSSCGQHGASSGQSSSHGQHGSGSSQSSGYGRQGSGSGQSPGHGQRGSGSRQSPSYGRHGSGSGRSSSSGQHGPGLGESSGFGHHESSSGQSSSYSQHGSGSGHSSGYGQHGSRSGQSSRGERHGSSSGSSSRYGQHGSGSRQSSGHGRQGSGSGHSPSRGRHGSGSGHSSSHGQHGSGSGRSSSRGPYESRSGHSSVFGQHESGSGHSSAYSQHGSGSGHFCSQGQHGSTSGQSSTFDQEGSSTGQSSSHGQHGSGSSQSSSYGQQGSGSGQSPSRGRHGSGSGHSSSYGQHGSGSGWSSSSGRHGSGSGQSSGFGHHESSSWQSSGYTQHGSGSGHSSSYEQHGSRSGQSSRGERHGSSSGSSSSYGQHGSGSRQSLGHGQHGSGSGQSPSPSRGRHGSGSGQSSSYSPYGSGSGWSSSRGPYESGSGHSSGLGHRESRSGQSSGYGQHGSSSGHSSTHGQHGSTSGQSSSCGQHGASSGQSSSHGQHGSGSSQSSGYGRQGSGSGQSPGHGQRGSGSRQSPSYGRHGSGSGRSSSSGQHGSGLGESSGFGHHESSSGQSSSYSQHGSGSGHSSGYGQHGSRSGQSSRGERHGSSSGSSSHYGQHGSGSRQSSGHGRQGSGSGQSPSRGRHGSGLGHSSSHGQHGSGSGRSSSRGPYESRLGHSSVFGQHESGSGHSSAYSQHGSGSGHFCSQGQHGSTSGQSSTFDQEGSSTGQSSSYGHRGSGSSQSSGYGRHGAGSGQSLSHGRHGSGSGQSSSYGQHGSGSGQSSGYSQHGSGSGQDGYSYCKGGSNHDGGSSGSYFLSFPSSTSPYEYVQEQRCYFYQ

SEQ ID NO: 165 - DNA, 1749 bp, Homo sapiens
aggaagccagcactagtcaagtgactctaagaagggccattttcccttgttgtctttgaaaatacttcattttcttagcatttcaggagattataacatcctgtatttcagtttctgagagctttactgactgatttccctattcaaaacaatcctcatttcctacatttctgaagatctcaagatctggactactgttgaagaaattcccagtaaggctcacttatatctttagagatggcaaataactacaagaaaattgttctactgaaaggattagaggtcatcaatgattatcattttagaattgttaagtccttactgagtaacgatttaaaacttaatccaaaaatgaaagaagagtatgacaaaattcagattgctgacttgatggaggaaaagttcccaggtgatgccggtttgggcaaactaatagaattcttcaaagaaataccaacactgggagaccttgctgaaactcttaaaagagaaaagttaaaagttgcaaataaaattgaatccattccagtcaaaggaataatcccatctaaaaagacgaaacagaaagaagtgtatcctgctacacctgcatgcaccccaagcaaccgtctcacagctaaaggagcagaggagactcttggacctcagaaaagaaaaaaaccatctgaagaagagactggaaccaaaaggagtaagatgtccaaagagcagactcggccttcctgctctgcaggagccagcacgtccacagccatgggccgttccccacctccccagacctcatcatcagctccacccaacacttcctcaactgagagcctaaaaccattggccaaccgtcacgcaactgccagtaaaaatattttccgagaagacccaataatcgcgatggtactaaatgcaacaaaagtatttaaatatgaatcctcagaaaatgagcaaagaagaatgtttcatgctacagtggctacgcagacacagttctttcatgtgaaggttttaaacatcaacttgaagaggaaattcattaaaaagagaatcatcattatatcaaattattccaaacgtaatagtctcctagaggtgaatgaagcctcttctgtatctgaagctggtcctgaccaaacgtttgaggttccaaaggacatcatcagaagagcaaagaaaattccgaagatcaatattcttcacaaacaaacttcaggatatattgtatatggattatttatgctacatacgaaaattgtaaataggaagacgacaatctatgaaattcaggataaaacaggaagtatggctgtagtaggaaaaggagaatgccacaatatcccctgtgaaaaaggagataagcttcgactcttctgctttcgactgagaaagagggaaaatatgtcaaaactgatgtcagaaatgcatagtttcatccagatacagaaaaatacaaaccagagaagccatgactccaggagcatggcactaccccaggaacagagtcagcatccaaaaccttcagaggccagcacaaccctacctgaaagccatctcaagactcctcagatgccaccaacaaccccatccagcagttccttcaccaagaaggatgaaacccacccaggagcacagtcatcgcctgcaaactttagaatcacctcaccaactgtggcccctcctctttcttctgacacttccaccaaccgccatccagcagttccttaaataaggtcaccaaggacaaggatatcaaataac

SEQ ID NO: 166 - protein, 492 aa, Homo sapiens
MANNYKKIVLLKGLEVINDYHFRIVKSLLSNDLKLNPKMKEEYDKIQIADLMEEKFPGDAGLGKLIEFFKEIPTLGDLAETLKREKLKVANKIESIPVKGIIPSKKTKQKEVYPATPACTPSNRLTAKGAEETLGPQKRKKPSEEETGTKRSKMSKEQTRPSCSAGASTSTAMGRSPPPQTSSSAPPNTSSTESLKPLANRHATASKNIFREDPIIAMVLNATKVFKYESSENEQRRMFHATVATQTQFFHVKVLNINLKRKFIKKRIIIISNYSKRNSLLEVNEASSVSEAGPDQTFEVPKDIIRRAKKIPKINILHKQTSGYIVYGLFMLHTKIVNRKTTIYEIQDKTGSMAVVGKGECHNIPCEKGDKLRLFCFRLRKRENMSKLMSEMHSFIQIQKNTNQRSHDSRSMALPQEQSQHPKPSEASTTLPESHLKTPQMPPTTPSSSSFTKKDETHPGAQSSPANFRITSPTVAPPLSSDTSTNRHPAVP

SEQ ID NO: 167 - DNA, 1722 bp, Homo sapiens
aggaagccagcactagtcaagtgactctaagaagggccattttcccttgttgtctttgaaaatacttcattttcttagcatttcaggagattataacatcctgtatttcagtttctgagagctttactgactgatttccctattcaaaacaatcctcatttcctacatttctgaagatctcaagatctggactactgttgaagaaattcccagtaaggctcacttatatctttagagatggcaaataactacaagaaaattgttctactgaaaggattagaggtcatcaatgattatcattttagaattgttaagtccttactgagtaacgatttaaaacttaatccaaaaatgaaagaagagtatgacaaaattcagattgctgacttgatggaggaaaagttcccaggtgatgccggtttgggcaaactaatagaattcttcaaagaaataccaacactgggagaccttgctgaaactcttaaaagagaaaagttaaaagtcaaaggaataatcccatctaaaaagacgaaacagaaagaagtgtatcctgctacacctgcatgcaccccaagcaaccgtctcacagctaaaggagcagaggagactcttggacctcagaaaagaaaaaaaccatctgaagaagagactggaaccaaaaggagtaagatgtccaaagagcagactcggccttcctgctctgcaggagccagcacgtccacagccatgggccgttccccacctccccagacctcatcatcagctccacccaacacttcctcaactgagagcctaaaaccattggccaaccgtcacgcaactgccagtaaaaatattttccgagaagacccaataatcgcgatggtactaaatgcaacaaaagtatttaaatatgaatcctcagaaaatgagcaaagaagaatgtttcatgctacagtggctacgcagacacagttctttcatgtgaaggttttaaacatcaacttgaagaggaaattcattaaaaagagaatcatcattatatcaaattattccaaacgtaatagtctcctagaggtgaatgaagcctcttctgtatctgaagctggtcctgaccaaacgtttgaggttccaaaggacatcatcagaagagcaaagaaaattccgaagatcaatattcttcacaaacaaacttcaggatatattgtatatggattatttatgctacatacgaaaattgtaaataggaagacgacaatctatgaaattcaggataaaacaggaagtatggctgtagtaggaaaaggagaatgccacaatatcccctgtgaaaaaggagataagcttcgactcttctgctttcgactgagaaagagggaaaatatgtcaaaactgatgtcagaaatgcatagtttcatccagatacagaaaaatacaaaccagagaagccatgactccaggagcatggcactaccccaggaacagagtcagcatccaaaaccttcagaggccagcacaaccctacctgaaagccatctcaagactcctcagatgccaccaacaaccccatccagcagttccttcaccaagaaggatgaaacccacccaggagcacagtcatcgcctgcaaactttagaatcacctcaccaactgtggcccctcctctttcttctgacacttccaccaaccgccatccagcagttccttaaataaggtcaccaaggacaaggatatcaaataac

SEQ ID NO: 168 - protein, 483 aa, Homo sapiens
MANNYKKIVLLKGLEVINDYHFRIVKSLLSNDLKLNPKMKEEYDKIQIADLMEEKFPGDAGLGKLIEFFKEIPTLGDLAETLKREKLKVKGIIPSKKTKQKEVYPATPACTPSNRLTAKGAEETLGPQKRKKPSEEETGTKRSKMSKEQTRPSCSAGASTSTAMGRSPPPQTSSSAPPNTSSTESLKPLANRHATASKNIFREDPIIAMVLNATKVFKYESSENEQRRMFHATVATQTQFFHVKVLNINLKRKFIKKRIIIISNYSKRNSLLEVNEASSVSEAGPDQTFEVPKDIIRRAKKIPKINILHKQTSGYIVYGLFMLHTKIVNRKTTIYEIQDKTGSMAVVGKGECHNIPCEKGDKLRLFCFRLRKRENMSKLMSEMHSFIQIQKNTNQRSHDSRSMALPQEQSQHPKPSEASTTLPESHLKTPQMPPTTPSSSSFTKKDETHPGAQSSPANFRITSPTVAPPLSSDTSTNRHPAVP

SEQ ID NO: 169 - DNA, 1985 bp, Homo sapiens
gccagcactagtcaagtgactctaagaagggccattttcccttgttgtctttgaaaatacttcattttcttagcatttcaggagattataacatcctgtatttcagtttctgagagctttactgactgatttccctattcaaaacaatcctcatttcctacatttctgaagatctcaagatctggactactgttgaagaaattcccagtaaggctcacttatatctttagagatggcaaataactacaagaaaattgttctactgaaaggattagaggtcatcaatgattatcattttagaattgttaagtccttactgagtaacgatttaaaacttaatccaaaaatgaaagaagagtatgacaaaattcagattgctgacttgatggaggaaaagttcccaggtgatgccggtttgggcaaactaatagaattcttcaaagaaataccaacactgggagaccttgctgaaactcttaaaagagaaaagttaaaagttgcaaataaaattgaatccattccagtcaaaggaataatcccatctaaaaagacgaaacagaaagaagtgtatcctgctacacctgcatgcaccccaagcaaccgtctcacagctaaaggagcagaggagactcttggacctcagaaaagaaaaaaaccatctgaagaagagactggaaccaaaaggagtaagatgtccaaagagcagactcggccttcctgctctgcaggagccagcacgtccacagccatgggccgttccccacctccccagacctcatcatcagctccacccaacacttcctcaactgagagcctaaaaccattggccaaccgtcacgcaactgccagtaaaaatattttccgagaagacccaataatcgcgatggtactaaatgcaacaaaagtatttaaatatgaatcctcagaaaatgagcaaagaagaatgtttcatgctacagtggctacgcagacacagttctttcatgtgaaggttttaaacatcaacttgaagaggaaattcattaaaaagagaatcatcattatatcaaattattccaaacgtaatagtctcctagaggtgaatgaagcctcttctgtatctgaagctggtcctgaccaaacgtttgaggttccaaaggacatcatcagaagagcaaagaaaattccgaagatcaatattcttcacaaacaaacttcaggatatattgtatatggattatttatgctacatacgaaaattgtaaataggaagacgacaatctatgaaattcaggataaaacaggaagtatggctgtagtaggaaaaggagaatgccacaatatcccctgtgaaaaaggagataagcttcgactcttctgctttcgactgagaaagagggaaaatatgtcaaaactgatgtcagaaatgcatagtttcatccagatacagaaaaatacaaaccagagaagccatgactccaggagcatggcactaccccaggaacagagtcagcatccaaaaccttcagaggccagcacaaccctacctgaaagccatctcaagactcctcagatgccaccaacaaccccatccagcagttccttcaccaaggtcaccaaggacaaggatatcaaataactactgttcaatctttactcaagtgtggaaattttgcctgaagtcctccacctaaaaacctgatgccattggtaatgatgtttatgaagataagatcaaagcacagaaaataatatatgtatatatatgtatatatatctggttgaaatactatatatatatatatatatatatatataccagctattaattctaggaaatggagtattaagggtgcattttatttcattagttttacttttatgcattttcttcatatcatattttgcattcagaattttcataatttgaaaaaaaataaaccttttttttcttaaaaaaaaaaaaaaaaaaaaaaaaaaaaaaaaaaaaaaaaaaaaaaaaaaaa

SEQ ID NO: 170 - protein, 461 aa, Homo sapiens
MANNYKKIVLLKGLEVINDYHFRIVKSLLSNDLKLNPKMKEEYDKIQIADLMEEKFPGDAGLGKLIEFFKEIPTLGDLAETLKREKLKVANKIESIPVKGIIPSKKTKQKEVYPATPACTPSNRLTAKGAEETLGPQKRKKPSEEETGTKRSKMSKEQTRPSCSAGASTSTAMGRSPPPQTSSSAPPNTSSTESLKPLANRHATASKNIFREDPIIAMVLNATKVFKYESSENEQRRMFHATVATQTQFFHVKVLNINLKRKFIKKRIIIISNYSKRNSLLEVNEASSVSEAGPDQTFEVPKDIIRRAKKIPKINILHKQTSGYIVYGLFMLHTKIVNRKTTIYEIQDKTGSMAVVGKGECHNIPCEKGDKLRLFCFRLRKRENMSKLMSEMHSFIQIQKNTNQRSHDSRSMALPQEQSQHPKPSEASTTLPESHLKTPQMPPTTPSSSSFTKVTKDKDIK

SEQ ID NO: 171 - DNA, 1597 bp, Homo sapiens
aggaagccagcactagtcaagtgactctaagaagggccattttcccttgttgtctttgaaaatacttcattttcttagcatttcaggagattataacatcctgtatttcagtttctgagagctttactgactgatttccctattcaaaacaatcctcatttcctacatttctgaagatctcaagatctggactactgttgaagaaattcccagtaaggctcacttatatctttagagatggcaaataactacaagaaaattgttctactgaaaggattagaggtcatcaatgattatcattttagaattgttaagtccttactgagtaacgatttaaaacttaatccaaaaatgaaagaagagtatgacaaaattcagattgctgacttgatggaggaaaagttcccaggtgatgccggtttgggcaaactaatagaattcttcaaagaaataccaacactgggagaccttgctgaaactcttaaaagagaaaagttaaaagtcaaaggaataatcccatctaaaaagacgaaacagaaagaagtgtatcctgctacacctgcatgcaccccaagcaaccgtctcacagctaaaggagcagaggagactcttggacctcagaaaagaaaaaaaccatctgaagaagagactggaaccaaaaggagtaagatgtccaaagagcagactcggccttcctgctctgcaggagccagcacgtccacagccatgggccgttccccacctccccagacctcatcatcagctccacccaacacttcctcaactgagagcctaaaaccattggccaaccgtcacgcaactgccagtaaaaatattttccgagaagacccaataatcgcgatggtactaaatgcaacaaaagtatttaaatatgaatcctcagaaaatgagcaaagaagaatgtttcatgctacagtggctacgcagacacagttctttcatgtgaaggttttaaacatcaacttgaagaggaaattcattaaaaagagaatcatcattatatcaaattattccaaacgtaatagtctcctagaggtgaatgaagcctcttctgtatctgaagctggtcctgaccaaacgtttgaggttccaaaggacatcatcagaagagcaaagaaaattccgaagatcaatattcttcacaaacaaacttcaggatatattgtatatggattatttatgctacatacgaaaattgtaaataggaagacgacaatctatgaaattcaggataaaacaggaagtatggctgtagtaggaaaaggagaatgccacaatatcccctgtgaaaaaggagataagcttcgactcttctgctttcgactgagaaagagggaaaatatgtcaaaactgatgtcagaaatgcatagtttcatccagatacagaaaaatacaaaccagagaagccatgactccaggagcatggcactaccccaggaacagagtcagcatccaaaaccttcagaggccagcacaaccctacctgaaagccatctcaagactcctcagatgccaccaacaaccccatccagcagttccttcaccaaggtcaccaaggacaaggatatcaaataac

SEQ ID NO: 172 - protein, 452 aa, Homo sapiens
MANNYKKIVLLKGLEVINDYHFRIVKSLLSNDLKLNPKMKEEYDKIQIADLMEEKFPGDAGLGKLIEFFKEIPTLGDLAETLKREKLKVKGIIPSKKTKQKEVYPATPACTPSNRLTAKGAEETLGPQKRKKPSEEETGTKRSKMSKEQTRPSCSAGASTSTAMGRSPPPQTSSSAPPNTSSTESLKPLANRHATASKNIFREDPIIAMVLNATKVFKYESSENEQRRMFHATVATQTQFFHVKVLNINLKRKFIKKRIIIISNYSKRNSLLEVNEASSVSEAGPDQTFEVPKDIIRRAKKIPKINILHKQTSGYIVYGLFMLHTKIVNRKTTIYEIQDKTGSMAVVGKGECHNIPCEKGDKLRLFCFRLRKRENMSKLMSEMHSFIQIQKNTNQRSHDSRSMALPQEQSQHPKPSEASTTLPESHLKTPQMPPTTPSSSSFTKVTKDKDIK

SEQ ID NO: 173 - DNA, 2750 bp, Homo sapiens
attgtttcctactccattttctctggggcaatagcagaataggagcaagccagcactagtcagctaactaagtgactcaaccaaggccttttttccttgttatctttgcagatacttcattttcttagcgtttctggagattacaacatcctgcggttccgtttctgggaactttactgatttatctcccccctcacacaaataagcattgattcctgcatttctgaagatctcaagatctggactactgttgaaaaaatttccagtgaggctcacttatgtctgtaaagatgggaaaaaaatacaagaacattgttctactaaaaggattagaggtcatcaatgattatcattttagaatggttaagtccttactgagcaacgatttaaaacttaatttaaaaatgagagaagagtatgacaaaattcagattgctgacttgatggaagaaaagttccgaggtgatgctggtttgggcaaactaataaaaattttcgaagatataccaacgcttgaagacctggctgaaactcttaaaaaagaaaagttaaaagtaaaaggaccagccctatcaagaaagaggaagaaggaagtggatgctacttcacctgcaccctccacaagcagcactgtcaaaactgaaggagcagaggcaactcctggagctcagaaaagaaaaaaatcaaccaaagaaaaggctggacccaaagggagtaaggtgtccgaggaacagactcagcctccctctcctgcaggagccggcatgtccacagccatgggccgttccccatctcccaagacctcattgtcagctccacccaacagttcttcaactgagaacccgaaaacagtggccaaatgtcaggtaactcccagaagaaatgttctccaaaaacgcccagtgatagtgaaggtactgagtacaacaaagccatttgaatatgagaccccagaaatggagaaaaaaataatgtttcatgctacagtggctacacagacacagttcttccatgtgaaggttttaaacaccagcttgaaggagaaattcaatggaaagaaaatcatcatcatatcagattatttggaatatgatagtctcctagaggtcaatgaagaatctactgtatctgaagctggtcctaaccaaacgtttgaggttccaaataaaatcatcaacagagcaaaggaaactctgaagattgatattcttcacaaacaagcttcaggaaatattgtatatggggtatttatgctacataagaaaacagtaaatcagaagaccacaatctacgaaattcaggatgatagaggaaaaatggatgtagtggggacaggacaatgtcacaatatcccctgtgaagaaggagataagctccaacttttctgctttcgacttagaaaaaagaaccagatgtcaaaactgatttcagaaatgcatagttttatccagataaagaaaaaaacaaacccgagaaacaatgaccccaagagcatgaagctaccccaggaacagcgtcagcttccatatccttcagaggccagcacaaccttccctgagagccatcttcggactcctcagatgccaccaacaactccatccagcagtttcttcaccaagaaaagtgaagacacaatctccaaaatgaatgacttcatgaggatgcagatactgaaggaagggagtcattttccaggaccgttcatgaccagcataggcccagctgagagccatccccacactcctcagatgcctccatcaacaccaagcagcagtttcttaaccacgttgaaaccaagactgaagactgaacctgaagaagtttccatagaagacagtgcccagagtgacctcaaagaagtgatggtgctgaacgcaacagaatcatttgtatatgagcccaaagagcagaagaaaatgtttcatgccacagtggcaactgagaatgaagtcttccgagtgaaggtttttaatattgacctaaaggagaagttcaccccaaagaagatcattgccatagcaaattatgtttgccgcaatgggttcctggaggtatatcctttcacacttgtggctgatgtgaatgctgaccgaaacatggagatcccaaaaggattgattagaagtgccagcgtaactcctaaaatcaatcagctttgctcacaaactaaaggaagttttgtgaatggggtgtttgaggtacataagaaaaatgtaaggggtgaattcacttattatgaaatacaagataatacagggaagatggaagtggtggtgcatggacgactgaccacaatcaactgtgaggaaggagataaactgaaactcacctgctttgaattggcaccgaaaagtgggaataccggggagttgagatctgtaattcatagtcacatcaaggtcatcaagaccaggaaaaacaagaaagacatactcaatcctgattcaagtatggaaacttcaccagactttttcttctaaaatctggatgtcattgacgataatgtttatggagataaggtctaagtgcctaaaaaaatgtacatatacctggttgaaatacaacactatacatacacaccaccatatatactagctgttaatcctatggaatggggtattgggagtgcttttttaatttttcatagtttttttttaataaaatggcatattttgcatctacaacttctataatttgaaaaaataaataaacattatcttttttgtgaaaggaaaaaaaaaaaaaaaaaa

SEQ ID NO: 174 - protein, 729 aa, Homo sapiens
MGKKYKNIVLLKGLEVINDYHFRMVKSLLSNDLKLNLKMREEYDKIQIADLMEEKFRGDAGLGKLIKIFEDIPTLEDLAETLKKEKLKVKGPALSRKRKKEVDATSPAPSTSSTVKTEGAEATPGAQKRKKSTKEKAGPKGSKVSEEQTQPPSPAGAGMSTAMGRSPSPKTSLSAPPNSSSTENPKTVAKCQVTPRRNVLQKRPVIVKVLSTTKPFEYETPEMEKKIMFHATVATQTQFFHVKVLNTSLKEKFNGKKIIIISDYLEYDSLLEVNEESTVSEAGPNQTFEVPNKIINRAKETLKIDILHKQASGNIVYGVFMLHKKTVNQKTTIYEIQDDRGKMDVVGTGQCHNIPCEEGDKLQLFCFRLRKKNQMSKLISEMHSFIQIKKKTNPRNNDPKSMKLPQEQRQLPYPSEASTTFPESHLRTPQMPPTTPSSSFFTKKSEDTISKMNDFMRMQILKEGSHFPGPFMTSIGPAESHPHTPQMPPSTPSSSFLTTLKPRLKTEPEEVSIEDSAQSDLKEVMVLNATESFVYEPKEQKKMFHATVATENEVFRVKVFNIDLKEKFTPKKIIAIANYVCRNGFLEVYPFTLVADVNADRNMEIPKGLIRSASVTPKINQLCSQTKGSFVNGVFEVHKKNVRGEFTYYEIQDNTGKMEVVVHGRLTTINCEEGDKLKLTCFELAPKSGNTGELRSVIHSHIKVIKTRKNKKDILNPDSSMETSPDFFF

SEQ ID NO: 175 - DNA, 1485 bp, Homo sapiens
tcagccaattagagctccagttgtcactcctacccacactgggcctgggggtgaagggaagtgtttattaggggtacatgtgaagccgtccagaagtgtcagagtctttgtagctttgaaagtcacctaggttatttgggcatgctctcctgagtcctctgctagttaagctctctgaaaagaaggtggcagacccggtttgctgatcgccccagggatcaggaggctgatcccaaagttgtcagatggagagtaaatacaaggagatactcttgctaacaggcctggataacatcactgatgaggaactggataggtttaagttctttctttcagacgagtttaatattgccacaggcaaactacatactgcaaacagaatacaagtagctaccttgatgattcaaaatgctggggcggtgtctgcagtgatgaagaccattcgtatttttcagaagttgaattatatgcttttggcaaaacgtcttcaggaggagaaggagaaagttgataagcaatacaaatcggtaacaaaaccaaagccactaagtcaagctgaaatgagtcctgctgcatctgcagccatcagaaatgatgtcgcaaagcaacgtgctgcaccaaaagtctctcctcatgttaagcctgaacagaaacagatggtggcccagcaggaatctatcagagaagggtttcagaagcgctgtttgccagttatggtactgaaagcaaagaagcccttcacgtttgagacccaagaaggcaagcaggagatgtttcatgctacagtggctacagaaaaggaattcttctttgtaaaagtttttaatacactgctgaaagataaattcattccaaagagaataattataatagcaagatattatcggcacagtggtttcttagaggtaaatagcgcctcacgtgtgttagatgctgaatctgaccaaaaggttaatgtcccgctgaacattatcagaaaagctggtgaaaccccgaagatcaacacgcttcaaactcagccccttggaacaattgtgaatggtttgtttgtagtccagaaggtaacagaaaagaagaaaaacatattatttgacctaagtgacaacactgggaaaatggaagtactgggggttagaaacgaggacacaatgaaatgtaaggaaggagataaggttcgacttacattcttcacactgtcaaaaaatggagaaaaactacagctgacatctggagttcatagcaccataaaggttattaaggccaaaaaaaaaacatagagaagtaaaaaggaccaattcaagccaactggtctaagcagcatttaattgaagaatatgtgatacagcctcttcaatcagattgtaagttacctgaaagctgcagttcacaggctcctctctccaccaaattaggatagaataattgctggataaacaaattcagaatatcaacagatgatcacaataaacatctgtttctcattcc

SEQ ID NO: 176 - protein, 343 aa, Homo sapiens
MESKYKEILLLTGLDNITDEELDRFKFFLSDEFNIATGKLHTANRIQVATLMIQNAGAVSAVMKTIRIFQKLNYMLLAKRLQEEKEKVDKQYKSVTKPKPLSQAEMSPAASAAIRNDVAKQRAAPKVSPHVKPEQKQMVAQQESIREGFQKRCLPVMVLKAKKPFTFETQEGKQEMFHATVATEKEFFFVKVFNTLLKDKFIPKRIIIIARYYRHSGFLEVNSASRVLDAESDQKVNVPLNIIRKAGETPKINTLQTQPLGTIVNGLFVVQKVTEKKKNILFDLSDNTGKMEVLGVRNEDTMKCKEGDKVRLTFFTLSKNGEKLQLTSGVHSTIKVIKAKKKT

SEQ ID NO: 177 - DNA, 2540 bp, Homo sapiens
cccacctcggccccgggctccgaagcggctcgggggcgccctttcggtcaacatcgtagtccaccccctccccatccccagcccccggggattcaggctcgccagcgcccagccagggagccggccgggaagcgcgatgggggccccagccgcctcgctcctgctcctgctcctgctgttcgcctgctgctgggcgcccggcggggccaacctctcccaggacggctactggcaggagcaggatttggagctgggaactctggctccactcgacgaggccatcagctccacagtctggagcagccctgacatgctggccagtcaagacagccagccctggacatctgatgaaacagtggtggctggtggcaccgtggtgctcaagtgccaagtgaaagatcacgaggactcatccctgcaatggtctaaccctgctcagcagactctctactttggggagaagagagcccttcgagataatcgaattcagctggttacctctacgccccacgagctcagcatcagcatcagcaatgtggccctggcagacgagggcgagtacacctgctcaatcttcactatgcctgtgcgaactgccaagtccctcgtcactgtgctaggaattccacagaagcccatcatcactggttataaatcttcattacgggaaaaagacacagccaccctaaactgtcagtcttctgggagcaagcctgcagcccggctcacctggagaaagggtgaccaagaactccacggagaaccaacccgcatacaggaagatcccaatggtaaaaccttcactgtcagcagctcggtgacattccaggttacccgggaggatgatggggcgagcatcgtgtgctctgtgaaccatgaatctctaaagggagctgacagatccacctctcaacgcattgaagttttatacacaccaactgcgatgattaggccagaccctccccatcctcgtgagggccagaagctgttgctacactgtgagggtcgcggcaatccagtcccccagcagtacctatgggagaaggagggcagtgtgccacccctgaagatgacccaggagagtgccctgatcttccctttcctcaacaagagtgacagtggcacctacggctgcacagccaccagcaacatgggcagctacaaggcctactacaccctcaatgttaatgaccccagtccggtgccctcctcctccagcacctaccacgccatcatcggtgggatcgtggctttcattgtcttcctgctgctcatcatgctcatcttcctcggccactacttgatccggcacaaaggaacctacctgacacatgaggcaaaaggctccgacgatgctccagacgcggacacggccatcatcaatgcagaaggcgggcagtcaggaggggacgacaagaaggaatatttcatctagaggcgcctgcccacttcctgcgccccccaggggccctgtggggactgctggggccgtcaccaacccggacttgtacagagcaaccgcagggccgcccctcccgcttgctccccagcccacccacccccctgtacagaatgtctgctttgggtgcggttttgtactcggtttggaatggggagggaggagggcggggggaggggagggttgccctcagccctttccgtggcttctctgcatttgggttattattatttttgtaacaatcccaaagcaaatctgtctccaggctggagaggcaggagccctggggtgagaaaagcaaaaaacaaacaaaaaacaaaaccctggagtgttaggaggagagtgaagtagaggggtgaggaagggtaaggggcagggctggtttcagctgggggctctcaccagccctcctttcagcctctacaacagagcagcttcccagacttctccaggaacccagaaacgggatggttgtcggcaaaggttgggagtggcttttcctctggtagccacacacctgagcactacggacagggaggcaggtgccaccttgacacctctcttccatagcaatgggaaagtgatgagtgcgggagtcctgaggagatgtggcctgcagacaacatgcagccatgcagggacccaggactgtaacctggggaggacgcgggtccctgcaaggaagagtagatttggagaggaaggatggaggtggactctcaccccattccccccggaaatgaacaaagccgggccctttccataggaactgcccttggagatagcagagtgtggctgcccctccttgctccagcagcagtgggagaggcactgctctggggcctgaactgcctctgcttccccccctgaggggcccctcactcttacccaagactctggaattgttgcacggcaaccactcctcccatggcattgctcagcaactacttctcccttcccggccaccctgtgcccccttcctggtcccaacgccagcccttcatccttcctccctcagcagccaggcagacataacaacaaactactaaaaggagcttcactgcaaaaaaaaaaaaaaaaa

SEQ ID NO: 178 - protein, 432 aa, Homo sapiens
MGAPAASLLLLLLLFACCWAPGGANLSQDGYWQEQDLELGTLAPLDEAISSTVWSSPDMLASQDSQPWTSDETVVAGGTVVLKCQVKDHEDSSLQWSNPAQQTLYFGEKRALRDNRIQLVTSTPHELSISISNVALADEGEYTCSIFTMPVRTAKSLVTVLGIPQKPIITGYKSSLREKDTATLNCQSSGSKPAARLTWRKGDQELHGEPTRIQEDPNGKTFTVSSSVTFQVTREDDGASIVCSVNHESLKGADRSTSQRIEVLYTPTAMIRPDPPHPREGQKLLLHCEGRGNPVPQQYLWEKEGSVPPLKMTQESALIFPFLNKSDSGTYGCTATSNMGSYKAYYTLNVNDPSPVPSSSSTYHAIIGGIVAFIVFLLLIMLIFLGHYLIRHKGTYLTHEAKGSDDAPDADTAIINAEGGQSGGDDKKEYFI

SEQ ID NO: 179 - DNA, 3252 bp, Homo sapiens
gaatcctcagaatgtgaggtttctctcaaaggcatcttgcatcagcctgtggatgtatgcctaccaccgggctccttcaccagcaaagtggaaaaagaagcgtttcacaacaaattcttctttttgggttggggaaacgcagtggattatagctctgttttcttctttccaaaactgtgcacccctggatgaaacctccatcaagggagacctacaagttgcctggggttcagtgctctagaaagttccaaggtttgtggcttgaattattctaaagaagctgaaataattgaagagaagcagaggccagctgtttttgaggatcctgctccacagagaatgctctgcacccgttgatatgcctcccaggacccagagggagactgtagcctcatttctgtggagacctttggctggactctcctggctctcccagagactccagttccaacaccatcttctgagatgatcctgattcccagaatgctcttggtgctgttcctgctgctgcctatcttgagttctgcaaaagctcaggttaatccagctatatgccgctatcctctgggcatgtcaggaggccagattccagatgaggacatcacagcttccagtcagtggtcagagtccacagctgccaaatatggaaggctggactcagaagaaggggatggagcctggtgccctgagattccagtggaacctgatgacctgaaggagtttctgcagattgacttgcacaccctccattttatcactctggtggggacccaggggcgccatgcaggaggtcatggcatcgagtttgcccccatgtacaagatcaattacagtcgggatggcactcgctggatctcttggcggaaccgtcatgggaaacaggtgctggatggaaatagtaacccctatgacattttcctaaaggacttggagccgcccattgtagccagatttgtccggttcattccagtcaccgaccactccatgaatgtgtgtatgagagtggagctttacggctgtgtctggctagatggcttggtgtcttacaatgctccagctgggcagcagtttgtactccctggaggttccatcatttatctgaatgattctgtctatgatggagctgttggatacagcatgacagaagggctaggccaattgaccgatggtgtgtctggcctggacgatttcacccagacccatgaataccacgtgtggcccggctatgactatgtgggctggcggaacgagagtgccaccaatggctacattgagatcatgtttgaatttgaccgcatcaggaatttcactaccatgaaggtccactgcaacaacatgtttgctaaaggtgtgaagatctttaaggaggtacagtgctacttccgctctgaagccagtgagtgggaacctaatgccatttccttcccccttgtcctggatgacgtcaaccccagtgctcggtttgtcacggtgcctctccaccaccgaatggccagtgccatcaagtgtcaataccattttgcagatacctggatgatgttcagtgagatcaccttccaatcagatgctgcaatgtacaacaactctgaagccctgcccacctctcctatggcacccacaacctatgatccaatgcttaaagttgatgacagcaacactcggatcctgattggctgcttggtggccatcatctttatcctcctggccatcattgtcatcatcctctggaggcagttctggcagaaaatgctggagaaggcttctcggaggatgctggatgatgaaatgacagtcagcctttccctgccaagtgattctagcatgttcaacaataaccgctcctcatcacctagtgaacaagggtccaactcgacttacgatcgcatctttccccttcgccctgactaccaggagccatccaggctgatacgaaaactcccagaatttgctccaggggaggaggagtcaggctgcagcggtgttgtgaagccagtccagcccagtggccctgagggggtgccccactatgcagaggctgacatagtgaacctccaaggagtgacaggaggcaacacatactcagtgcctgccgtcaccatggacctgctctcaggaaaagatgtggctgtggaggagttccccaggaaactcctaactttcaaagagaagctgggagaaggacagtttggggaggttcatctctgtgaagtggagggaatggaaaaattcaaagacaaagattttgccctagatgtcagtgccaaccagcctgtcctggtggctgtgaaaatgctccgagcagatgccaacaagaatgccaggaatgattttcttaaggagataaagatcatgtctcggctcaaggacccaaacatcatccatctattagctgtgtgtatcactgatgaccctctctgtatgatcactgaatacatggagaatggagatctcaatcagtttctttcccgccacgagccccctaattcttcctccagcgatgtacgcactgtcagttacaccaatctgaagtttatggctacccaaattgcctctggcatgaagtacctttcctctcttaattttgttcaccgagatctggccacacgaaactgtttagtgggtaagaactacacaatcaagatagctgactttggaatgagcaggaacctgtacagtggtgactattaccggatccagggccgggcagtgctccctatccgctggatgtcttgggagagtatcttgctgggcaagttcactacagcaagtgatgtgtgggcctttggggttactttgtgggagactttcaccttttgtcaagaacagccctattcccagctgtcagatgaacaggttattgagaatactggagagttcttccgagaccaagggaggcagacttacctccctcaaccagccatttgtcctgactctgtgtataagctgatgctcagctgctggagaagagatacgaagaaccgtccctcattccaagaaatccaccttctgctccttcaacaaggcgacgagtgatgctgtcagtgcctggccatgttcctacggctcaggtcctccctacaagacctaccactcacccatgcctatgccactccatctggacatttaatgaaactgagagacagaggcttgtttgctttgccctcttttcctggtcacccccactccctacccctgactcatatatacttttttttttttttacattaaagaactaaaaaaggaaaaaaaaaa

SEQ ID NO: 180 - protein, 855 aa, Homo sapiens
MILIPRMLLVLFLLLPILSSAKAQVNPAICRYPLGMSGGQIPDEDITASSQWSESTAAKYGRLDSEEGDGAWCPEIPVEPDDLKEFLQIDLHTLHFITLVGTQGRHAGGHGIEFAPMYKINYSRDGTRWISWRNRHGKQVLDGNSNPYDIFLKDLEPPIVARFVRFIPVTDHSMNVCMRVELYGCVWLDGLVSYNAPAGQQFVLPGGSIIYLNDSVYDGAVGYSMTEGLGQLTDGVSGLDDFTQTHEYHVWPGYDYVGWRNESATNGYIEIMFEFDRIRNFTTMKVHCNNMFAKGVKIFKEVQCYFRSEASEWEPNAISFPLVLDDVNPSARFVTVPLHHRMASAIKCQYHFADTWMMFSEITFQSDAAMYNNSEALPTSPMAPTTYDPMLKVDDSNTRILIGCLVAIIFILLAIIVIILWRQFWQKMLEKASRRMLDDEMTVSLSLPSDSSMFNNNRSSSPSEQGSNSTYDRIFPLRPDYQEPSRLIRKLPEFAPGEEESGCSGVVKPVQPSGPEGVPHYAEADIVNLQGVTGGNTYSVPAVTMDLLSGKDVAVEEFPRKLLTFKEKLGEGQFGEVHLCEVEGMEKFKDKDFALDVSANQPVLVAVKMLRADANKNARNDFLKEIKIMSRLKDPNIIHLLAVCITDDPLCMITEYMENGDLNQFLSRHEPPNSSSSDVRTVSYTNLKFMATQIASGMKYLSSLNFVHRDLATRNCLVGKNYTIKIADFGMSRNLYSGDYYRIQGRAVLPIRWMSWESILLGKFTTASDVWAFGVTLWETFTFCQEQPYSQLSDEQVIENTGEFFRDQGRQTYLPQPAICPDSVYKLMLSCWRRDTKNRPSFQEIHLLLLQQGDE

SEQ ID NO: 181 - DNA, 3172 bp, Homo sapiens
gaatcctcagaatgtgaggtttctctcaaaggcatcttgcatcagcctgtggatgtatgcctaccaccgggctccttcaccagcaaagtggaaaaagaagcgtttcacaacaaattcttctttttgggttggggaaacgcagtggattatagctctgttttcttctttccaaaactgtgcacccctggatgaaacctccatcaagggagacctacaagttgcctggggttcagtgctctagaaagttccaaggtttgtggcttgaattattctaaagaagctgaaataattgaagagaagcagaggccagctgtttttgaggatcctgctccacagagaatgctctgcacccgttgatactccagttccaacaccatcttctgagatgatcctgattcccagaatgctcttggtgctgttcctgctgctgcctatcttgagttctgcaaaagctcaggttaatccagctatatgccgctatcctctgggcatgtcaggaggccagattccagatgaggacatcacagcttccagtcagtggtcagagtccacagctgccaaatatggaaggctggactcagaagaaggggatggagcctggtgccctgagattccagtggaacctgatgacctgaaggagtttctgcagattgacttgcacaccctccattttatcactctggtggggacccaggggcgccatgcaggaggtcatggcatcgagtttgcccccatgtacaagatcaattacagtcgggatggcactcgctggatctcttggcggaaccgtcatgggaaacaggtgctggatggaaatagtaacccctatgacattttcctaaaggacttggagccgcccattgtagccagatttgtccggttcattccagtcaccgaccactccatgaatgtgtgtatgagagtggagctttacggctgtgtctggctagatggcttggtgtcttacaatgctccagctgggcagcagtttgtactccctggaggttccatcatttatctgaatgattctgtctatgatggagctgttggatacagcatgacagaagggctaggccaattgaccgatggtgtgtctggcctggacgatttcacccagacccatgaataccacgtgtggcccggctatgactatgtgggctggcggaacgagagtgccaccaatggctacattgagatcatgtttgaatttgaccgcatcaggaatttcactaccatgaaggtccactgcaacaacatgtttgctaaaggtgtgaagatctttaaggaggtacagtgctacttccgctctgaagccagtgagtgggaacctaatgccatttccttcccccttgtcctggatgacgtcaaccccagtgctcggtttgtcacggtgcctctccaccaccgaatggccagtgccatcaagtgtcaataccattttgcagatacctggatgatgttcagtgagatcaccttccaatcagatgctgcaatgtacaacaactctgaagccctgcccacctctcctatggcacccacaacctatgatccaatgcttaaagttgatgacagcaacactcggatcctgattggctgcttggtggccatcatctttatcctcctggccatcattgtcatcatcctctggaggcagttctggcagaaaatgctggagaaggcttctcggaggatgctggatgatgaaatgacagtcagcctttccctgccaagtgattctagcatgttcaacaataaccgctcctcatcacctagtgaacaagggtccaactcgacttacgatcgcatctttccccttcgccctgactaccaggagccatccaggctgatacgaaaactcccagaatttgctccaggggaggaggagtcaggctgcagcggtgttgtgaagccagtccagcccagtggccctgagggggtgccccactatgcagaggctgacatagtgaacctccaaggagtgacaggaggcaacacatactcagtgcctgccgtcaccatggacctgctctcaggaaaagatgtggctgtggaggagttccccaggaaactcctaactttcaaagagaagctgggagaaggacagtttggggaggttcatctctgtgaagtggagggaatggaaaaattcaaagacaaagattttgccctagatgtcagtgccaaccagcctgtcctggtggctgtgaaaatgctccgagcagatgccaacaagaatgccaggaatgattttcttaaggagataaagatcatgtctcggctcaaggacccaaacatcatccatctattagctgtgtgtatcactgatgaccctctctgtatgatcactgaatacatggagaatggagatctcaatcagtttctttcccgccacgagccccctaattcttcctccagcgatgtacgcactgtcagttacaccaatctgaagtttatggctacccaaattgcctctggcatgaagtacctttcctctcttaattttgttcaccgagatctggccacacgaaactgtttagtgggtaagaactacacaatcaagatagctgactttggaatgagcaggaacctgtacagtggtgactattaccggatccagggccgggcagtgctccctatccgctggatgtcttgggagagtatcttgctgggcaagttcactacagcaagtgatgtgtgggcctttggggttactttgtgggagactttcaccttttgtcaagaacagccctattcccagctgtcagatgaacaggttattgagaatactggagagttcttccgagaccaagggaggcagacttacctccctcaaccagccatttgtcctgactctgtgtataagctgatgctcagctgctggagaagagatacgaagaaccgtccctcattccaagaaatccaccttctgctccttcaacaaggcgacgagtgatgctgtcagtgcctggccatgttcctacggctcaggtcctccctacaagacctaccactcacccatgcctatgccactccatctggacatttaatgaaactgagagacagaggcttgtttgctttgccctcttttcctggtcacccccactccctacccctgactcatatatacttttttttttttttacattaaagaactaaaaaaggaaaaaaaaaa

SEQ ID NO: 182 - protein, 855 aa, Homo sapiens; identical to SEQ ID NO: 180

SEQ ID NO: 183 - DNA, 1533 bp, Homo sapiens
tctgattggtgacgggtgaggcggcccgaaatcgtaggacttccgaaagcagcggcggcgtttgcttcactgcttggaagtgtgagtgcgcgaagatgcgaaaggtggttttgatcaccggggctagcagtggcattggcctggccctctgcaagcggctgctggcggaagatgatgagcttcatctgtgtttggcgtgcaggaacatgagcaaggcagaagctgtctgtgctgctctgctggcctctcaccccactgctgaggtcaccattgtccaggtggatgtcagcaacctgcagtcggtcttccgggcctccaaggaacttaagcaaaggtttcagagattagactgtatatatctaaatgctgggatcatgcctaatccacaactaaatatcaaagcacttttctttggcctcttttcaagaaaagtgattcatatgttctccacagctgaaggcctgctgacccagggtgataagatcactgctgatggacttcaggaggtgtttgagaccaatgtctttggccattttatcctgattcgggaactggagcctctcctctgtcacagtgacaatccatctcagctcatctggacatcatctcgcagtgcaaggaaatctaatttcagcctcgaggacttccagcacagcaaaggcaaggaaccctacagctcttccaaatatgccactgaccttttgagtgtggctttgaacaggaacttcaaccagcagggtctctattccaatgtggcctgtccaggtacagcattgaccaatttgacatatggaattctgcctccgtttatatggacgctgttgatgccggcaatattgctacttcgcttttttgcaaatgcattcactttgacaccatataatggaacagaagctctggtatggcttttccaccaaaagcctgaatctctcaatcctctgatcaaatatctgagtgccaccactggctttggaagaaattacattatgacccagaagatggacctagatgaagacactgctgaaaaattttatcaaaagttactggaactggaaaagcacattagggtcactattcaaaaaacagataatcaggccaggctcagtggctcatgcctataattccagcactttgggaggccaaggcagaaggatcacttgagaccaggagttcaagaccagcctgagaaacatagtgagcccttgtctctacaaaaagaaataaaaataatagctgggtgtggtggcatgcgcatgtagtcccagctactcagaaggatgaggtgggaggatctcttgaggctgggaggcagaggttgcagtgagctgagattgtgccactgcactccagcctgggtgacagcgagaccctgtctcaaaatatgtatatatttaatatatatataaaaccagagctgacaatgacactctggaacattgcataccttctgtacattctggggtacatggatttctactgagttggataatatgcatttgtaataaactatgaactatgaaaaaaaaaaaaaaa

SEQ ID NO: 184 - protein, 341 aa, Homo sapiens
MRKVVLITGASSGIGLALCKRLLAEDDELHLCLACRNMSKAEAVCAALLASHPTAEVTIVQVDVSNLQSVFRASKELKQRFQRLDCIYLNAGIMPNPQLNIKALFFGLFSRKVIHMFSTAEGLLTQGDKITADGLQEVFETNVFGHFILIRELEPLLCHSDNPSQLIWTSSRSARKSNFSLEDFQHSKGKEPYSSSKYATDLLSVALNRNFNQQGLYSNVACPGTALTNLTYGILPPFIWTLLMPAILLLRFFANAFTLTPYNGTEALVWLFHQKPESLNPLIKYLSATTGFGRNYIMTQKMDLDEDTAEKFYQKLLELEKHIRVTIQKTDNQARLSGSCL

SEQ ID NO: 185 - DNA, 3668 bp, Homo sapiens
ggcagagggtgggccttaggacgggtctcccttaaactgggcgatcaggcagcgaccctagaggcgtctgtagggtaaagctgggggttctgtagccggaggcggcggcgagtccagaacgtcctggccttacagggagaaggcgtcactcgcggttacaagtgcctgaccctcactccagttggcggaggaggagaaggaaggggccgggccgggtcccctcccctcgcgccccggatggatgtgcccggcccggtgtctcggcgggcggcggcggcggcggccactgtgctcctgcggaccgctcgggtccgtcgcgaatgctggttcttgccgaccgcgctgctctgcgcctacggcttcttcgccagcctcaggccgtccgagcccttcctgaccccgtacctgctggggccggacaagaacctgaccgagagggaggtcttcaatgaaatttatccagtatggacttactcttacctggtgctactgtttcctgtgttccttgccacagactacctccgttataaacctgttgttctactgcaggggctcagccttattgttacatggtttatgctgctctatgcccagggactgctggccattcaatttctagaatttttttatggcatcgccacagccactgaaattgcctattactcttatatctacagtgtggtggacctgggcatgtaccagaaagtcacaagttactgtcgaagtgccactttggtgggctttacagtgggctctgtcctagggcaaatccttgtctcagtggcaggctggtcgctgttcagcctgaatgtcatctctcttacctgtgtttcagtggcttttgctgtggcctggtttttacctatgccacagaagagcctcttctttcaccacattccttctacctgccagagagtgaatggcatcaaggtacaaaatggtggcattgttactgacaccccagcttctaaccaccttcctggctgggaggacattgagtcaaaaatccctctaaatatggaggagcctcccgtggaggaaccggaacccaagccagaccgtctccttgtattgaaagtactatggaatgatttcctgatgtgctactcctctcgccctcttctctgctggtctgtgtggtgggccctctctacctgtggctattttcaagttgtgaactacacacagggcctgtgggagaaagtgatgccttctcgctatgctgctatctataatggtggcgtggaggccgtttcaaccttactgggtgctgttgctgtgtttgcagttggttatataaaaatatcctggtcaacttggggagaaatgacattatctctcttttctctcctgattgctgctgcagtgtatatcatggacactgtgggtaacatttgggtgtgctatgcatcctatgttgtcttcagaatcatctacatgttactcatcacgatagcaacttttcaaattgctgcaaacctcagcatggaacgctatgccctagtatttggtgtaaataccttcattgccctggcactgcagacgctgctcactctaattgtggtagatgccagtggccttggattagaaattaccactcagtttttgatctatgccagttattttgcactcatcgctgtggttttcctggccagtggtgcagtcagtgttatgaagaaatgtagaaagctggaagatccacaatcaagttctcaagtaaccacttcataatatactgctgaagggcttcttcttatagcaagaactctgcacagcaactgcctggatgtatttgattttttaaagcgtagacatatatttatgaatgtgcatttcttgacttcacagcagccacttgactaataccttgtgttccgggaataacatgatactattcagaggagccagaagtaaagtttatttcatggattatttatgagagctaatttaaggatgactttttttctgattcaaaagtgaacttgattttaaaaaccagtcaagagcaatcaaagcagcacatggtgttgtatacttcattagcaagtgagtttggtgttttataggtcacatatgtctgtatctacttagccagatgcttggcctggtgggaccagggctccacagaggccacaaaatgttgcaagtcatgatggatggaaatatgttctaacagcatctgcctctattcaatttaattcttatttctgtgttactcatgtacattggtctttctacatagttattctatcactggcaatatttgttctggtttagtgttctgtattttaaggtgtacgtatcatttctaattttaagttattttaaaaaaattcatcatatgaatgttcttggttcccattgtgacgattatttatttctgtaaaatttgtttagaagtacgtttttgcattattcatatgcttcccagagaagctcatttagttagaaaataaggcaagttttgaagcctgctaaatgaagagacttaagaaagcttaaggtacgcttgcttgtctttaaatcttcaatatgaaggactattaattccaagattaaaagttcatatataggctaaagatgtaactaggccatttgtatttgtattcccttttatttccaaaataaaatgaaaaatctttttttaataatttcatccctatttatagtttttatattaatttgtttttcttatccaagtaaagatgtcaataggaattgcattagtccaaggcctttttcataaactgagcctcttttcaattatttcaatgggacaggaactaggatagatgtgattcctgcatttttttaccttaaatctgcctttgtttctaaaggtagatcatcttgaatatttgcttaaaattgctagtgatttcattaccaagttacttgaaaaaatgttctatatgcatttaattctgaaatcagtctaccaaggggctgctagtatatgtcagacatgaaaactattttaaagctgactttgttgccttatcttgaaaagaatctagataggtgcttttaactggggtattaacttttttagaatgacacagctgaacagtgttaataatagtgtgtcaagattgcaaagtcgacatactcatttggtttaagcaggaatcctagaagcaaatggatggggataagaataggtcattttctattcaccatcctttactattaagggaaaggaaaagaacactagctaaggaagggaaagggaagtgatatcataaaagtagcaaccttcattttacattctgtctgtttttctttttttgctttgttttgtttgtgctaatttgggaattgtgtactccgaaacaagtagaaaagtgctgtttgagggattttattaaatctttttttaatggaatgtggtacaaattgttcatgttaccaaagcaatatttccctggaatttaattcaaagtttgtggcatacaacctgagccttttcttatataagacaagaatatgttcacatcttggtatgtggccatatttatagaatgctgaactcaatgtgcaagttgtactgtatgcagttttgtaaataagtgaaaataatttgttgtactttttattcaattctgtatagattataaaattatttttattaaataaatattttacagtataaaaaaaaaaaaaaaaaa

SEQ ID NO: 186 - protein, 497 aa, Homo sapiens
MDVPGPVSRRAAAAAATVLLRTARVRRECWFLPTALLCAYGFFASLRPSEPFLTPYLLGPDKNLTEREVFNEIYPVWTYSYLVLLFPVFLATDYLRYKPVVLLQGLSLIVTWFMLLYAQGLLAIQFLEFFYGIATATEIAYYSYIYSVVDLGMYQKVTSYCRSATLVGFTVGSVLGQILVSVAGWSLFSLNVISLTCVSVAFAVAWFLPMPQKSLFFHHIPSTCQRVNGIKVQNGGIVTDTPASNHLPGWEDIESKIPLNMEEPPVEEPEPKPDRLLVLKVLWNDFLMCYSSRPLLCWSVWWALSTCGYFQVVNYTQGLWEKVMPSRYAAIYNGGVEAVSTLLGAVAVFAVGYIKISWSTWGEMTLSLFSLLIAAAVYIMDTVGNIWVCYASYVVFRIIYMLLITIATFQIAANLSMERYALVFGVNTFIALALQTLLTLIVVDASGLGLEITTQFLIYASYFALIAVVFLASGAVSVMKKCRKLEDPQSSSQVTTS

SEQ ID NO: 187 - DNA, 6962 bp, Homo sapiens
gcaagaactgcaggggaggaggacgctgccacccacagcctctagagctcattgcagctgggacagcccggagtgtggttagcagctcggcaagcgctgcccaggtcctggggtggtggcagccagcgggagcaggaaaggaagcatgttcccaggctgcccacgcctctgggtcctggtggtcttgggcaccagctgggtaggctgggggagccaagggacagaagcggcacagctaaggcagttctacgtggctgctcagggcatcagttggagctaccgacctgagcccacaaactcaagtttgaatctttctgtaacttcctttaagaaaattgtctacagagagtatgaaccatattttaagaaagaaaaaccacaatctaccatttcaggacttcttgggcctactttatatgctgaagtcggagacatcataaaagttcactttaaaaataaggcagataagcccttgagcatccatcctcaaggaattaggtacagtaaattatcagaaggtgcttcttaccttgaccacacattccctgcggagaagatggacgacgctgtggctccaggccgagaatacacctatgaatggagtatcagtgaggacagtggacccacccatgatgaccctccatgcctcacacacatctattactcccatgaaaatctgatcgaggatttcaactcggggctgattgggcccctgcttatctgtaaaaaagggaccctaactgagggtgggacacagaagacgtttgacaagcaaatcgtgctactatttgctgtgtttgatgaaagcaagagctggagccagtcatcatccctaatgtacacagtcaatggatatgtgaatgggacaatgccagatataacagtttgtgcccatgaccacatcagctggcatctgctgggaatgagctcggggccagaattattctccattcatttcaacggccaggtcctggagcagaaccatcataaggtctcagccatcacccttgtcagtgctacatccactaccgcaaatatgactgtgggcccagagggaaagtggatcatatcttctctcaccccaaaacatttgcaagctgggatgcaggcttacattgacattaaaaactgcccaaagaaaaccaggaatcttaagaaaataactcgtgagcagaggcggcacatgaagaggtgggaatacttcattgctgcagaggaagtcatttgggactatgcacctgtaataccagcgaatatggacaaaaaatacaggtctcagcatttggataatttctcaaaccaaattggaaaacattataagaaagttatgtacacacagtacgaagatgagtccttcaccaaacatacagtgaatcccaatatgaaagaagatgggattttgggtcctattatcagagcccaggtcagagacacactcaaaatcgtgttcaaaaatatggccagccgcccctatagcatttaccctcatggagtgaccttctcgccttatgaagatgaagtcaactcttctttcacctcaggcaggaacaacaccatgatcagagcagttcaaccaggggaaacctatacttataagtggaacatcttagagtttgatgaacccacagaaaatgatgcccagtgcttaacaagaccatactacagtgacgtggacatcatgagagacatcgcctctgggctaataggactacttctaatctgtaagagcagatccctggacaggcgaggaatacagagggcagcagacatcgaacagcaggctgtgtttgctgtgtttgatgagaacaaaagctggtaccttgaggacaacatcaacaagttttgtgaaaatcctgatgaggtgaaacgtgatgaccccaagttttatgaatcaaacatcatgagcactatcaatggctatgtgcctgagagcataactactcttggattctgctttgatgacactgtccagtggcacttctgtagtgtggggacccagaatgaaattttgaccatccacttcactgggcactcattcatctatggaaagaggcatgaggacaccttgaccctcttccccatgcgtggagaatctgtgacggtcacaatggataatgttggaacttggatgttaacttccatgaattctagtccaagaagcaaaaagctgaggctgaaattcagggatgttaaatgtatcccagatgatgatgaagactcatatgagatttttgaacctccagaatctacagtcatggctacacggaaaatgcatgatcgtttagaacctgaagatgaagagagtgatgctgactatgattaccagaacagactggctgcagcattaggaatcaggtcattccgaaactcatcattgaatcaggaagaagaagagttcaatcttactgccctagctctggagaatggcactgaattcgtttcttcaaacacagatataattgttggttcaaattattcttccccaagtaatattagtaagttcactgtcaataaccttgcagaacctcagaaagccccttctcaccaacaagccaccacagctggttccccactgagacacctcattggcaagaactcagttctcaattcttccacagcagagcattccagcccatattctgaagaccctatagaggatcctctacagccagatgtcacagggatacgtctactttcacttggtgctggagaattcaaaagtcaagaacatgctaagcataagggacccaaggtagaaagagatcaagcagcaaagcacaggttctcctggatgaaattactagcacataaagttgggagacacctaagccaagacactggttctccttccggaatgaggccctgggaggaccttcctagccaagacactggttctccttccagaatgaggccctggaaggaccctcctagtgatctgttactcttaaaacaaagtaactcatctaagattttggttgggagatggcatttggcttctgagaaaggtagctatgaaataatccaagatactgatgaagacacagctgttaacaattggctgatcagcccccagaatgcctcacgtgcttggggagaaagcacccctcttgccaacaagcctggaaagcagagtggccacccaaagtttcctagagttagacataaatctctacaagtaagacaggatggaggaaagagtagactgaagaaaagccagtttctcattaagacacgaaaaaagaaaaaagagaagcacacacaccatgctcctttatctccgaggacctttcaccctctaagaagtgaagcctacaacacattttcagaaagaagacttaagcattcgttggtgcttcataaatccaatgaaacatctcttcccacagacctcaatcagacattgccctctatggattttggctggatagcctcacttcctgaccataatcagaattcctcaaatgacactggtcaggcaagctgtcctccaggtctttatcagacagtgcccccagaggaacactatcaaacattccccattcaagaccctgatcaaatgcactctacttcagaccccagtcacagatcctcttctccagagctcagtgaaatgcttgagtatgaccgaagtcacaagtccttccccacagatataagtcaaatgtccccttcctcagaacatgaagtctggcagacagtcatctctccagacctcagccaggtgaccctctctccagaactcagccagacaaacctctctccagacctcagccacacgactctctctccagaactcattcagagaaacctttccccagccctcggtcagatgcccatttctccagacctcagccatacaaccctttctccagacctcagccatacaaccctttctttagacctcagccagacaaacctctctccagaactcagtcagacaaacctttctccagccctcggtcagatgcccctttctccagacctcagccatacaaccctttctctagacttcagccagacaaacctctctccagaactcagccatatgactctctctccagaactcagtcagacaaacctttccccagccctcggtcagatgcccatttctccagacctcagccatacaaccctttctctagacttcagccagacaaacctctctccagaactcagtcaaacaaacctttccccagccctcggtcagatgcccctttctccagaccccagccatacaaccctttctctagacctcagccagacaaacctctctccagaactcagtcagacaaacctttccccagacctcagtgagatgcccctctttgcagatctcagtcaaattccccttaccccagacctcgaccagatgacactttctccagaccttggtgagacagatctttccccaaactttggtcagatgtccctttccccagacctcagccaggtgactctctctccagacatcagtgacaccacccttctcccggatctcagccagatatcacctcctccagaccttgatcagatattctacccttctgaatctagtcagtcattgcttcttcaagaatttaatgagtcttttccttatccagaccttggtcagatgccatctccttcatctcctactctcaatgatacttttctatcaaaggaatttaatccactggttatagtgggcctcagtaaagatggtacagattacattgagatcattccaaaggaagaggtccagagcagtgaagatgactatgctgaaattgattatgtgccctatgatgacccctacaaaactgatgttaggacaaacatcaactcctccagagatcctgacaacattgcagcatggtacctccgcagcaacaatggaaacagaagaaattattacattgctgctgaagaaatatcctgggattattcagaatttgtacaaagggaaacagatattgaagactctgatgatattccagaagataccacatataagaaagtagtttttcgaaagtacctcgacagcacttttaccaaacgtgatcctcgaggggagtatgaagagcatctcggaattcttggtcctattatcagagctgaagtggatgatgttatccaagttcgttttaaaaatttagcatccagaccgtattctctacatgcccatggactttcctatgaaaaatcatcagagggaaagacttatgaagatgactctcctgaatggtttaaggaagataatgctgttcagccaaatagcagttatacctacgtatggcatgccactgagcgatcagggccagaaagtcctggctctgcctgtcgggcttgggcctactactcagctgtgaacccagaaaaagatattcactcaggcttgataggtcccctcctaatctgccaaaaaggaatactacataaggacagcaacatgcctatggacatgagagaatttgtcttactatttatgacctttgatgaaaagaagagctggtactatgaaaagaagtcccgaagttcttggagactcacatcctcagaaatgaaaaaatcccatgagtttcacgccattaatgggatgatctacagcttgcctggcctgaaaatgtatgagcaagagtgggtgaggttacacctgctgaacataggcggctcccaagacattcacgtggttcactttcacggccagaccttgctggaaaatggcaataaacagcaccagttaggggtctggccccttctgcctggttcatttaaaactcttgaaatgaaggcatcaaaacctggctggtggctcctaaacacagaggttggagaaaaccagagagcagggatgcaaacgccatttcttatcatggacagagactgtaggatgccaatgggactaagcactggtatcatatctgattcacagatcaaggcttcagagtttctgggttactgggagcccagattagcaagattaaacaatggtggatcttataatgcttggagtgtagaaaaacttgcagcagaatttgcctctaaaccttggatccaggtggacatgcaaaaggaagtcataatcacagggatccagacccaaggtgccaaacactacctgaagtcctgctataccacagagttctatgtagcttacagttccaaccagatcaactggcagatcttcaaagggaacagcacaaggaatgtgatgtattttaatggcaattcagatgcctctacaataaaagagaatcagtttgacccacctattgtggctagatatattaggatctctccaactcgagcctataacagacctacccttcgattggaactgcaaggttgtgaggtaaatggatgttccacacccctgggtatggaaaatggaaagatagaaaacaagcaaatcacagcttcttcgtttaagaaatcttggtggggagattactgggaacccttccgtgcccgtctgaatgcccagggacgtgtgaatgcctggcaagccaaggcaaacaacaataagcagtggctagaaattgatctactcaagatcaagaagataacggcaattataacacagggctgcaagtctctgtcctctgaaatgtatgtaaagagctataccatccactacagtgagcagggagtggaatggaaaccatacaggctgaaatcctccatggtggacaagatttttgaaggaaatactaataccaaaggacatgtgaagaactttttcaaccccccaatcatttccaggtttatccgtgtcattcctaaaacatggaatcaaagtattgcacttcgcctggaactctttggctgtgatatttactagaattgaacattcaaaaacccctggaagagactctttaagacctcaaaccatttagaatgggcaatgtattttacgctgtgttaaatgttaacagttttccactatttctctttcttttctattagtgaataaaattttatac

SEQ ID NO: 188 - protein, 2224 aa, Homo sapiens
MFPGCPRLWVLVVLGTSWVGWGSQGTEAAQLRQFYVAAQGISWSYRPEPTNSSLNLSVTSFKKIVYREYEPYFKKEKPQSTISGLLGPTLYAEVGDIIKVHFKNKADKPLSIHPQGIRYSKLSEGASYLDHTFPAEKMDDAVAPGREYTYEWSISEDSGPTHDDPPCLTHIYYSHENLIEDFNSGLIGPLLICKKGTLTEGGTQKTFDKQIVLLFAVFDESKSWSQSSSLMYTVNGYVNGTMPDITVCAHDHISWHLLGMSSGPELFSIHFNGQVLEQNHHKVSAITLVSATSTTANMTVGPEGKWIISSLTPKHLQAGMQAYIDIKNCPKKTRNLKKITREQRRHMKRWEYFIAAEEVIWDYAPVIPANMDKKYRSQHLDNFSNQIGKHYKKVMYTQYEDESFTKHTVNPNMKEDGILGPIIRAQVRDTLKIVFKNMASRPYSIYPHGVTFSPYEDEVNSSFTSGRNNTMIRAVQPGETYTYKWNILEFDEPTENDAQCLTRPYYSDVDIMRDIASGLIGLLLICKSRSLDRRGIQRAADIEQQAVFAVFDENKSWYLEDNINKFCENPDEVKRDDPKFYESNIMSTINGYVPESITTLGFCFDDTVQWHFCSVGTQNEILTIHFTGHSFIYGKRHEDTLTLFPMRGESVTVTMDNVGTWMLTSMNSSPRSKKLRLKFRDVKCIPDDDEDSYEIFEPPESTVMATRKMHDRLEPEDEESDADYDYQNRLAAALGIRSFRNSSLNQEEEEFNLTALALENGTEFVSSNTDIIVGSNYSSPSNISKFTVNNLAEPQKAPSHQQATTAGSPLRHLIGKNSVLNSSTAEHSSPYSEDPIEDPLQPDVTGIRLLSLGAGEFKSQEHAKHKGPKVERDQAAKHRFSWMKLLAHKVGRHLSQDTGSPSGMRPWEDLPSQDTGSPSRMRPWKDPPSDLLLLKQSNSSKILVGRWHLASEKGSYEIIQDTDEDTAVNNWLISPQNASRAWGESTPLANKPGKQSGHPKFPRVRHKSLQVRQDGGKSRLKKSQFLIKTRKKKKEKHTHHAPLSPRTFHPLRSEAYNTFSERRLKHSLVLHKSNETSLPTDLNQTLPSMDFGWIASLPDHNQNSSNDTGQASCPPGLYQTVPPEEHYQTFPIQDPDQMHSTSDPSHRSSSPELSEMLEYDRSHKSFPTDISQMSPSSEHEVWQTVISPDLSQVTLSPELSQTNLSPDLSHTTLSPELIQRNLSPALGQMPISPDLSHTTLSPDLSHTTLSLDLSQTNLSPELSQTNLSPALGQMPLSPDLSHTTLSLDFSQTNLSPELSHMTLSPELSQTNLSPALGQMPISPDLSHTTLSLDFSQTNLSPELSQTNLSPALGQMPLSPDPSHTTLSLDLSQTNLSPELSQTNLSPDLSEMPLFADLSQIPLTPDLDQMTLSPDLGETDLSPNFGQMSLSPDLSQVTLSPDISDTTLLPDLSQISPPPDLDQIFYPSESSQSLLLQEFNESFPYPDLGQMPSPSSPTLNDTFLSKEFNPLVIVGLSKDGTDYIEIIPKEEVQSSEDDYAEIDYVPYDDPYKTDVRTNINSSRDPDNIAAWYLRSNNGNRRNYYIAAEEISWDYSEFVQRETDIEDSDDIPEDTTYKKVVFRKYLDSTFTKRDPRGEYEEHLGILGPIIRAEVDDVIQVRFKNLASRPYSLHAHGLSYEKSSEGKTYEDDSPEWFKEDNAVQPNSSYTYVWHATERSGPESPGSACRAWAYYSAVNPEKDIHSGLIGPLLICQKGILHKDSNMPMDMREFVLLFMTFDEKKSWYYEKKSRSSWRLTSSEMKKSHEFHAINGMIYSLPGLKMYEQEWVRLHLLNIGGSQDIHVVHFHGQTLLENGNKQHQLGVWPLLPGSFKTLEMKASKPGWWLLNTEVGENQRAGMQTPFLIMDRDCRMPMGLSTGIISDSQIKASEFLGYWEPRLARLNNGGSYNAWSVEKLAAEFASKPWIQVDMQKEVIITGIQTQGAKHYLKSCYTTEFYVAYSSNQINWQIFKGNSTRNVMYFNGNSDASTIKENQFDPPIVARYIRISPTRAYNRPTLRLELQGCEVNGCSTPLGMENGKIENKQITASSFKKSWWGDYWEPFRARLNAQGRVNAWQAKANNNKQWLEIDLLKIKKITAIITQGCKSLSSEMYVKSYTIHYSEQGVEWKPYRLKSSMVDKIFEGNTNTKGHVKNFFNPPIISRFIRVIPKTWNQSIALRLELFGCDIY

SEQ ID NO: 189 - DNA, 6940 bp, Homo sapiens
gggcatgactctctctcttgagtaggcacacactcccttttctcgggtgtgtactttttgctttgtgatacatctctgcactttcagtattttccaactcatccttaaattccttctcacaacagtgtcaagagcctggacgccagccaggattgaggtcctacgggtgtttggggacctccccaagcccacgagtatcaatggcagtatcaattgtctgtgacagtgattaaggagcaaaacacttggaacccacaagactcccagaaggtgaagttaagagctcccagactcataaggttattagaacagcaaactggcaccccaaagaactttacggagacttgcaacctatcaacaagttggatgagggattaaaagccttcaacaaccaacaaccccaagcatcaaactgaaggaaacattctaaccttcacagacagactggaggctggatggggacctggctgaagacatctggagaatgaaagttaagtaccagcttgcatttttgtgcccctagattatttttgcattttaaaataagaagcatcaaattgcgtgtctctgtgtaaaagttctagcaatttgttttaaggtgaacttattttggcttagggactacaaaaagagaaggtaattcctagggaaggaagaagagaaagaaatgaaaattagagaataagattattttgaatgacttcaggtagcgaggagtgtgtgtttgtgagtgtgtatttgagagacttggctcatgcctgtgggtcttctcttctagtatcagtgaggggagggattactgaagaagaaggggggaaaaaaaaagaaagaaatctgagctttctgggaggaaattcaaaggaaccaagagaaattaacttcgttctgcaaggactaaagtacagcaagaggagagaggtcaagcgagaagcgtgcgggaagcacatgccctggggaggcatagaagccacactggcagagcggccagcacaggtagccagcagaggcattcttggggctatttgaaaaagtttggtctgtgaacaaaacagtttccctggtgactgcaaatccattgctagctgcctctttctcgtctgcccatcactctggtgtggtacccagaagttgacttctggttctgtagaaagagctaggggaggtatgatgtgcttaaagatcctaagaataagcctggcgattttggctgggtgggcactctgttctgccaactctgagctgggctggacacgcaagaaatccttggttgagagggaacacctgaatcaggtgctgttggaaggagaacgttgttggctgggggccaaggttcgaagacccagagcttctccacagcatcacctctttggagtctaccccagcagggctgggaactacctaaggccctaccccgtgggggagcaagaaatccatcatacaggacgcagcaaaccagacactgaaggaaatgctgtgagccttgttcccccagacctgactgaaaatccagcaggactgaggggtgcagttgaagagccggctgccccatgggtaggggatagtcctattgggcaatctgagctgctgggagatgatgacgcttatctcggcaatcaaagatccaaggagtctctaggtgaggccgggattcagaaaggctcagccatggctgccactactaccaccgccattttcacaaccctgaacgaacccaaaccagagacccaaaggaggggctgggccaagtccaggcagcgtcgccaagtgtggaagaggcgggcggaagatgggcagggagactccggtatctcttcacatttccaaccttggcccaagcattcccttaaacacagggtcaaaaagagtccaccggaggaaagcaaccaaaatggtggagagggctcctaccgagaagcagagacctttaactcccaagtaggactgcccatcttatacttctctgggaggcgggagcggctgctgctgcgtccagaagtgctggctgagattccccgggaggcgttcacagtggaagcctgggttaaaccggagggaggacagaacaacccagccatcatcgcaggtgtgtttgataactgctcccacactgtcagtgacaaaggctgggccctggggatccgctcagggaaggacaagggaaagcgggatgctcgcttcttcttctccctctgcaccgaccgcgtgaagaaagccaccatcttgattagccacagtcgctaccaaccaggcacatggacccatgtggcagccacttacgatggacggcacatggccctgtatgtggatggcactcaggtggctagcagtctagaccagtctggtcccctgaacagccccttcatggcatcttgccgctctttgctcctggggggagacagctctgaggatgggcactatttccgtggacacctgggcacactggttttctggtcgaccgccctgccacaaagccattttcagcacagttctcagcattcaagtggggaggaggaagcgactgacttggtcctgacagcgagctttgagcctgtgaacacagagtgggttccctttagagatgagaagtacccacgacttgaggttctccagggctttgagccagagcctgagattctgtcgcctttgcagcccccactctgtgggcaaacagtctgtgacaatgtggaattgatctcccagtacaatggatactggccccttcggggagagaaggtgatacgctaccaggtggtgaacatctgtgatgatgagggcctaaaccccattgtgagtgaggagcagattcgtctgcagcacgaggcactgaatgaggccttcagccgctacaacatcagctggcagctgagcgtccaccaggtccacaattccaccctgcgacaccgggttgtgcttgtgaactgtgagcccagcaagattggcaatgaccattgtgaccccgagtgtgagcacccactcacaggctatgatgggggtgactgccgcctgcagggccgctgctactcctggaaccgcagggatgggctctgtcacgtggagtgtaacaacatgctgaacgactttgacgacggagactgctgcgacccccaggtggctgatgtgcgcaagacctgctttgaccctgactcacccaagagggcatacatgagtgtgaaggagctgaaggaggccctgcagctgaacagtactcacttcctcaacatctactttgccagctcagtgcgggaagaccttgcaggtgctgccacctggccttgggacaaggacgctgtcactcacctgggtggcattgtcctcagcccagcatattatgggatgcctggccacaccgacaccatgatccatgaagtgggacatgttctgggactctaccatgtctttaaaggagtcagtgaaagagaatcctgcaatgacccctgcaaggagacagtgccatccatggaaacgggagacctctgtgccgacaccgcccccactcccaagagtgagctgtgccgggaaccagagcccactagtgacacctgtggcttcactcgcttcccaggggctccgttcaccaactacatgagctacacggatgataactgcactgacaacttcactcctaaccaagtggcccgaatgcattgctatttggacctagtctatcagcagtggactgaaagcagaaagcccacccccatccccattccacctatggtcatcggacagaccaacaagtccctcactatccactggctgcctcctattagtggagttgtatatgacagggcctcaggcagcttgtgtggcgcttgcactgaagatgggacctttcgtcagtatgtgcacacagcttcctcccggcgggtgtgtgactcctcaggttattggaccccagaggaggctgtggggcctcctgatgtggatcagccctgcgagccaagcttacaggcctggagccctgaggtccacctgtaccacatgaacatgacggtcccctgccccacagaaggctgtagcttggagctgctcttccaacacccggtccaagccgacaccctcaccctgtgggtcacttccttcttcatggagtcctcgcaggtcctctttgacacagagatcttgctggaaaacaaggagtcagtgcacctgggccccttagacactttctgtgacatcccactcaccatcaaactgcacgtggatgggaaggtgtcgggggtgaaagtctacacctttgatgagaggatagagattgatgcagcactcctgacttctcagccccacagtcccttgtgctctggctgcaggcctgtgaggtaccaggttctccgcgatcccccatttgccagtggtttgcccgtggtggtgacacattctcacaggaagttcacggacgtggaggtcacacctggacagatgtatcagtaccaagttctagctgaagctggaggagaactgggagaagcttcgcctcctctgaaccacattcatggagctccttattgtggagatgggaaggtgtcagagagactgggagaagagtgtgatgatggagaccttgtgagcggagatggctgctccaaggtgtgtgagctggaggaaggtttcaactgtgtaggagagccaagcctttgctacatgtatgagggagatggcatatgtgaaccttttgagagaaaaaccagcattgtagactgtggcatctacactcccaaaggatacttggatcaatgggctacccgggcttactcctctcatgaagacaagaagaagtgtcctgtttccttggtaactggagaacctcattccctaatttgcacatcataccatccagatttacccaaccaccgtcccctaactggctggtttccctgtgttgccagtgaaaatgaaactcaggatgacaggagtgaacagccagaaggtagcctgaagaaagaggatgaggtttggctcaaagtgtgtttcaatagaccaggagaggccagagcaatttttatttttttgacaactgatggcctagttcccggagagcatcagcagccgacagtgactctctacctgaccgatgtccgtggaagcaaccactctcttggaacctatggactgtcatgccagcataatccactgattatcaatgtgacccatcaccagaatgtccttttccaccataccacctcagtgctgctgaatttctcatccccacgggtcggcatctcagctgtggctctaaggacatcctcccgcattggtctttcggctcccagtaactgcatctcagaggacgaggggcagaatcatcagggacagagctgtatccatcggccctgtgggaagcaggacagctgtccgtcattgctgcttgatcatgctgatgtggtgaactgtacctctataggcccaggtctcatgaagtgtgctatcacttgtcaaaggggatttgcccttcaggccagcagtgggcagtacatcaggcccatgcagaaggaaattctgctcacatgttcttctgggcactgggaccagaatgtgagctgccttcccgtggactgcggtgttcccgacccgtctttggtgaactatgcaaacttctcctgctcagagggaaccaaatttctgaaacgctgctcaatctcttgtgtcccaccagccaagctgcaaggactgagcccatggctgacatgtcttgaagatggtctctggtctctccctgaagtctactgcaagttggagtgtgatgctccccctattattctgaatgccaacttgctcctgcctcactgcctccaggacaaccacgacgtgggcaccatctgcaaatatgaatgcaaaccagggtactatgtggcagaaagtgcagagggtaaagtcaggaacaagctcctgaagatacaatgcctggaaggtggaatctgggagcaaggcagctgcattcctgtggtgtgtgagccaccccctcctgtgtttgaaggcatgtatgaatgtaccaatggcttcagcctggacagccagtgtgtgctcaactgtaaccaggaacgtgaaaagcttcccatcctctgcactaaagagggcctgtggacccaggagtttaagttgtgtgagaatctgcaaggagaatgcccaccacccccctcagagctgaattctgtggagtacaaatgtgaacaaggatatgggattggtgcagtgtgttccccattgtgtgtaatcccccccagtgaccccgtgatgctacctgagaatatcactgctgacactctggagcactggatggaacctgtcaaagtccagagcattgtgtgcactggccggcgtcaatggcacccagaccccgtcttagtccactgcatccagtcatgtgagcccttccaagcagatggttggtgtgacactatcaacaaccgagcctactgccactatgacgggggagactgctgctcttccacactctcctccaagaaggtcattccatttgctgctgactgtgacctggatgagtgcacctgccgggaccccaaggcagaagaaaatcagtaactgtgggaacaagcccctccctccactgcctcagaggcagtaagaaagagaggccgacccaggaggaaacaaagggtgaatgaagaagaacaatcatgaaatggaagaaggaggaagagcatgaaggatcttataagaaatgcaagaggatattgataggtgtgaactagttcatcaagtagcccaagtaggagagaatcataggcaaaagtttctttaaagtggcagttgattaacatggaaggggaaatatgatagatatataaggaccctcctccctcacttatattctattaaatcctatcctcaactcttgccctgctctccgctccaccccctgccaactactcagtcccacccaacttgtaaaccaataccaaaaaaaaaaaaaaaaaaaaaa

SEQ ID NO: 190 - protein, 1791 aa, Homo sapiens
MMCLKILRISLAILAGWALCSANSELGWTRKKSLVEREHLNQVLLEGERCWLGAKVRRPRASPQHHLFGVYPSRAGNYLRPYPVGEQEIHHTGRSKPDTEGNAVSLVPPDLTENPAGLRGAVEEPAAPWVGDSPIGQSELLGDDDAYLGNQRSKESLGEAGIQKGSAMAATTTTAIFTTLNEPKPETQRRGWAKSRQRRQVWKRRAEDGQGDSGISSHFQPWPKHSLKHRVKKSPPEESNQNGGEGSYREAETFNSQVGLPILYFSGRRERLLLRPEVLAEIPREAFTVEAWVKPEGGQNNPAIIAGVFDNCSHTVSDKGWALGIRSGKDKGKRDARFFFSLCTDRVKKATILISHSRYQPGTWTHVAATYDGRHMALYVDGTQVASSLDQSGPLNSPFMASCRSLLLGGDSSEDGHYFRGHLGTLVFWSTALPQSHFQHSSQHSSGEEEATDLVLTASFEPVNTEWVPFRDEKYPRLEVLQGFEPEPEILSPLQPPLCGQTVCDNVELISQYNGYWPLRGEKVIRYQVVNICDDEGLNPIVSEEQIRLQHEALNEAFSRYNISWQLSVHQVHNSTLRHRVVLVNCEPSKIGNDHCDPECEHPLTGYDGGDCRLQGRCYSWNRRDGLCHVECNNMLNDFDDGDCCDPQVADVRKTCFDPDSPKRAYMSVKELKEALQLNSTHFLNIYFASSVREDLAGAATWPWDKDAVTHLGGIVLSPAYYGMPGHTDTMIHEVGHVLGLYHVFKGVSERESCNDPCKETVPSMETGDLCADTAPTPKSELCREPEPTSDTCGFTRFPGAPFTNYMSYTDDNCTDNFTPNQVARMHCYLDLVYQQWTESRKPTPIPIPPMVIGQTNKSLTIHWLPPISGVVYDRASGSLCGACTEDGTFRQYVHTASSRRVCDSSGYWTPEEAVGPPDVDQPCEPSLQAWSPEVHLYHMNMTVPCPTEGCSLELLFQHPVQADTLTLWVTSFFMESSQVLFDTEILLENKESVHLGPLDTFCDIPLTIKLHVDGKVSGVKVYTFDERIEIDAALLTSQPHSPLCSGCRPVRYQVLRDPPFASGLPVVVTHSHRKFTDVEVTPGQMYQYQVLAEAGGELGEASPPLNHIHGAPYCGDGKVSERLGEECDDGDLVSGDGCSKVCELEEGFNCVGEPSLCYMYEGDGICEPFERKTSIVDCGIYTPKGYLDQWATRAYSSHEDKKKCPVSLVTGEPHSLICTSYHPDLPNHRPLTGWFPCVASENETQDDRSEQPEGSLKKEDEVWLKVCFNRPGEARAIFIFLTTDGLVPGEHQQPTVTLYLTDVRGSNHSLGTYGLSCQHNPLIINVTHHQNVLFHHTTSVLLNFSSPRVGISAVALRTSSRIGLSAPSNCISEDEGQNHQGQSCIHRPCGKQDSCPSLLLDHADVVNCTSIGPGLMKCAITCQRGFALQASSGQYIRPMQKEILLTCSSGHWDQNVSCLPVDCGVPDPSLVNYANFSCSEGTKFLKRCSISCVPPAKLQGLSPWLTCLEDGLWSLPEVYCKLECDAPPIILNANLLLPHCLQDNHDVGTICKYECKPGYYVAESAEGKVRNKLLKIQCLEGGIWEQGSCIPVVCEPPPPVFEGMYECTNGFSLDSQCVLNCNQEREKLPILCTKEGLWTQEFKLCENLQGECPPPPSELNSVEYKCEQGYGIGAVCSPLCVIPPSDPVMLPENITADTLEHWMEPVKVQSIVCTGRRQWHPDPVLVHCIQSCEPFQADGWCDTINNRAYCHYDGGDCCSSTLSSKKVIPFAADCDLDECTCRDPKAEENQ

SEQ ID NO: 191 - DNA, 4370 bp, Homo sapiens
gggcatgactctctctcttgagtaggcacacactcccttttctcgggtgtgtactttttgctttgtgatacatctctgcactttcagtattttccaactcatccttaaattccttctcacaacagtgtcaagagcctggacgccagccaggattgaggtcctacgggtgtttggggacctccccaagcccacgagtatcaatggcagtatcaattgtctgtgacagtgattaaggagcaaaacacttggaacccacaagactcccagaaggtgaagttaagagctcccagactcataaggttattagaacagcaaactggcaccccaaagaactttacggagacttgcaacctatcaacaagttggatgagggattaaaagccttcaacaaccaacaaccccaagcatcaaactgaaggaaacattctaaccttcacagacagactggaggctggatggggacctggctgaagacatctggagaatgaaagttaagtaccagcttgcatttttgtgcccctagattatttttgcattttaaaataagaagcatcaaattgcgtgtctctgtgtaaaagttctagcaatttgttttaaggtgaacttattttggcttagggactacaaaaagagaaggtaattcctagggaaggaagaagagaaagaaatgaaaattagagaataagattattttgaatgacttcaggtagcgaggagtgtgtgtttgtgagtgtgtatttgagagacttggctcatgcctgtgggtcttctcttctagtatcagtgaggggagggattactgaagaagaaggggggaaaaaaaaagaaagaaatctgagctttctgggaggaaattcaaaggaaccaagagaaattaacttcgttctgcaaggactaaagtacagcaagaggagagaggtcaagcgagaagcgtgcgggaagcacatgccctggggaggcatagaagccacactggcagagcggccagcacaggtagccagcagaggcattcttggggctatttgaaaaagtttggtctgtgaacaaaacagtttccctggtgactgcaaatccattgctagctgcctctttctcgtctgcccatcactctggtgtggtacccagaagttgacttctggttctgtagaaagagctaggggaggtatgatgtgcttaaagatcctaagaataagcctggcgattttggctgggtgggcactctgttctgccaactctgagctgggctggacacgcaagaaatccttggttgagagggaacacctgaatcaggtgctgttggaaggagaacgttgttggctgggggccaaggttcgaagacccagagcttctccacagcatcacctctttggagtctaccccagcagggctgggaactacctaaggccctaccccgtgggggagcaagaaatccatcatacaggacgcagcaaaccagacactgaaggaaatgctgtgagccttgttcccccagacctgactgaaaatccagcaggactgaggggtgcagttgaagagccggctgccccatgggtaggggatagtcctattgggcaatctgagctgctgggagatgatgacgcttatctcggcaatcaaagatccaaggagtctctaggtgaggccgggattcagaaaggctcagccatggctgccactactaccaccgccattttcacaaccctgaacgaacccaaaccagagacccaaaggaggggctgggccaagtccaggcagcgtcgccaagtgtggaagaggcgggcggaagatgggcagggagactccggtatctcttcacatttccaaccttggcccaagcattcccttaaacacagggtcaaaaagagtccaccggaggaaagcaaccaaaatggtggagagggctcctaccgagaagcagagacctttaactcccaagtaggactgcccatcttatacttctctgggaggcgggagcggctgctgctgcgtccagaagtgctggctgagattccccgggaggcgttcacagtggaagcctgggttaaaccggagggaggacagaacaacccagccatcatcgcaggtgtgtttgataactgctcccacactgtcagtgacaaaggctgggccctggggatccgctcagggaaggacaagggaaagcgggatgctcgcttcttcttctccctctgcaccgaccgcgtgaagaaagccaccatcttgattagccacagtcgctaccaaccaggcacatggacccatgtggcagccacttacgatggacggcacatggccctgtatgtggatggcactcaggtggctagcagtctagaccagtctggtcccctgaacagccccttcatggcatcttgccgctctttgctcctggggggagacagctctgaggatgggcactatttccgtggacacctgggcacactggttttctggtcgaccgccctgccacaaagccattttcagcacagttctcagcattcaagtggggaggaggaagcgactgacttggtcctgacagcgagctttgagcctgtgaacacagagtgggttccctttagagatgagaagtacccacgacttgaggttctccagggctttgagccagagcctgagattctgtcgcctttgcagcccccactctgtgggcaaacagtctgtgacaatgtggaattgatctcccagtacaatggatactggccccttcggggagagaaggtgatacgctaccaggtggtgaacatctgtgatgatgagggcctaaaccccattgtgagtgaggagcagattcgtctgcagcacgaggcactgaatgaggccttcagccgctacaacatcagctggcagctgagcgtccaccaggtccacaattccaccctgcgacaccgggttgtgcttgtgaactgtgagcccagcaagattggcaatgaccattgtgaccccgagtgtgagcacccactcacaggctatgatgggggtgactgccgcctgcagggccgctgctactcctggaaccgcagggatgggctctgtcacgtggagtgtaacaacatgctgaacgactttgacgacggagactgctgcgacccccaggtggctgatgtgcgcaagacctgctttgaccctgactcacccaagagggcatacatgagtgtgaaggagctgaaggaggccctgcagctgaacagtactcacttcctcaacatctactttgccagctcagtgcgggaagaccttgcaggtgctgccacctggccttgggacaaggacgctgtcactcacctgggtggcattgtcctcagcccagcatattatgggatgcctggccacaccgacaccatgatccatgaagtgggacatgttctgggactctaccatgtctttaaaggagtcagtgaaagagaatcctgcaatgacccctgcaaggagacagtgccatccatggaaacgggagacctctgtgccgacaccgcccccactcccaagagtgagctgtgccgggaaccagagcccactagtgacacctgtggcttcactcgcttcccaggggctccgttcaccaactacatgagctacacgggtatcaccactgtcttgttttgttttctgttaagaatacatgggggcctttgagagctgggagggtggaggtgtgggagctgatgggagaatgattaagtggtcatttgtgtcggagagttgaagtgtatttattataaggtattattattttttcatgtctttgaagaacttgaagaaatactgacatattaaggtactttgttcactgaattctcctctactagatattttaaaatatacttctatcctcgatagtaaaaaaggcacagagccaaaagccctcttgtgatccccttgacttctagaatgtggttattcttatttttgcccgcattcttagacatttactctgaagaagagtccaatggaaataaaggaaaagagtttatgggtcaaggtggcccattgtactgtttttgaagttggtcaacaaggtggcttggttaatttaggctcagcatgttttactgtatgttactaaaaaaaaaaaaaaaaaaaatcagattctctttttccagcactagtcaagcacaaattcttagctgcctaccaccctttccccaccaaaaggtgacatctaattttaaaaaaatggcatcttcctggccctcggaaaaacttgtcatctggtctttcttgccttaattcagcttctgtattattcttcgctgtctctcacgccttccttgtttcttgtgaaaagtaatagtgactggtttcctataatggactcaaagttatccctaaaattaaagacttatttgatgacctag

SEQ ID NO: 192 - protein, 827 aa, Homo sapiens
MMCLKILRISLAILAGWALCSANSELGWTRKKSLVEREHLNQVLLEGERCWLGAKVRRPRASPQHHLFGVYPSRAGNYLRPYPVGEQEIHHTGRSKPDTEGNAVSLVPPDLTENPAGLRGAVEEPAAPWVGDSPIGQSELLGDDDAYLGNQRSKESLGEAGIQKGSAMAATTTTAIFTTLNEPKPETQRRGWAKSRQRRQVWKRRAEDGQGDSGISSHFQPWPKHSLKHRVKKSPPEESNQNGGEGSYREAETFNSQVGLPILYFSGRRERLLLRPEVLAEIPREAFTVEAWVKPEGGQNNPAIIAGVFDNCSHTVSDKGWALGIRSGKDKGKRDARFFFSLCTDRVKKATILISHSRYQPGTWTHVAATYDGRHMALYVDGTQVASSLDQSGPLNSPFMASCRSLLLGGDSSEDGHYFRGHLGTLVFWSTALPQSHFQHSSQHSSGEEEATDLVLTASFEPVNTEWVPFRDEKYPRLEVLQGFEPEPEILSPLQPPLCGQTVCDNVELISQYNGYWPLRGEKVIRYQVVNICDDEGLNPIVSEEQIRLQHEALNEAFSRYNISWQLSVHQVHNSTLRHRVVLVNCEPSKIGNDHCDPECEHPLTGYDGGDCRLQGRCYSWNRRDGLCHVECNNMLNDFDDGDCCDPQVADVRKTCFDPDSPKRAYMSVKELKEALQLNSTHFLNIYFASSVREDLAGAATWPWDKDAVTHLGGIVLSPAYYGMPGHTDTMIHEVGHVLGLYHVFKGVSERESCNDPCKETVPSMETGDLCADTAPTPKSELCREPEPTSDTCGFTRFPGAPFTNYMSYTGITTVLFCFLLRIHGGL

SEQ ID NO: 193 - DNA, 7331 bp, Homo sapiens
gctccgggaaacaaagaatccggggctctccagacatcagagcttaaacccaggactctgcaagcggcatctcattccggggtccagggctctcccggctctccatcccctccctaacctcccccgcctcccgcgctcgctccctcgctccctccccgctcgcttcctcccccaccatcgcagcgctaggaggaaggcggccggggctcaagatggctttagccgggctctgcgccctgctcgcctgctgctgggggccggcggcggtgctggccacggccgccggcgacgtggatccatccaaggagctggagtgcaagctcaaaagcatcacggtgtcggcactgcccttcctgcgcgagaacgacctgagcatcatgcacagcccctcggcctcggagcccaagctcctcttctcggtgcgcaacgacttcccgggagaaatggtcgtggtggacgacctggagaacacggagctgccctacttcgtgctggagatctcagggaacacagaggatatccctttggtgcgctggaggcagcagtggctggagaatggcactttgctttttcacattcatcaccaagatggtgccccaagccttcctggacaagaccccactgaagaaccccaacatgagtcggcagaagaggagctgaggatcctccacatctcagtcatgggtggcatgatcgctctgctgctgtccatcttgtgcctggtgatgatcctgtatactcgccggcgctggtgcaaacgccgccgggtcccgcagccccagaagagtgccagtgctgaggcagccaatgagattcactacattccttctgtgctgatcggcgggcacggacgggagagcctgcgcaatgcccgcgtgcagggccacaactccagtggcaccctgagcatccgggagacacctatcctggacggctatgagtatgacatcactgatctgcgccaccatctgcagagggagtgcatgaacggaggggaggactttgccagccaggtcacgcgcaccctcgactccctgcagggctgcaatgaaaagtcggggatggacctcacaccaggaagtgacaatgccaagctgtcactgatgaacaagtataaagataatattatagccactagccctgtggactccaaccaccagcaagccacccttctctctcacacctccagcagccagagaaagcggatcaacaacaaagcaagagctggttccgccttcttgaaccctgaaggggattctggcacagaggcagaaaacgacccccagctgaccttttacacggatccttcaaggagcaggaggcgtagtagagtgggttctccccgaagtcctgtgaataagaccaccttgaccctgatcagcatcaccagctgtgtgattggcctcgtgtgctcctctcacgtcaactgccctctcgttgtcaagatcaccctgcatgtccctgagcacctgattgctgatgggagccgcttcatcttgctggaggggagccagctggatgccagtgactggctgaaccctgcccaagtggttctcttctctcagcagaactccagcggaccctgggccatggacctctgtgcccggcggctcctggacccctgtgaacaccaatgtgaccccgaaactggggaatgcctctgctatgaaggctacatgaaggatccagtacataagcacctttgcattcggaacgaatgggggacaaaccaggggccatggccttacacaatatttcagcgaggctttgacctggttttgggagagcagccctctgataaaatatttagattcacctacactcttggggagggcatgtggttgcccctcagcaagagctttgtgattccaccagccgaactggccatcaatccatcagcaaagtgcaagacggacatgactgtgatggaggatgctgtggaggtcagagaggagctgatgacttcatcctccttcgacagcctggaggttctcttagattcctttgggccggtgcgcgactgcagcaaagataacgggggctgcagtaagaatttccgctgtatttcagatcgcaagctggactccactggttgcgtgtgcccatctggactcagtcccatgaaggacagctctggctgctatgaccgccacatcggggtggactgttccgacggcttcaacggcggctgtgagcagctgtgcctccagcagatggcgcccttcccggacgaccccaccttgtataacatcctcatgttctgtgggtgcatcgaggactacaagcttggtgtggatggacgctcttgccaactcatcacggagacctgtccagagggaagtgactgtggggaaagcagggagcttcccatgaaccagaccctctttggggagatgttctttggttacaacaaccattccaaggaagtggctgccggacaggtgctgaaaggaacattcaggcaaaacaactttgctcgtggtttagaccagcaactgccagatggtcttgtggtggccactgtgcccctggagaatcaatgcctagaggagatctcggagcccacccctgaccctgacttcctgactgggatggtgaacttcagtgaagtgtctgggtaccctgtgctgcagcactggaaggtccggtctgtgatgtaccacatcaaactcaaccaagtggccatctctcaggccctcagcaatgctctccactcgctggatggggctacatctcgtgcagattttgtggcgctgttggaccagttcggcaaccattacatccaggaagctatctacggctttgaggagtcctgttctatctggtacccaaacaagcaggtccagcggcgactctggctggagtatgaagacatcagtaaaggcaactccccatcagatgagtctgaggagcgggaaagagaccccaaggtgctgacattcccagaatacatcaccagcttgtcagactccggcaccaagcacatggcggctggagtccgcatggagtgccacagcaagggacgatgcccctcgtcctgccccctgtgtcatgtgacatccagccctgacacccctgctgagccggttctgctggaggtgaccaaagcagcccccatctatgaactagtgaccaacaaccagacccagaggctcttgcaggaggctaccatgagctctctctggtgctcagggactggagatgtcatcgaggactggtgtcgatgtgactccactgcttttggagctgatggactccccacctgtgcgcctctcccacagcctgtgctgagactctccacggttcacgagcccagcagcactcttgtggtcctggagtgggaacactcagagccaccaatcggggtgcagattgtagattacctcctccgtcaagagaaagtcactgacaggatggaccactccaaagtggagacagaaacagtgctgagctttgtggacgacatcatctctggagcaaagtctccttgtgcaatgccatctcaggtgccggacaagcagctcaccaccatctctctgatcatacgatgcctggaacctgacaccatttacatgttcacgctgtggggagtggacaacacaggacggcgctccaggccaagcgacgtgatcgtgaagaccccatgccccgtggtggatgatgtcaaggctcaagaaatagcagacaagatctacaatctcttcaatggctacactagtgggaaggagcagcagaccgcctacaacaccctcctggatctgggttcccccaccttacaccgggtcctctaccactataaccagcactatgagagttttggggaattcacctggcgatgtgaggatgagttaggtcccaggaaagctggtctcatcctttcccagcttggggacctcagcagttggtgcaatggactccttcaggaacccaagataagcttgcggcgcagctcactcaagtacctggggtgccgctacagcgagatcaaaccctacggacttgactgggcggagctcagccgggacctcaggaagacgtgtgaggagcagaccctgagtatcccctacaacgactatggggacagcaaagagatctagcaccataaggccagggagctgctgccagaatgaagtaggaaagaggagggatccatctgggttggtctgtggatttttaatattttttaatggaacatgaaaacctccacagcaacatcgaaaccagggagaaagtgatccttgctccctgcagaacttcttcagtatgatgttctccatctgcatgattgggaaatctgccagccagtggcttcatgcagtgccatatttctttagaggattactttggggtttgctttgccattaatttgttccattcatttttttttccctgagaagtttaccaaaatgctcaagagctctgccgtgctccccatgaaaagtctattaagtaggcaccctgtgctcactcagttcctaaatccattgcaactgggagcagaggtgaggccagaaagttgttaggcctgccgcaggccccaccctcaagcattcctcaggaagcgtctcactctgggagccttggccctgctcacagagagagacaatagaaaattgaggaaggtggcccttgtctgtgtctcctggttttcttcctaggccttgctatcactatttccatacccgaaaggtgaaaccagctttcattataggccccagtgggccacttgggttttgagatccttccttattttaagccaggactgggattaaatctccctctgtcagatctctgtcccttcctctgaacaacatgatctttgagagggaacaagatgccatctgtcaactgcaccttcagaaaagtctacctgggagactagttagcagtccacattcaagagaagacttggagtttattgttttttaaaaaaaccatgcttcctttggatagacttctccagcctaccaatatatatccatgtgcctggattatctttaacccccacacctcttaccttggacaggtaaggcttggccgatgtctgattgggaccaggaggggtcaacactttcatatcagtgttacagtgaactaaagctattattgatcacaaaaaacttctgttcatccccaccttgctaaatttgcttgtgttgctagttttgcaaatcgtttctctgatgaccataagcaggaggattccaccatggtcactgcccatccagtcacagggattctgtgtagggaagcaccactgattgcagttaacatctagagtgttgtttccatcccactgcccaagcattggcatggtcatgaatggtggcccagccaacaggaagcccagcctttcagaaagagcctggcaaggccctgttgactagcaatggccttagctgtcccacacaactcagtggcctgaacacacaccttcagccaccatgcctttgaccagggctcctcatctggaaacatatgagaaaggtcagcaaacagatgcaagacctataaggctagtcattgagctatattggttttttttctaaatagtagtagtgacagataacatttattgagtgcttgctgtatgccaggcgctgatgtaagcactttaggtatcattgaattctcacagcaactcctgaggaaagtgctattcttgtctccattttagtgttgaggaaaacgaggcaaagagaggttatacaacttgcctcaaatcccttgtgcactgtaactcacactgagtttcagtgtgatttcaggctgttggtctccagggcacaggatcttagctactctgggatacccagttctgttttcagtatcatctggcacacaactgtccaagctctcagccccacagggaacctgcccagagagctttacctttcccaagcatctgtggcatggacatgtcctctgtgcagtggaaggaggaggggcgaaagtacgcccttagcctttggagctagagcacccttgggacccctagttccactgcacatggccctcctccccaccctcatgactgggaaggaagcctgtgatgaggctgagataaagcacagggtggtttcactctcctctctccttctttccaaacactgaaggatttatttcaaactctctaatgcacctgcctcagagattcccctactttcaaagcaaagatcagcagaaaaattggctgtcccacctgtggcaaatgctggagcctcagttaaagtgcctcaaggggcaaatatttcaccattgccagagaagatgtgacaggccaatcagacagggcccagagcatctctttgctgctactgttttgccatccttctattcatatctgtgcagaacacggtgttttaagcttgagtgaaaggagggtgaggctgccgatgccttcctgcccagaagtggatgatgtgggagttgacaggccagggagagggtgaagcaggtatcagagtcactcctctgtaccctctccttctgtttttattttaggcacactatcttcctctctcctatctttccctcaatctcccaagttcctctaccttctttatctttgtcttttacttcttctttctgtgaccctccttttttggcctcctctttccccaagactttcttcctcctgtttctcgttgagttctccccactgaatgtgtgtatgtatgtacacacacacacacgtgtgcacacacaatgcacacaactcctatgactggctcctacttacattcaagttaaaaaggctgatatgaacagggcaggggaaaatcttaggatggttgtacaattgactggaggattttttccccttggaagacactattgatctcaacctgctgacttttcctaatgcttacctgaaggaacccatcctggctagaaagggtgatggtactggaccggtattcaaccttgagttttcaagctgccaaacaggtcttaagggaggtgcttatatcccaccaacactctcccagctcccatgtccccaagacctctggagtttcctcttgaatgtacatgaaccactgtaatagcattagacttttaattgagtgtgcaatcgttttccatggagtttggtccgttcattattttttagttaactacacttcttgatattcaaatgttctattaaaaaaactgagtatgaagaaaaacactttactactgcagaaggaagaaagaatataatatgaccatcttcaggtataacagtgttgtttaaaagagaattattgtatgattataaaagatgaaataattaactgaataataaaacaaagctattagtaagcaaaaaaaaaaaaaaaaaa

SEQ ID NO: 194 - protein, 1294 aa, Homo sapiens
MALAGLCALLACCWGPAAVLATAAGDVDPSKELECKLKSITVSALPFLRENDLSIMHSPSASEPKLLFSVRNDFPGEMVVVDDLENTELPYFVLEISGNTEDIPLVRWRQQWLENGTLLFHIHHQDGAPSLPGQDPTEEPQHESAEEELRILHISVMGGMIALLLSILCLVMILYTRRRWCKRRRVPQPQKSASAEAANEIHYIPSVLIGGHGRESLRNARVQGHNSSGTLSIRETPILDGYEYDITDLRHHLQRECMNGGEDFASQVTRTLDSLQGCNEKSGMDLTPGSDNAKLSLMNKYKDNIIATSPVDSNHQQATLLSHTSSSQRKRINNKARAGSAFLNPEGDSGTEAENDPQLTFYTDPSRSRRRSRVGSPRSPVNKTTLTLISITSCVIGLVCSSHVNCPLVVKITLHVPEHLIADGSRFILLEGSQLDASDWLNPAQVVLFSQQNSSGPWAMDLCARRLLDPCEHQCDPETGECLCYEGYMKDPVHKHLCIRNEWGTNQGPWPYTIFQRGFDLVLGEQPSDKIFRFTYTLGEGMWLPLSKSFVIPPAELAINPSAKCKTDMTVMEDAVEVREELMTSSSFDSLEVLLDSFGPVRDCSKDNGGCSKNFRCISDRKLDSTGCVCPSGLSPMKDSSGCYDRHIGVDCSDGFNGGCEQLCLQQMAPFPDDPTLYNILMFCGCIEDYKLGVDGRSCQLITETCPEGSDCGESRELPMNQTLFGEMFFGYNNHSKEVAAGQVLKGTFRQNNFARGLDQQLPDGLVVATVPLENQCLEEISEPTPDPDFLTGMVNFSEVSGYPVLQHWKVRSVMYHIKLNQVAISQALSNALHSLDGATSRADFVALLDQFGNHYIQEAIYGFEESCSIWYPNKQVQRRLWLEYEDISKGNSPSDESEERERDPKVLTFPEYITSLSDSGTKHMAAGVRMECHSKGRCPSSCPLCHVTSSPDTPAEPVLLEVTKAAPIYELVTNNQTQRLLQEATMSSLWCSGTGDVIEDWCRCDSTAFGADGLPTCAPLPQPVLRLSTVHEPSSTLVVLEWEHSEPPIGVQIVDYLLRQEKVTDRMDHSKVETETVLSFVDDIISGAKSPCAMPSQVPDKQLTTISLIIRCLEPDTIYMFTLWGVDNTGRRSRPSDVIVKTPCPVVDDVKAQEIADKIYNLFNGYTSGKEQQTAYNTLLDLGSPTLHRVLYHYNQHYESFGEFTWRCEDELGPRKAGLILSQLGDLSSWCNGLLQEPKISLRRSSLKYLGCRYSEIKPYGLDWAELSRDLRKTCEEQTLSIPYNDYGDSKEI

SEQ ID NO: 195 - DNA, 3914 bp, Homo sapiens
gctccgggaaacaaagaatccggggctctccagacatcagagcttaaacccaggactctgcaagcggcatctcattccggggtccagggctctcccggctctccatcccctccctaacctcccccgcctcccgcgctcgctccctcgctccctccccgctcgcttcctcccccaccatcgcagcgctaggaggaaggcggccggggctcaagatggctttagccgggctctgcgccctgctcgcctgctgctgggggccggcggcggtgctggccacggccgccggcgacgtggatccatccaaggagctggagtgcaagctcaaaagcatcacggtgtcggcactgcccttcctgcgcgagaacgacctgagcatcatgcacagcccctcggcctcggagcccaagctcctcttctcggtgcgcaacgacttcccgggagaaatggtcgtggtggacgacctggagaacacggagctgccctacttcgtgctggagatctcagggaacacagaggatatccctttggtgcgctggaggcagcagtggctggagaatggcactttgctttttcacattcatcaccaagatggtgccccaagccttcctggacaagaccccactgaagaaccccaacatgagtcggcagaagaggagctgaggatcctccacatctcagtcatgggtggcatgatcgctctgctgctgtccatcttgtgcctggtgatgatcctgtatactcgccggcgctggtgcaaacgccgccgggtcccgcagccccagaagagtgccagtgctgaggcagccaatgagattcactacattccttctgtgctgatcggcgggcacggacgggagagcctgcgcaatgcccgcgtgcagggccacaactccagtggcaccctgagcatccgggagacacctatcctggacggctatgagtatgacatcactgatctgcgccaccatctgcagagggagtgcatgaacggaggggaggactttgccagccaggtcacgcgcaccctcgactccctgcagggctgcaatgaaaagtcggggatggacctcacaccaggaagtgacaatgccaagctgtcactgatgaacaagtataaagataatattatagccactagccctgtggactccaaccaccagcaagccacccttctctctcacacctccagcagccagagaaagcggatcaacaacaaagcaagagctggttccgccttcttgaaccctgaaggggattctggcacagaggcagaaaacgacccccagctgaccttttacacggatccttcaaggagcaggaggcgtagtagagtgggttctccccgaagtcctgtgaataagaccaccttgaccctgatcagcatcaccagctgtgtgattggcctcgtgtgctcctctcacgtcaactgccctctcgttgtcaagatcaccctgcatgtccctgagcacctgattgctgatgggagccgcttcatcttgctggaggggagccagctggatgccagtgactggctgaaccctgcccaagtggttctcttctctcagcagaactccagcggaccctgggccatggacctctgtgcccggcggctcctggacccctgtgaacaccaatgtgaccccgaaactggggaatgcctctgctatgaaggctacatgaaggatccagtacataagcacctttgcattcggaacgaatgggggacaaaccaggggccatggccttacacaatatttcagcgaggctttgacctggttttgggagagcagccctctgataaaatatttagattcacctacactcttggggagggcatgtggttgcccctcagcaagagctttgtgattccaccagccgaactggccatcaatccatcagcaaagtgcaagacggacatgactgtgatggaggatgctgtggaggtcagagaggagctgatgacttcatcctccttcgacagcctggaggttctcttagattcctttgggccggtgcgcgactgcagcaaagataacgggggctgcagtaagaatttccgctgtatttcagatcgcaagctggactccactggttgcgtgtgcccatctggactcagtcccatgaaggacagctctggctgctatgaccgccacatcggggtggactgttccgacggcttcaacggcggctgtgagcagctgtgcctccagcagatggcgcccttcccggacgaccccaccttgtataacatcctcatgttctgtgggtgcatcgaggactacaagcttggtgtggatggacgctcttgccaactcatcacggagacctgtccagagggaagtgactgtggggaaagcagggagcttcccatgaaccagaccctctttggggagatgttctttggttacaacaaccattccaaggaagtggctgccggacaggtgctgaaaggaacattcaggcaaaacaactttgctcgtggtttagaccagcaactgccagatggtcttgtggtggccactgtgcccctggagaatcaatgcctagaggagatctcggagcccacccctgaccctgacttcctgactgggatggtgaacttcagtgaagtgtctgggtaccctgtgctgcagcactggaaggtccggtctgtgatgtaccacatcaaactcaaccaagtggccatctctcaggccctcagcaatgctctccactcgctggatggggctacatctcgtgcagattttgtggcgctgttggaccagttcggcaaccattacatccaggaagctatctacggctttgaggagtcctgttctatctggtacccaaacaagcaggtccagcggcgactctggctggagtatgaagacatcagtaaaggcaactccccatcagatgagtctgaggagcgggaaagagaccccaaggtgctgacattcccagaatacatcaccagcttgtcagactccggcaccaagcacatggcggctggagtccgcatggagtgccacagcaagggacgatgcccctcgtcctgccccctgtgtcatgtgacatccagccctgacacccctgctgagccggttctgctggaggtgaccaaagcagcccccatctatgaactagtgaccaacaaccagacccagaggctcttgcaggaggctaccatgagctctctctggtgctcagggactggagatgtcatcgaggactggtgtcgatgtgactccactgcttttggagctgatggactccccacctgtgcgcctctcccacagcctgtgctgagactctccacggttcacgagcccagcagcactcttgtggtcctggagtgggaacactcagagccaccaatcggggtgcagattgtagattacctcctccgtcaagagaaagtcactgacaggatggaccactccaaagtggagacagaaacagtgctgagctttgtggacgacatcatctctggagcaaagtctccttgtgcaatgccatctcaggtgccggacaagcagctcaccaccatctctctgatcatacgatgcctggaacctgacaccatttacatgttcacgctgtggggagtggacaacacaggacggcgctccaggccaagcgacgtgatcgtgaagaccccatgccccgtggtggatgatgtcaaggctcaagaaatagcagacaagatctacaatctcttcaatggctacactagtgggaaggagcagcagaccgcctacaacaccctcctggatctgggttcccccaccttacaccgggtcctctaccactataaccagcactatgagagttttggggaattcacctggcgatgtgaggatgagttaggtcccaggtaatcaataaactaagtcaacccttaaaaaaaaaaaaaaaaaaaaaaaaaaaaa

SEQ ID NO: 196 - protein, 1216 aa, Homo sapiens
MALAGLCALLACCWGPAAVLATAAGDVDPSKELECKLKSITVSALPFLRENDLSIMHSPSASEPKLLFSVRNDFPGEMVVVDDLENTELPYFVLEISGNTEDIPLVRWRQQWLENGTLLFHIHHQDGAPSLPGQDPTEEPQHESAEEELRILHISVMGGMIALLLSILCLVMILYTRRRWCKRRRVPQPQKSASAEAANEIHYIPSVLIGGHGRESLRNARVQGHNSSGTLSIRETPILDGYEYDITDLRHHLQRECMNGGEDFASQVTRTLDSLQGCNEKSGMDLTPGSDNAKLSLMNKYKDNIIATSPVDSNHQQATLLSHTSSSQRKRINNKARAGSAFLNPEGDSGTEAENDPQLTFYTDPSRSRRRSRVGSPRSPVNKTTLTLISITSCVIGLVCSSHVNCPLVVKITLHVPEHLIADGSRFILLEGSQLDASDWLNPAQVVLFSQQNSSGPWAMDLCARRLLDPCEHQCDPETGECLCYEGYMKDPVHKHLCIRNEWGTNQGPWPYTIFQRGFDLVLGEQPSDKIFRFTYTLGEGMWLPLSKSFVIPPAELAINPSAKCKTDMTVMEDAVEVREELMTSSSFDSLEVLLDSFGPVRDCSKDNGGCSKNFRCISDRKLDSTGCVCPSGLSPMKDSSGCYDRHIGVDCSDGFNGGCEQLCLQQMAPFPDDPTLYNILMFCGCIEDYKLGVDGRSCQLITETCPEGSDCGESRELPMNQTLFGEMFFGYNNHSKEVAAGQVLKGTFRQNNFARGLDQQLPDGLVVATVPLENQCLEEISEPTPDPDFLTGMVNFSEVSGYPVLQHWKVRSVMYHIKLNQVAISQALSNALHSLDGATSRADFVALLDQFGNHYIQEAIYGFEESCSIWYPNKQVQRRLWLEYEDISKGNSPSDESEERERDPKVLTFPEYITSLSDSGTKHMAAGVRMECHSKGRCPSSCPLCHVTSSPDTPAEPVLLEVTKAAPIYELVTNNQTQRLLQEATMSSLWCSGTGDVIEDWCRCDSTAFGADGLPTCAPLPQPVLRLSTVHEPSSTLVVLEWEHSEPPIGVQIVDYLLRQEKVTDRMDHSKVETETVLSFVDDIISGAKSPCAMPSQVPDKQLTTISLIIRCLEPDTIYMFTLWGVDNTGRRSRPSDVIVKTPCPVVDDVKAQEIADKIYNLFNGYTSGKEQQTAYNTLLDLGSPTLHRVLYHYNQHYESFGEFTWRCEDELGPR

SEQ ID NO: 197 - DNA, 3618 bp, Homo sapiens
gagcggggagcaagagaatttgaaaagagacatccgctccctctcacacgctgagggggaggcattcgcgtttccccaaatgagaaagaaccacaagaaatcatgaagtaaaaactttggaaagctgccactggagatgttgcacaaaaacctggaatcttttaggagtctcctcccagtcgttgaaggtttggggagcagctgatacagcaaggagggctcttgcaaggattcaagctccgagccctggaggagcagcacggagcgggagagcgtggcgagagaatgaagaaaccaatcgcccgggagaagcatgaggtggcagtgtggcactcggtttagagggcttcggccggcggtggccccatggacagccctgctggcactgggcctgcctggctgggtgttggctgtctcagccacggcggctgctgtggtccccgagcagcatgcctccgtagctggccagcatcccctggactggctgctcacagaccggggccccttccaccgcgctcaggagtatgctgacttcatggagcggtaccgccagggtttcaccaccaggtacaggatttatagggagtttgcccgttggaaggtgaacaacttggctctggaaaggaaggacttcttcagtttgccattgcctcttgccccagagtttatccggaacattcgcctccttggaaggagacccaatctgcaacaggttacagaaaatctgattaaaaagtacggcactcatttcttactttctgccacccttggaggagaagagtccctgaccatttttgtggacaagcagaaactgggaagaaagacagagacaacaggaggtgcctctataatcgggggcagtgggaacagcacagctgtgtccctggagaccctgcaccagctggccgcctcctacttcatcgacagagagagcacgctgcgacggctgcaccatatccagatagccacgggggccatcaaggtcaccgagaccaggaccggtcctctgggctgcagcaactatgacaatctggactcagtcagttctgtcttggtacagagtccagagaacaaagtacagttacttggccttcaggtgctgctgcctgagtatctgcgtgagcgctttgtagctgcagcactcagctacatcacatgcagctctgagggtgagctcgtctgcaaggagaatgactgctggtgcaagtgcagccccaccttccctgaatgcaactgccctgatgctgacatccaggccatggaggacagcctgctgcagatccaggactcctgggccactcacaaccggcagtttgaagagtcagaagagttccaggccctgctgaaaaggctgcccgatgaccggttcctgaactccacagctatctcccagttctgggccatggacaccagccttcagcaccgctaccagcagctgggagctggcttgaaagtgctgttcaaaaagacccatcggatcctacgccggctcttcaacctctgcaagcgctgccatcgccagcctcgcttccgcctgcccaaggagaggtccttgtcctactggtggaaccgaatccagtccctcctctactgtggggaaagcacctttcctggcactttcctggaacagagccacagctgcacctgcccctatgaccaatcttcctgccagggccccatcccatgtgccttgggcgaagggcccgcgtgtgcccactgtgctccagacaatagcacacgctgtgggagctgcaacccgggctatgtgctggcccaggggctgtgccggccagaggtggccgagtccctggaaaactttcttgggctggagacagacttgcaggacctggagctaaagtacctgctgcagaagcaggatagccgcattgaggtacactccatcttcatcagcaatgacatgcggctgggcagctggtttgacccttcctggaggaagcgcatgctgctcaccctgaagagcaacaagtacaagcctgggctggtgcacgtgatgttggccttgtccttgcagatctgtctcaccaagaacagcaccctggagcctgtcatggccatctacgtcaacccctttgggggcagccactctgagagctggttcatgcctgtgaatgagggcagctttcctgactgggaaaggactaacgtggatgcagctgcccagtgccaaaactggactatcaccttggggaataggtggaagactttctttgagacagttcatgtttacctacggagccgaatcaagtccctggatgacagctccaatgagacaatctactatgagcccctggagatgactgatccctctaagaatttgggttacatgaaaattaacaccttgcaggtctttggctacagcctgccctttgacccagatgctatccgggacttaattctccagttggactacccatatactcaaggttcccaggactctgcactcttgcagctcattgagctcagggaccgggtgaaccagctttctccacctggcaaagtccgacttgaccttttctcctgcttgctccggcatcggcttaagctggccaacaatgaggtgggcaggatccagtcctccctgagggctttcaattctaagctgccaaaccctgtggaatatgagaccggcaaactctgtagctaatgggcggcccacttcagcactgggcaaggaggggatccatgaatctggggtacaaagataatctaagccctcaccttagtgccaacagggtgtgctcccacgagactttcagcatccagtagatgggacctcgaggctcgagctgaagcaggcgagagagaaacagctactgcgtgcgtgcgcgcacgcatacacacacacacacacacactggcacagggaggctacaactaagtagcctcagatctgtaaagttgattggtgctttctaaaatgaatgcaattgaaagaaaggagccaaggaagagattaagaaaaagaaccagctgaaccatgaaacaaacaaaaatcctaaaagtgattcttgtcattcaagaaagcaagaggggacaacaatgggaggggtcggagctcttccttcccctctgtggagtcacttttgtattctttttaaccagatttcttaaaatgttgttgttttgtgaatcctgacattggttcttacttttgtatgctgcctcctctgtgccctcccagacgctgactgggaaacacaagaagtacaaccaacaggaaccagcgccaagggcaggcagcggcctccttgctcccctcccttactcctccctctgctgcctcctccccccaccaagtttcagggccctggattgttcccagttcccattgtggtcccttcagagctcctttccaacagcatctctctgtcgaagaaagaagctctgtcaagttagagagagacaatgtgtaggaaatgttcttttttaaaaaaaaataacaaaaacaaaacaaaactatttattttgtgattgttttccttgttaatctgctccaaccacctgaacatctaagtaaacatttatctggtttaatataaaaaaaaaaaaaaaaaaaaaaaaaaaaaaaaaaaaaaaaaaaaaaaaaaaaaaaaaaaa

SEQ ID NO: 198 - protein, 783 aa, Homo sapiens
MRWQCGTRFRGLRPAVAPWTALLALGLPGWVLAVSATAAAVVPEQHASVAGQHPLDWLLTDRGPFHRAQEYADFMERYRQGFTTRYRIYREFARWKVNNLALERKDFFSLPLPLAPEFIRNIRLLGRRPNLQQVTENLIKKYGTHFLLSATLGGEESLTIFVDKQKLGRKTETTGGASIIGGSGNSTAVSLETLHQLAASYFIDRESTLRRLHHIQIATGAIKVTETRTGPLGCSNYDNLDSVSSVLVQSPENKVQLLGLQVLLPEYLRERFVAAALSYITCSSEGELVCKENDCWCKCSPTFPECNCPDADIQAMEDSLLQIQDSWATHNRQFEESEEFQALLKRLPDDRFLNSTAISQFWAMDTSLQHRYQQLGAGLKVLFKKTHRILRRLFNLCKRCHRQPRFRLPKERSLSYWWNRIQSLLYCGESTFPGTFLEQSHSCTCPYDQSSCQGPIPCALGEGPACAHCAPDNSTRCGSCNPGYVLAQGLCRPEVAESLENFLGLETDLQDLELKYLLQKQDSRIEVHSIFISNDMRLGSWFDPSWRKRMLLTLKSNKYKPGLVHVMLALSLQICLTKNSTLEPVMAIYVNPFGGSHSESWFMPVNEGSFPDWERTNVDAAAQCQNWTITLGNRWKTFFETVHVYLRSRIKSLDDSSNETIYYEPLEMTDPSKNLGYMKINTLQVFGYSLPFDPDAIRDLILQLDYPYTQGSQDSALLQLIELRDRVNQLSPPGKVRLDLFSCLLRHRLKLANNEVGRIQSSLRAFNSKLPNPVEYETGKLCS

SEQ ID NO: 199 - DNA, 4950 bp, Homo sapiens
tgtaagtagggtgggacagagatggcacctgggggttctgaggcacccgctcctctctgagacagacagggatcaggagccggactgggaccagaccaccagcaacacaccagaggatgttctctaaataagaccatggcacttaagaacattaactaccttctcatcttctacctcagtttctcactgcttatctacataaaaaattccttttgcaataaaaacaacaccaggtgcctctcaaattcttgccaaaacaattctacatgcaaagatttttcaaaagacaatgattgttcttgttcagacacagccaataatttggacaaagactgtgacaacatgaaagacccttgcttctccaatccctgtcaaggaagtgccacttgtgtgaacaccccaggagaaaggagctttctgtgcaaatgtcctcctgggtacagtgggacaatctgtgaaactaccattggttcctgtggcaagaactcctgccaacatggaggtatttgccatcaggaccctatttatcctgtctgcatctgccctgctggatatgctggaagattctgtgagatagatcacgatgagtgtgcttccagcccttgccaaaatggggccgtgtgccaggatggaattgatggttactcctgcttctgtgtcccaggatatcaaggcagacactgcgacttggaagtggatgaatgtgcttcagatccctgcaagaacgaggctacatgcctcaatgaaataggaagatatacttgtatctgtccccacaattattctggtgtaaactgtgaattggaaattgacgaatgttggtcccagccttgtttaaatggtgcaacttgtcaggatgctctgggggcctatttctgcgactgtgcccctggattcctgggggatcactgtgaactcaacactgatgagtgtgccagtcaaccttgtctccatggagggctgtgtgtggatggagaaaacagatatagctgtaactgcacgggtagtggattcacagggacacactgtgagaccttgatgcctctttgttggtcaaaaccttgtcacaataatgctacatgtgaggacagtgttgacaattacacttgtcactgctggcctggatacacaggtgcccagtgtgagatcgacctcaatgaatgcaatagtaacccctgccagtccaatggggaatgtgtggagctgtcctcagagaaacaatatggacgcatcactggactgccttcttctttcagctaccatgaagcctcaggttatgtctgtatctgtcagcctggattcacaggaatccactgcgaagaagacgtcaatgaatgttcttcaaacccttgccaaaatggtggtacttgtgagaacttgcctgggaattatacttgccattgcccatttgataacctttctagaactttttatggaggaagggactgttctgatattctcctgggctgtacccatcagcaatgtctaaataatggaacatgcatccctcacttccaagatggccagcatggattcagctgcctgtgtccatctggctacaccgggtccctgtgtgaaatcgcaaccacactttcatttgagggcgatggcttcctgtgggtcaaaagtggctcagtgacaaccaagggctcagtttgtaacatagccctcaggtttcagactgttcagccaatggctcttctacttttccgaagcaacagggatgtgtttgtgaagctggagctgctaagtggctacattcacttatcaattcaggtcaataatcagtcaaaggtgcttctgttcatttcccacaacaccagcgatggagagtggcatttcgtggaggtaatatttgcagaggctgtgacccttaccttaatcgacgactcctgtaaggagaaatgcatcgcgaaagctcctactccacttgaaagtgatcaatcaatatgtgcttttcagaactcctttttgggtggtttaccagtgggaatgaccagcaatggtgttgctctgcttaacttctataatatgccatccacaccttcgtttgtaggctgtctccaagacattaaaattgattggaatcacattaccctggagaacatctcgtctggctcatcattaaatgtcaaggcaggctgtgtgagaaaggattggtgtgaaagccaaccttgtcaaagcagaggacgctgcatcaacttgtggctgagttaccagtgtgactgccacaggccctatgaaggccccaactgtctgagagagtatgtggcaggcagatttggccaggatgactccactggttatgtcatctttactcttgatgagagctatggagacaccatcagcctctccatgtttgtccgaacgcttcaaccatcaggcttacttctagctttggaaaacagcacttatcaatatatccgtgtctggctagagcgcggcagactagcaatgctgactccaaactctcccaaattagtagtaaaatttgttcttaatgatggaaatgtccacttgatatctttgaaaatcaagccatataaaattgaactgtatcagtcttcacaaaacctaggatttatttctgcttctacgtggaaaatcgaaaagggagatgtcatctacattggtggcctacctgacaagcaagagactgaacttaatggtggattcttcaaaggctgtatccaagatgtaagactaaacaaccaaaatctggaattctttccaaatccaacaaacaatgcatctctcaatccagttcttgtcaatgtaacccaaggctgtgctggagacaacagctgcaagtccaacccctgtcacaatggaggtgtttgccattcccggtgggatgacttctcctgttcctgtcctgccctcacaagtgggaaagcctgtgaggaggttcagtggtgtggattcagcccgtgtcctcacggagcccagtgccagccggtgcttcaaggatttgaatgtattgcaaatgctgtttttaatggacaaagcggtcaaatattattcagaagcaatgggaatattaccagagaactcaccaatatcacatttggtttcagaacaagggatgcaaatgtaataatattgcatgcagaaaaagagcctgaatttcttaatattagcattcaagattccagattattctttcaattgcaaagtggcaacagcttttatatgctaagtctgacaagtttgcagtcagtgaatgatggcacatggcacgaagtgaccctttccatgacagacccactgtcccagacctccaggtggcaaatggaagtggacaacgaaacaccttttgtgaccagcacaattgctactggaagcctcaactttttgaaggataatacagatatttatgtgggagacagagctattgacaatataaagggcctgcaagggtgtctaagtacaatagaaatcggaggcatttatctctcttactttgaaaatgttcatggtttcattaataaacctcaggaagagcaatttctcaaaatctctaccaattcagtggtcactggctgtttgcagttaaatgtctgcaactccaacccctgtttgcatggaggaaactgtgaagacatctatagctcttatcattgctcctgtcccttgggatggtcagggaaacactgtgaactcaacatcgatgaatgcttttcaaacccctgtatccatggcaactgctctgacagagttgcagcctaccactgcacatgtgagcctggatacactggtgtgaactgtgaagtggatatagacaactgccagagtcaccagtgtgcaaatggagccacctgcattagtcatactaatggctattcttgcctctgttttggaaattttacaggaaaattttgcagacagagcagattaccctcaacagtctgtgggaatgagaagacaaatctcacttgctacaatggaggcaactgcacagagttccagactgaattaaaatgtatgtgccggccaggttttactggagaatggtgtgaaaaggacattgatgagtgtgcctctgatccgtgtgtcaatggaggtctgtgccaggacttactcaacaaattccagtgcctctgtgatgttgcctttgctggcgagcgctgcgaggtggacttggcagatgacttgatctccgacattttcaccactattggctcagtgactgtcgccttgttactgatcctcttgctggccattgttgcttctgttgtcacctccaacaaaagggcaactcagggaacctacagccccagccgtcaggagaaggagggctcccgagtggaaatgtggaacttgatgccaccccctgcaatggagagactgatttaggagcattgtgtcccttcgagatggggatccacacactgtgaatgtgatgactgtacttcaggtatctctgacatacctgacaatgttaatctgcaactgggattacactggaactacaggaatgattcctttgaccaccttaaaaactttcacagtggttccgctcgacaccattgttttattatattatatcagccaattgcaaaaaaagtctgtgccagtaatttcagccttataattagcaaaaacatcttccagagaataaagtcttctgtggctttagtggctatcactgaaactctttcctcttttcaacctgggaacaaattttagttttcattttaggtttctgtactttctgtagtttctgtgtaaactgccatatgtttacatggaaactacaggaaaaaattggctacatttctcacttctcctatcatgtggtcaaagttattgttgtataccagcgatgggatgtatacttttgtccttcattcatggattcagagaaagctctgggaatgacttatggtccaaaaaagtgacccaatggcaacaaataaaaattgaaatgcaaaaaaaaaaaaaaaaaaa

SEQ ID NO: 200 - protein, 1406 aa, Homo sapiens
MALKNINYLLIFYLSFSLLIYIKNSFCNKNNTRCLSNSCQNNSTCKDFSKDNDCSCSDTANNLDKDCDNMKDPCFSNPCQGSATCVNTPGERSFLCKCPPGYSGTICETTIGSCGKNSCQHGGICHQDPIYPVCICPAGYAGRFCEIDHDECASSPCQNGAVCQDGIDGYSCFCVPGYQGRHCDLEVDECASDPCKNEATCLNEIGRYTCICPHNYSGVNCELEIDECWSQPCLNGATCQDALGAYFCDCAPGFLGDHCELNTDECASQPCLHGGLCVDGENRYSCNCTGSGFTGTHCETLMPLCWSKPCHNNATCEDSVDNYTCHCWPGYTGAQCEIDLNECNSNPCQSNGECVELSSEKQYGRITGLPSSFSYHEASGYVCICQPGFTGIHCEEDVNECSSNPCQNGGTCENLPGNYTCHCPFDNLSRTFYGGRDCSDILLGCTHQQCLNNGTCIPHFQDGQHGFSCLCPSGYTGSLCEIATTLSFEGDGFLWVKSGSVTTKGSVCNIALRFQTVQPMALLLFRSNRDVFVKLELLSGYIHLSIQVNNQSKVLLFISHNTSDGEWHFVEVIFAEAVTLTLIDDSCKEKCIAKAPTPLESDQSICAFQNSFLGGLPVGMTSNGVALLNFYNMPSTPSFVGCLQDIKIDWNHITLENISSGSSLNVKAGCVRKDWCESQPCQSRGRCINLWLSYQCDCHRPYEGPNCLREYVAGRFGQDDSTGYVIFTLDESYGDTISLSMFVRTLQPSGLLLALENSTYQYIRVWLERGRLAMLTPNSPKLVVKFVLNDGNVHLISLKIKPYKIELYQSSQNLGFISASTWKIEKGDVIYIGGLPDKQETELNGGFFKGCIQDVRLNNQNLEFFPNPTNNASLNPVLVNVTQGCAGDNSCKSNPCHNGGVCHSRWDDFSCSCPALTSGKACEEVQWCGFSPCPHGAQCQPVLQGFECIANAVFNGQSGQILFRSNGNITRELTNITFGFRTRDANVIILHAEKEPEFLNISIQDSRLFFQLQSGNSFYMLSLTSLQSVNDGTWHEVTLSMTDPLSQTSRWQMEVDNETPFVTSTIATGSLNFLKDNTDIYVGDRAIDNIKGLQGCLSTIEIGGIYLSYFENVHGFINKPQEEQFLKISTNSVVTGCLQLNVCNSNPCLHGGNCEDIYSSYHCSCPLGWSGKHCELNIDECFSNPCIHGNCSDRVAAYHCTCEPGYTGVNCEVDIDNCQSHQCANGATCISHTNGYSCLCFGNFTGKFCRQSRLPSTVCGNEKTNLTCYNGGNCTEFQTELKCMCRPGFTGEWCEKDIDECASDPCVNGGLCQDLLNKFQCLCDVAFAGERCEVDLADDLISDIFTTIGSVTVALLLILLLAIVASVVTSNKRATQGTYSPSRQEKEGSRVEMWNLMPPPAMERLI

SEQ ID NO: 201 - DNA, 4916 bp, Homo sapiens
aaaaagtacagagtccagggaaagacttgcttgtaactttatgaattctggatttttttttttcctttgctttttcttaactttcactaagggttactgtagtctgatgtgtccttcccaaggccacgaaatttgacaagctgcacttttcttttgctcaatgatttctgctttaagccaaagaactgcctataatttcactaagaatgtcttctaattcagatactggggatttacaagagtctttaaagcacggacttacacctattgtgtctcaatttaaaatggtgaattactcctatgatgaagatctggaagagctttgtcccgtgtgtggagataaagtgtctgggtaccattatgggctcctcacctgtgaaagctgcaagggattttttaagcgaacagtccaaaataataaaaggtacacatgtatagaaaaccagaactgccaaattgacaaaacacagagaaagcgttgtccttactgtcgttttcaaaaatgtctaagtgttggaatgaagctagaagctgtaagggccgaccgaatgcgtggaggaaggaataagtttgggccaatgtacaagagagacagggccctgaagcaacagaaaaaagccctcatccgagccaatggacttaagctagaagccatgtctcaggtgatccaagctatgccctctgacctgaccatttcctctgcaattcaaaacatccactctgcctccaaaggcctacctctgaaccatgctgccttgcctcctacagactatgacagaagtccctttgtaacatcccccattagcatgacaatgccccctcacggcagcctgcaaggttaccaaacatatggccactttcctagccgggccatcaagtctgagtacccagacccctataccagctcacccgagtccataatgggctattcatatatggatagttaccagacgagctctccagcaagcatcccacatctgatactggaacttttgaagtgtgagccagatgagcctcaagtccaggctaaaatcatggcctatttgcagcaagagcaggctaaccgaagcaagcacgaaaagctgagcacctttgggcttatgtgcaaaatggcagatcaaactctcttctccattgtcgagtgggccaggagtagtatcttcttcagagaacttaaggttgatgaccaaatgaagctgcttcagaactgctggagtgagctcttaatcctcgaccacatttaccgacaagtggtacatggaaaggaaggatccatcttcctggttactgggcaacaagtggactattccataatagcatcacaagccggagccaccctcaacaacctcatgagtcatgcacaggagttagtggcaaaacttcgttctctccagtttgatcaacgagagttcgtatgtctgaaattcttggtgctctttagtttagatgtcaaaaaccttgaaaacttccagctggtagaaggtgtccaggaacaagtcaatgccgccctgctggactacacaatgtgtaactacccgcagcagacagagaaatttggacagctacttcttcgactacccgaaatccgggccatcagtatgcaggctgaagaatacctctactacaagcacctgaacggggatgtgccctataataaccttctcattgaaatgttgcatgccaaaagagcataagttacaacccctaggagctctgctttcaaaacaaaaagagattgggggagtggggagggggaagaagaacaggaagaaaaaaagtactctgaactgctccaagtaacgctaattaaaaacttgctttaaagatattgaatttaaaaaggcataataatcaaatacttaatagcaaataaatgatgtatcagggtatttgtattgcaaactgtgaatcaaaggcttcacagccccagaggattccatataaaagacattgtaatggagtggattgaactcacagatggataccaacacggtcagaagaaaaacggacagaacggttcttgtatatttaaactgatctccactatgaagaaatttaggaactaatcttattaattaggcttatacagcgggggatttgagcttacaggattcctccatggtaaagctgaactgaaacaattctcaagaatgcatcagctgtacctacaatagcccctccctcttcctttgaaggccccagcacctctgccctgtggtcaccgaatctgtactaaggacctgtgttcagccacacccagtggtagctccaccaaatcatgaacagcctaattttgagtgtctgtgtcttagacctgcaaacagctaataggaaattctattaatatgttagcttgccattttaaatatgttctgagggttgttttgtctcgtgttcatgatgttaagaaaatgcaggcagtatccctcatcttatgtaagtgtgaattaatattaagggaaatgactacaaactttcaaagcaaatgctccatagctaaagcaacttagaccttatttctgctactgttgctgaaatgtggctttggcattgttggatttcataaaaaatttctggcaggaagtcttgttagtatacatcagtctttttcatcatccaagtttgtagttcatttaaaaatacaacattaaacacattttgctaggatgtcaaatagtcacagttctaagtagttggaaacaaaattgacgcatgttaatctatgcaaagagaaaggaaaggatgaggtgatgtattgactcaaggttcattcttgctgcaattgaacatcctcaagagttgggatggaaatggtgatttttacatgtgtcctggaaagatattaaagtaattcaaatcttccccaaaggggaaaggaagagagtgatactgacctttttaagtcatagaccaaagtctgctgtagaacaaatatgggaggacaaagaatcgcaaattcttcaaatgactattatcagtattattaacatgcgatgccacaggtatgaaagtcttgccttatttcacaattttaaaaggtagctgtgcagatgtggatcaacatttgtttaaaataaagtattaatactttaaagtcaaataagatatagtgtttacattctttaggtcctgaggggcagggggatctgtgatataacaaaatagcaaaagcggtaatttccttaatgttatttttctgattggtaattatttttaacagtacttaattattctatgtcgtgagacactaaaatcaaaaacgggaatctcatttagactttaatttttttgagattatcggcggcacaatcactttgtagaaactgtaaaaaataaaagtatctcctagtcccttaattttttcataaatatttctggcttttgagtagtgtatttatattgtatatcatactttcaactgtagacaattatgatgctaatttattgtttcttggtttcacctttgtataagatatagccaagactgaagaaaccaaatatatgtgtttactgtagcatgtcttcaaattagtggaacttagttcagggacatagaagagtcttaatgaattaaaatcattcacttgattaaatgtctgtaaatcttcatcattcctactgtagtttatttaatatctattgtaaattatgtgacttgtagcttcctctggttttcaagtaaactcaacaaggtggagtcttacctggttttcctttccaagcattgtaaattgtataccaaagatattagttattacttctgtgtgtacaaagaggattattttattatgtttattaatcacctctaatactcatccacatgaagggtacacattaggtaagctgggcgttgactcatgcgcagtctcagtcacccgtgttatcttcgtggctcaaaggacaatgcaaaatcgccgatcagagctcatacccaaagcattacagagaacagcagcatcattgccctccccagctgaaaaacaagttggctagaagatacatggagaggaatggtgtggtcaacagttaatgaaacggttctatcatgcatgtgtaatgtggatggagacaattataagatttgactataactatttggagggtctttaacattgccaaaaaaacaaatatgttgatttttattttattttattttttattttaagaggcgggatcttgatctcacatgttgcccaggctggccttgaactcctgggctcaagcattcctcctgcctcagcctcccccatagctgggactaggggtgcatgccagcatacctggctacgttgactcttaaaatctatgttctcttattttaaagatacagtgctccccactgaaaattaaacctaaaaaatgtcacatattggtatgttgttaacctggtagattaaatcatgagaatgattagaaagacgggcaacacagcgggttacatccacactgctgatcacaccaacgacaggagctgataagcaagaaagcgtcacagccagcgtctgttcacccaaggttgacaagtgaagtttctctaatgttgattgttagccgatttgtaacctggcatttacttagcaactgccttatcaattacaggatttgccggtaaaagcagactcaaatataaaggtttttggcttaacttggtttattatagttgctctatgtttgtaaacagacaatctctaatgtctgattatttgtatcacagatctgcagctgccttggacttgaatccatgcaatgtttagagtgtgaagtcagttacttgttgatgttttcttactgtatcaatgaaatacatattgtcatgtcagttcttgccaggaacttctcaacaaaatggaattttttttttcagtatttcaataaatattgatatgcccagcctgataatttttaaaaaaaaaaaa

SEQ ID NO: 202 - protein, 495 aa, Homo sapiens
MSSNSDTGDLQESLKHGLTPIVSQFKMVNYSYDEDLEELCPVCGDKVSGYHYGLLTCESCKGFFKRTVQNNKRYTCIENQNCQIDKTQRKRCPYCRFQKCLSVGMKLEAVRADRMRGGRNKFGPMYKRDRALKQQKKALIRANGLKLEAMSQVIQAMPSDLTISSAIQNIHSASKGLPLNHAALPPTDYDRSPFVTSPISMTMPPHGSLQGYQTYGHFPSRAIKSEYPDPYTSSPESIMGYSYMDSYQTSSPASIPHLILELLKCEPDEPQVQAKIMAYLQQEQANRSKHEKLSTFGLMCKMADQTLFSIVEWARSSIFFRELKVDDQMKLLQNCWSELLILDHIYRQVVHGKEGSIFLVTGQQVDYSIIASQAGATLNNLMSHAQELVAKLRSLQFDQREFVCLKFLVLFSLDVKNLENFQLVEGVQEQVNAALLDYTMCNYPQQTEKFGQLLLRLPEIRAISMQAEEYLYYKHLNGDVPYNNLLIEMLHAKRA

SEQ ID NO: 203 - DNA, 5054 bp, Homo sapiens
aaaaagtacagagtccagggaaagacttgcttgtaactttatgaattctggatttttttttttcctttgctttttcttaactttcactaagggttactgtagtctgatgtgtccttcccaaggccacgaaatttgacaagctgcacttttcttttgctcaatgatttctgctttaagccaaagaactgcctataatttcactaagaatgtcttctaattcagatactggggatttacaagagtctttaaagcacggacttacacctattggtgctgggcttccggaccgacacggatcccccatccccgcccgcggtcgccttgtcatgctgcccaaagtggagacggaagccctgggactggctcgatcgcatggggaacagggccagatgccggaaaacatgcaagtgtctcaatttaaaatggtgaattactcctatgatgaagatctggaagagctttgtcccgtgtgtggagataaagtgtctgggtaccattatgggctcctcacctgtgaaagctgcaagggattttttaagcgaacagtccaaaataataaaaggtacacatgtatagaaaaccagaactgccaaattgacaaaacacagagaaagcgttgtccttactgtcgttttcaaaaatgtctaagtgttggaatgaagctagaagctgtaagggccgaccgaatgcgtggaggaaggaataagtttgggccaatgtacaagagagacagggccctgaagcaacagaaaaaagccctcatccgagccaatggacttaagctagaagccatgtctcaggtgatccaagctatgccctctgacctgaccatttcctctgcaattcaaaacatccactctgcctccaaaggcctacctctgaaccatgctgccttgcctcctacagactatgacagaagtccctttgtaacatcccccattagcatgacaatgccccctcacggcagcctgcaaggttaccaaacatatggccactttcctagccgggccatcaagtctgagtacccagacccctataccagctcacccgagtccataatgggctattcatatatggatagttaccagacgagctctccagcaagcatcccacatctgatactggaacttttgaagtgtgagccagatgagcctcaagtccaggctaaaatcatggcctatttgcagcaagagcaggctaaccgaagcaagcacgaaaagctgagcacctttgggcttatgtgcaaaatggcagatcaaactctcttctccattgtcgagtgggccaggagtagtatcttcttcagagaacttaaggttgatgaccaaatgaagctgcttcagaactgctggagtgagctcttaatcctcgaccacatttaccgacaagtggtacatggaaaggaaggatccatcttcctggttactgggcaacaagtggactattccataatagcatcacaagccggagccaccctcaacaacctcatgagtcatgcacaggagttagtggcaaaacttcgttctctccagtttgatcaacgagagttcgtatgtctgaaattcttggtgctctttagtttagatgtcaaaaaccttgaaaacttccagctggtagaaggtgtccaggaacaagtcaatgccgccctgctggactacacaatgtgtaactacccgcagcagacagagaaatttggacagctacttcttcgactacccgaaatccgggccatcagtatgcaggctgaagaatacctctactacaagcacctgaacggggatgtgccctataataaccttctcattgaaatgttgcatgccaaaagagcataagttacaacccctaggagctctgctttcaaaacaaaaagagattgggggagtggggagggggaagaagaacaggaagaaaaaaagtactctgaactgctccaagtaacgctaattaaaaacttgctttaaagatattgaatttaaaaaggcataataatcaaatacttaatagcaaataaatgatgtatcagggtatttgtattgcaaactgtgaatcaaaggcttcacagccccagaggattccatataaaagacattgtaatggagtggattgaactcacagatggataccaacacggtcagaagaaaaacggacagaacggttcttgtatatttaaactgatctccactatgaagaaatttaggaactaatcttattaattaggcttatacagcgggggatttgagcttacaggattcctccatggtaaagctgaactgaaacaattctcaagaatgcatcagctgtacctacaatagcccctccctcttcctttgaaggccccagcacctctgccctgtggtcaccgaatctgtactaaggacctgtgttcagccacacccagtggtagctccaccaaatcatgaacagcctaattttgagtgtctgtgtcttagacctgcaaacagctaataggaaattctattaatatgttagcttgccattttaaatatgttctgagggttgttttgtctcgtgttcatgatgttaagaaaatgcaggcagtatccctcatcttatgtaagtgtgaattaatattaagggaaatgactacaaactttcaaagcaaatgctccatagctaaagcaacttagaccttatttctgctactgttgctgaaatgtggctttggcattgttggatttcataaaaaatttctggcaggaagtcttgttagtatacatcagtctttttcatcatccaagtttgtagttcatttaaaaatacaacattaaacacattttgctaggatgtcaaatagtcacagttctaagtagttggaaacaaaattgacgcatgttaatctatgcaaagagaaaggaaaggatgaggtgatgtattgactcaaggttcattcttgctgcaattgaacatcctcaagagttgggatggaaatggtgatttttacatgtgtcctggaaagatattaaagtaattcaaatcttccccaaaggggaaaggaagagagtgatactgacctttttaagtcatagaccaaagtctgctgtagaacaaatatgggaggacaaagaatcgcaaattcttcaaatgactattatcagtattattaacatgcgatgccacaggtatgaaagtcttgccttatttcacaattttaaaaggtagctgtgcagatgtggatcaacatttgtttaaaataaagtattaatactttaaagtcaaataagatatagtgtttacattctttaggtcctgaggggcagggggatctgtgatataacaaaatagcaaaagcggtaatttccttaatgttatttttctgattggtaattatttttaacagtacttaattattctatgtcgtgagacactaaaatcaaaaacgggaatctcatttagactttaatttttttgagattatcggcggcacaatcactttgtagaaactgtaaaaaataaaagtatctcctagtcccttaattttttcataaatatttctggcttttgagtagtgtatttatattgtatatcatactttcaactgtagacaattatgatgctaatttattgtttcttggtttcacctttgtataagatatagccaagactgaagaaaccaaatatatgtgtttactgtagcatgtcttcaaattagtggaacttagttcagggacatagaagagtcttaatgaattaaaatcattcacttgattaaatgtctgtaaatcttcatcattcctactgtagtttatttaatatctattgtaaattatgtgacttgtagcttcctctggttttcaagtaaactcaacaaggtggagtcttacctggttttcctttccaagcattgtaaattgtataccaaagatattagttattacttctgtgtgtacaaagaggattattttattatgtttattaatcacctctaatactcatccacatgaagggtacacattaggtaagctgggcgttgactcatgcgcagtctcagtcacccgtgttatcttcgtggctcaaaggacaatgcaaaatcgccgatcagagctcatacccaaagcattacagagaacagcagcatcattgccctccccagctgaaaaacaagttggctagaagatacatggagaggaatggtgtggtcaacagttaatgaaacggttctatcatgcatgtgtaatgtggatggagacaattataagatttgactataactatttggagggtctttaacattgccaaaaaaacaaatatgttgatttttattttattttattttttattttaagaggcgggatcttgatctcacatgttgcccaggctggccttgaactcctgggctcaagcattcctcctgcctcagcctcccccatagctgggactaggggtgcatgccagcatacctggctacgttgactcttaaaatctatgttctcttattttaaagatacagtgctccccactgaaaattaaacctaaaaaatgtcacatattggtatgttgttaacctggtagattaaatcatgagaatgattagaaagacgggcaacacagcgggttacatccacactgctgatcacaccaacgacaggagctgataagcaagaaagcgtcacagccagcgtctgttcacccaaggttgacaagtgaagtttctctaatgttgattgttagccgatttgtaacctggcatttacttagcaactgccttatcaattacaggatttgccggtaaaagcagactcaaatataaaggtttttggcttaacttggtttattatagttgctctatgtttgtaaacagacaatctctaatgtctgattatttgtatcacagatctgcagctgccttggacttgaatccatgcaatgtttagagtgtgaagtcagttacttgttgatgttttcttactgtatcaatgaaatacatattgtcatgtcagttcttgccaggaacttctcaacaaaatggaattttttttttcagtatttcaataaatattgatatgcccagcctgataatttttaaaaaaaaaaaa

SEQ ID NO: 204 - protein, 541 aa, Homo sapiens
MSSNSDTGDLQESLKHGLTPIGAGLPDRHGSPIPARGRLVMLPKVETEALGLARSHGEQGQMPENMQVSQFKMVNYSYDEDLEELCPVCGDKVSGYHYGLLTCESCKGFFKRTVQNNKRYTCIENQNCQIDKTQRKRCPYCRFQKCLSVGMKLEAVRADRMRGGRNKFGPMYKRDRALKQQKKALIRANGLKLEAMSQVIQAMPSDLTISSAIQNIHSASKGLPLNHAALPPTDYDRSPFVTSPISMTMPPHGSLQGYQTYGHFPSRAIKSEYPDPYTSSPESIMGYSYMDSYQTSSPASIPHLILELLKCEPDEPQVQAKIMAYLQQEQANRSKHEKLSTFGLMCKMADQTLFSIVEWARSSIFFRELKVDDQMKLLQNCWSELLILDHIYRQVVHGKEGSIFLVTGQQVDYSIIASQAGATLNNLMSHAQELVAKLRSLQFDQREFVCLKFLVLFSLDVKNLENFQLVEGVQEQVNAALLDYTMCNYPQQTEKFGQLLLRLPEIRAISMQAEEYLYYKHLNGDVPYNNLLIEMLHAKRA

SEQ ID NO: 205 - DNA, 2422 bp, Homo sapiens
acttcggagccgagttggggcagcggtggagcggggacttcgcgcccccaggggaacgggcgcccctgcgaaaccgtcgccagccacgcgtccttgccgtccgacgccccctcacattggagaccccggatctctcccgcctccttcgggtcgctctccgctgtttcctctgccaccatgaggaacattttcaagaggaaccaggagcctattgtggctcctgccaccaccaccgccacgatgcccattggacccgtggacaactccactgagagtgggggtgctggggagagtcaggaggacatgtttgccaaactgaaggagaagttattcaatgagataaacaagattcccttaccaccctgggcactgatcgccattgctgtggttgctgggctcctgcttctcacctgctgcttctgcatctgcaagaaatgctgctgcaagaagaagaagaacaagaaggagaagggcaaaggcatgaagaatgccatgaacatgaaggacatgaaagggggtcaggatgacgacgacgcagagacaggcctgactgagggggaaggtgaaggggaggaggagaaagagccagagaacctgggcaaactgcagttttccctggactatgattttcaggctaatcagcttactgtgggcgttctgcaggctgctgaactgcctgccctggacatgggaggcacctcagacccttatgtcaaggtcttcctccttcctgacaagaagaagaaatatgagaccaaagtccatcggaagacactgaaccctgccttcaatgaaaccttcaccttcaaggtgccataccaggagcttgggggcaaaactctggtgatggccatctatgactttgaccgcttctccaaacatgacatcattggagaggtaaaggtgcctatgaacacagtggacctcggccagcccattgaggagtggagagacctgcaaggcggggaaaaggaggagccggagaagctgggcgacatctgcacctccctgcgctatgtgcccacggccgggaagctcactgtctgcatcctggaggctaagaacctcaagaagatggacgtgggcggcctttcagacccgtacgtgaagatccacctgatgcagaatggcaagaggctcaagaagaagaagacaaccgtgaagaagaagaccctgaacccatacttcaacgagtccttcagctttgagatccccttcgagcagattcagaaagtccaggtagtggtcaccgtgctggactatgacaagctgggcaagaacgaagccataggcaagatcttcgtgggcagcaatgccacgggcacagagctgcggcactggtccgacatgctggccaacccccggaggcccatcgcccagtggcactcgctcaagcctgaggaggaggtggatgcactcctgggcaagaacaagtagacagcagcggctgggaccccacacctttcacggacactgacaagatccagagctatcaatacctcagttatgcaaccttagaggttttcttttttctttcatttgttgggtggttgtgtccttgtttttccttgtttttctctttttaaagaccaacttccctttgatggctgtgtgaggagagtcccctaagaggtgaaagagaagcctggctctgttcacggtcccaggagctgtccttgctgcatgccctgtcacagttccctcgactctttcaaagcttcacatctgcctcaccccaagcgaggctctctactggcacaaacttgcagcagttcctgttttttgagccttctggaccaacaaaatggcagcacatcctgcttcctgacagggaaggcatcacagtggccaatgatcgtgtgtgtgtgtgtgtgtgtgtgtgtgtgtgtgtgtgtgtgtgtgtgtgtgtgtgtctttgagcatttctcttcattcctggaatgtgtgtgtgtgtgtgtctctttgagcatctctcttcattcctggaatgagccatggacagtaaagttgtgtgggaaaagaaggctctttggggaccctgacatgaagaagtccactaagtgggagatcttctctcatctatggcaaagtctcaggatcctgttcagatatcggggctttcatactcctgttggtggctatttgggaggcagcaagatgtgaagactggatgtgttcagaactaggaccaaacgatgccatcaaatacttcctcctgccagtcatggtttccccagaagtgtagttcctgggacattcatggatatgagctattcactagttgggtcagactaacagggactctcagtcccaaaatctcactcttattgacaataaatatcaaactatgaagaaacagaagtcccattaccagaaagaccaaaattaaactcctggatcttcaccccatccagtgggaaac

SEQ ID NO: 206 - protein, 419 aa, Homo sapiens
MRNIFKRNQEPIVAPATTTATMPIGPVDNSTESGGAGESQEDMFAKLKEKLFNEINKIPLPPWALIAIAVVAGLLLLTCCFCICKKCCCKKKKNKKEKGKGMKNAMNMKDMKGGQDDDDAETGLTEGEGEGEEEKEPENLGKLQFSLDYDFQANQLTVGVLQAAELPALDMGGTSDPYVKVFLLPDKKKKYETKVHRKTLNPAFNETFTFKVPYQELGGKTLVMAIYDFDRFSKHDIIGEVKVPMNTVDLGQPIEEWRDLQGGEKEEPEKLGDICTSLRYVPTAGKLTVCILEAKNLKKMDVGGLSDPYVKIHLMQNGKRLKKKKTTVKKKTLNPYFNESFSFEIPFEQIQKVQVVVTVLDYDKLGKNEAIGKIFVGSNATGTELRHWSDMLANPRRPIAQWHSLKPEEEVDALLGKNK

SEQ ID NO: 207 - DNA, 6393 bp, Homo sapiens
gtacaactcggacttgctgttgctcgagccgcgtctgcacgggtctcggaccgagcggagctcgcagcctcggtcccggagcccaccttcgcctcgcccttgcccagcctgcggtgatggaggcggccaccacactgcacccaggcccgcgcccggcgctgcccctcgggggcccgggcccgctgggcgagttcctgcctccacccgagtgcccggtcttcgaacccagctgggaagagttcgcggaccccttcgctttcatccacaagatccggcccatagccgagcagactggcatctgtaaggtgcggccgccgccggattggcagccaccatttgcatgtgatgttgataaacttcattttacgccacgtatccagagactgaatgaattggaggcccaaactcgtgtaaaattgaatttcttggaccagattgcaaagtactgggagttacagggaagtactctgaaaattccacatgtggagaggaagatcttggacttatttcagcttaataagttagttgcagaagaaggtggatttgcagttgtttgcaaggatagaaaatggaccaaaattgctaccaagatggggtttgctcctggcaaagcagtgggctcacatatcagagggcattatgaacgaattctcaacccctacaacttattcctgtccggagacagcctaaggtgtttgcagaagccaaacctgaccacagacactaaggacaaggagtacaaaccccatgatattccccagaggcagtctgtgcagccttcggaaacgtgccccccagcccgacgagcaaaacgcatgagagcagaggccatgaatattaaaatagaacccgaggagacaacggaagccagaactcataatctgagacgtcgaatgggttgtccaactccaaaatgtgaaaatgagaaagaaatgaagagtagcatcaagcaagaacctattgagaggaaagattatattgtagaaaatgagaaggaaaagcccaagagtcgatctaaaaaagccaccaatgctgtggacctgtatgtctgtcttttatgtggcagtggcaatgatgaagaccggctactgttgtgtgatggctgtgatgacagttaccataccttttgcttgatcccacctctccatgatgttcccaagggagactggaggtgtcctaagtgtttggctcaggaatgtagtaagccacaagaagcatttggctttgaacaagcagccagggactataccctccgtacttttggggaaatggcagatgcgttcaaatctgattacttcaacatgccagtccatatggtccccacagagcttgttgagaaagaattttggagactagtaagcactattgaggaggatgtcacagtggaatatggagctgacattgcctcaaaggaatttggcagtggctttcctgtccgagatgggaaaatcaaactctcacctgaggaagaggagtatcttgatagtggctggaatttgaacaacatgccagtgatggagcagtctgtccttgcacatattactgctgatatatgtggcatgaaacttccttggttgtatgtgggaatgtgcttttcttcattctgttggcacattgaagaccactggagctattcaattaactacttgcactggggtgagccaaaaacctggtatggagtcccagggtatgctgctgagcagctagaaaatgtaatgaagaaactagctccagaactctttgtgtcccagccggatctcctccatcagcttgtgaccatcatgaaccccaataccctgatgactcatgaagtgcctgtttaccgaactaatcagtgtgctggggagtttgtgattacatttccaagagcctaccacagtggttttaaccagggttttaattttgctgaggctgttaacttctgcactgttgattggctgccattaggccgacagtgtgtggagcattatcgcttgcttcatcgatattgtgtgttttcccacgatgagatgatctgcaagatggcttccaaggctgatgtattagatgttgtagtggcttcaactgttcagaaagacatggccattatgattgaggatgagaaagctttaagagaaactgtccgtaaattgggagtgattgattcggaaagaatggattttgagctgttgccagatgatgaacgtcagtgtgtaaaatgcaaaactacatgcttcatgtctgccatctcctgttcttgtaaacctggccttcttgtttgcctgcatcatgtaaaagaattgtgttcctgtcctccttacaaatataaattgcggtataggtacacgctggatgatctctaccctatgatgaatgcattgaagcttcgagcagaatcttacaacgaatgggccttgaatgtgaatgaagctttggaggcaaagatcaacaagaagaaaagccttgtcagcttcaaggctttaattgaagaatctgaaatgaagaaattcccagacaatgatcttttgcgacaccttcgcctagtcacacaggatgcagagaagtgtgcctctgttgcgcagcagttgcttaatggcaaaaggcaaactagatatcgatctggtggagggaaatcccaaaatcagttgacagtgaatgagctccggcagtttgtaacacagctgtatgctcttccatgtgtcctcagtcagacaccattactaaaggatctcttgaatcgtgtagaagattttcaacagcatagtcagaaactactctctgaggaaacgcctagtgctgcggagctgcaggacttgctagatgtcagctttgaatttgatgttgaacttccacagcttgctgagatgcgtatccgtttggaacaagcccgttggctagaagaggtgcagcaagcttgcctagaccccagctcccttactttagatgatatgagacgtctcatagacctaggggtagggctggccccgtattcagcagtggagaaagctatggcccggctgcaggaactgctcacagtgtcagagcactgggacgacaaagccaagagtctcctcaaggccaggccacgacattcattgaatagccttgctacggcagtaaaggaaatcgaagagatccctgcatatctgcccaatggtgcggctctgaaagactcagtgcagagagccagagactggcttcaggatgtagagggcctgcaggctggaggacgtgtgccagtgttagacacactcatagaacttgttacacgaggccgatctatccccgtacatctgaattctttgccaagactggaaaccctagtagctgaggttcaggcttggaaagaatgtgctgttaatacattcttgactgagaattctccatattctctcttagaggtgctgtgtcctcgatgtgatattggccttttgggattgaaaaggaagcagagaaagttaaaggagcccttgccaaatggaaagaaaaaaagcaccaaattagagagtctgagtgacctggagagagctttaactgaaagcaaggagactgcttcagctatggcaactcttggggaagctcgcctaagggaaatggaagccttgcagtctctcagactcgccaatgaagggaaattgctgtcgcctctccaagatgtggatataaaaatctgcctatgtcagaaggccccagctgcccctatgattcaatgtgaactctgcagggatgctttccacaccagttgtgtggcggtacccagtatttcacagggcctgcgaatctggctttgtccccattgtcggaggtcagagaaacctccattagagaaaattctgcccctgctcgcctcccttcagcgtatccgagttcgccttcctgagggagatgcacttcgatatatgattgaaagaaccgtgaactggcagcacagagcccagcaactgctttcgtcagggaatcttaaatttgtgcaagatcgagtgggctcaggactgttatatagcagatggcaagcctcagcaggacaggtgtcagacacaaacaaggtatctcaacctcctggcacaacatcattttctttgcctgatgactgggacaacagaacctcatatttgcactcccccttctcaactggacgaagttgtatccccctccatggtgttagtccagaagtgaatgaactattgatggaagcccagctgctccaggtatcccttcctgaaattcaggaactttaccagactttacttgcaaagccaagccctgctcagcagactgaccgaagctcaccagtgagacccagcagtgagaagaatgactgttgccgagggaagcgagatggaattaacagtcttgagagaaaactgaagagacgcctggaaagagagggcctctccagtgagcggtgggaacgagttaagaaaatgcggacccccaaaaagaagaaaatcaaactgagccaccccaaggacatgaacaatttcaagttagagagagagcgtagctatgaattagttcgttctgctgaaactcattccctgccctcagacacatcctattccgaacaggaagactctgaggatgaagatgccatctgcccagctgtgagctgcctgcagccagaaggagatgaggtggactgggtccagtgtgatggcagctgcaatcagtggtttcatcaggtctgtgttggtgtctccccagagatggcagagaaagaagactacatctgtgtgcgctgtactgtgaaggacgcaccaagccgaaagtaaaaacacaaaaacagatacccccctacttaatgtaattcaggactccaaccaagaggatttcttcaaatctcagcaaagctacaggactggtactcaagccagcctgtaaacggtgctatttctattccttatgggatcatttttccaggactctttgaagaaaagaaaaaacaactaaaaaaatttttgacactttttgtattttttccttaagagctatttgtggttgttgaggtttgaaaagctgactgttttttttgcaggggttcccaccaatttggaaggcattgaagcttgcaccttttcatgtacagcattaaaattttacctctctctgggatttaccagcttaagagtccaactcacttccagtgcccaaaagggcacccaccagaaattccagtaaatcctcatttgaggaagctctcccttgtttactctgttaccacattggggaaatttttaagtttttcactttgggagtttttgtttgtttcttcttttcctttatccacttttcttcttcctggtagactaggtttatttatctgagcaataacttctatgttggtttcagtggctggaattaaaacaaaacaaaacaaacttccaaacagtgtgttggtgctttagcgattgattgatgtacagaacacaaatgtctagtttctagtgtcactgatgaactagtgatgtagaaaagagacttctctgtaagtaattgccacagctgtattttggctttctccctgtcccttcctttctcccctattttttggtagcttgtatcaaatgttacagtttatattgtggaataaatccttcgtcctaacataacactaaatgctgattatttagagccattagagcacagcttcttctgcccctctactgttgcacagccagaaggggctgcttgcttttgcctctgcccaaccaggttgcagtagcagtggatgttagcctgcaaacaacattaggggattcttcttttgtgtcctgctctgtttggtgggccatatgcctacagccctcactaacaaagaacccctctgtcttcaaggactagaacctatctttaaagccgtgctcttttaaaataagctttctcagaatgttggcaaatcacttcaatcctcaaatcagtcttccttgtggaatgctgcctttattatatttgaattgacaggggaacttggtttagggttaagacgttggaaggaaatctaaggaaaattaatcctcacagaggtccgggtttagtatatgtcttgagaggagacttgtgaattcccagactctgcctcctggtttcctttctcatttctttctaactgtagctatcattactggctgtggatagcccatagctattttccttgcttttcttttttaaaggggtctgttctgcagtggagaagacattctggtgaccagacttttgcttaccttttcctattctgttgccaatttttgttttccccacattctatagccataaacctgaagatgagtaaaactggtgggtctttaataaaacaacaacaaaaacagcagtttgtgatatagcagaggtttaaatgtaccctccccttttatgcacttcaaataattaaatctctttaagaatgaaaaaaaaaaa

SEQ ID NO: 208 - protein, 1544 aa, Homo sapiens
MEAATTLHPGPRPALPLGGPGPLGEFLPPPECPVFEPSWEEFADPFAFIHKIRPIAEQTGICKVRPPPDWQPPFACDVDKLHFTPRIQRLNELEAQTRVKLNFLDQIAKYWELQGSTLKIPHVERKILDLFQLNKLVAEEGGFAVVCKDRKWTKIATKMGFAPGKAVGSHIRGHYERILNPYNLFLSGDSLRCLQKPNLTTDTKDKEYKPHDIPQRQSVQPSETCPPARRAKRMRAEAMNIKIEPEETTEARTHNLRRRMGCPTPKCENEKEMKSSIKQEPIERKDYIVENEKEKPKSRSKKATNAVDLYVCLLCGSGNDEDRLLLCDGCDDSYHTFCLIPPLHDVPKGDWRCPKCLAQECSKPQEAFGFEQAARDYTLRTFGEMADAFKSDYFNMPVHMVPTELVEKEFWRLVSTIEEDVTVEYGADIASKEFGSGFPVRDGKIKLSPEEEEYLDSGWNLNNMPVMEQSVLAHITADICGMKLPWLYVGMCFSSFCWHIEDHWSYSINYLHWGEPKTWYGVPGYAAEQLENVMKKLAPELFVSQPDLLHQLVTIMNPNTLMTHEVPVYRTNQCAGEFVITFPRAYHSGFNQGFNFAEAVNFCTVDWLPLGRQCVEHYRLLHRYCVFSHDEMICKMASKADVLDVVVASTVQKDMAIMIEDEKALRETVRKLGVIDSERMDFELLPDDERQCVKCKTTCFMSAISCSCKPGLLVCLHHVKELCSCPPYKYKLRYRYTLDDLYPMMNALKLRAESYNEWALNVNEALEAKINKKKSLVSFKALIEESEMKKFPDNDLLRHLRLVTQDAEKCASVAQQLLNGKRQTRYRSGGGKSQNQLTVNELRQFVTQLYALPCVLSQTPLLKDLLNRVEDFQQHSQKLLSEETPSAAELQDLLDVSFEFDVELPQLAEMRIRLEQARWLEEVQQACLDPSSLTLDDMRRLIDLGVGLAPYSAVEKAMARLQELLTVSEHWDDKAKSLLKARPRHSLNSLATAVKEIEEIPAYLPNGAALKDSVQRARDWLQDVEGLQAGGRVPVLDTLIELVTRGRSIPVHLNSLPRLETLVAEVQAWKECAVNTFLTENSPYSLLEVLCPRCDIGLLGLKRKQRKLKEPLPNGKKKSTKLESLSDLERALTESKETASAMATLGEARLREMEALQSLRLANEGKLLSPLQDVDIKICLCQKAPAAPMIQCELCRDAFHTSCVAVPSISQGLRIWLCPHCRRSEKPPLEKILPLLASLQRIRVRLPEGDALRYMIERTVNWQHRAQQLLSSGNLKFVQDRVGSGLLYSRWQASAGQVSDTNKVSQPPGTTSFSLPDDWDNRTSYLHSPFSTGRSCIPLHGVSPEVNELLMEAQLLQVSLPEIQELYQTLLAKPSPAQQTDRSSPVRPSSEKNDCCRGKRDGINSLERKLKRRLEREGLSSERWERVKKMRTPKKKKIKLSHPKDMNNFKLERERSYELVRSAETHSLPSDTSYSEQEDSEDEDAICPAVSCLQPEGDEVDWVQCDGSCNQWFHQVCVGVSPEMAEKEDYICVRCTVKDAPSRK

SEQ ID NO: 209 - DNA, 1300 bp, Homo sapiens
atgcggtgttccatcaggaaatgcttcatactctcagtgggcatcgtattcctgtggcccttcatcactttgaaaatccccaaggaaactgaagatgatcaaaatgtgatgactgtcaaaggccaatggggaatctcatcagtgcagcaaggggatggaagcagcctcttgtacacattggtctccctgttccgtgtttcttctaaggctgagcagaaacgtctcacggtgctggtccacctggcagattctgacctcacctggctcagagaaactcttgcccatatttcaagcctcttcagcccacagatcttgaaagggcagttgctactgatccatgcttcatccgatgcctaccccactgtggagagcatcagggatgaggcctttcatggcgaattctactccaagcagaacgtagatcatgccttcctcatgagctttgccacaaagttctctgattacttcctgttaatagaggacaatgtcttttttgcccccaactttgtcacccacattcattcaagggtgaccaccatgaagtccaactcgtgggtgctaatggagttctccaatatgggcttccttggcaaactcttccacagcagggacctcccactcctggcccatttcctccttctcttctacaaggagaaaccccttgacagcctgatttctcatttccatacgctcctggtccaggaaagcccaatcctctgcagacctttcctattctactgcagggtctcctacactgcctttgatcacaagcagaaggccacagcacttcagaaaaagaatgccgatggtcccaacaacccgcctggagctgtcttcactgatatgcaggtttccgatgtgcatttcccctgggaggcctacactctggatgagtcattcttttggacacacaacattagtataggaaaccacctgacagtgattctgaaccatccagcaaacctgagcagggtgcaagtgatgacgggctccattgtggaatgggaggtacgccctggagaaggggcaggtggagctgggctaccaacctgagggggtgccgcagcactgcaccagcttcgccttgctgggacatctttcggaggggcagatggatcagaagatacttctgaaaggtatggggtaccacgtgagctgtgtgaggctggtggtgaaagctggtcaggctggggggctcatgatcaggcatatctacctctgggagaaaaatgacaaatagcaagtggatcaatgctgaagataaatcagtagggggatgaaaaattaaaatcttaaagcc

SEQ ID NO: 210 - protein, 350 aa, Homo sapiens
MRCSIRKCFILSVGIVFLWPFITLKIPKETEDDQNVMTVKGQWGISSVQQGDGSSLLYTLVSLFRVSSKAEQKRLTVLVHLADSDLTWLRETLAHISSLFSPQILKGQLLLIHASSDAYPTVESIRDEAFHGEFYSKQNVDHAFLMSFATKFSDYFLLIEDNVFFAPNFVTHIHSRVTTMKSNSWVLMEFSNMGFLGKLFHSRDLPLLAHFLLLFYKEKPLDSLISHFHTLLVQESPILCRPFLFYCRVSYTAFDHKQKATALQKKNADGPNNPPGAVFTDMQVSDVHFPWEAYTLDESFFWTHNISIGNHLTVILNHPANLSRVQVMTGSIVEWEVRPGEGAGGAGLPT

SEQ ID NO: 211 - DNA, 2621 bp, Homo sapiens
ccttttttggcctcgacggcggcaacccagcctccctcctaacgccctccgcctttgggaccaaccaggggagctcaagttagtagcagccaaggagaggcgctgccttgccaagactaaaaagggaggggagaagagaggaaaaaagcaagaatcccccacccctctcccgggcggagggggcgggaagagcgcgtcctggccaagccgagtagtgtcttccactcggtgcgtctctctaggagccgcgcgggaaggatgctggtccgcaggggcgcgcgcgcagggcccaggatgccgcggggctggaccgcgctttgcttgctgagtttgctgccttctgggttcatgagtcttgacaacaacggtactgctaccccagagttacctacccagggaacattttcaaatgtttctacaaatgtatcctaccaagaaactacaacacctagtacccttggaagtaccagcctgcaccctgtgtctcaacatggcaatgaggccacaacaaacatcacagaaacgacagtcaaattcacatctacctctgtgataacctcagtttatggaaacacaaactcttctgtccagtcacagacctctgtaatcagcacagtgttcaccaccccagccaacgtttcaactccagagacaaccttgaagcctagcctgtcacctggaaatgtttcagacctttcaaccactagcactagccttgcaacatctcccactaaaccctatacatcatcttctcctatcctaagtgacatcaaggcagaaatcaaatgttcaggcatcagagaagtgaaattgactcagggcatctgcctggagcaaaataagacctccagctgtgcggagtttaagaaggacaggggagagggcctggcccgagtgctgtgtggggaggagcaggctgatgctgatgctggggcccaggtatgctccctgctccttgcccagtctgaggtgaggcctcagtgtctactgctggtcttggccaacagaacagaaatttccagcaaactccaacttatgaaaaagcaccaatctgacctgaaaaagctggggatcctagatttcactgagcaagatgttgcaagccaccagagctattcccaaaagaccctgattgcactggtcacctcgggagccctgctggctgtcttgggcatcactggctatttcctgatgaatcgccgcagctggagccccacaggagaaaggctgggcgaagacccttattacacggaaaacggtggaggccagggctatagctcaggacctgggacctcccctgaggctcagggaaaggccagtgtgaaccgaggggctcaggaaaacgggaccggccaggccacctccagaaacggccattcagcaagacaacacgtggtggctgataccgaattgtgactcggctaggtggggcaaggctgggcagtgtccgagagagcacccctctctgcatctgaccacgtgctacccccatgctggaggtgacatctcttacgcccaacccttccccactgcacacacctcagaggctgttcttggggccctacaccttgaggaggggcaggtaaactcctgtcctttacacattcggctccctggagccagactctggtcttctttgggtaaacgtgtgacgggggaaagccaaggtctggagaagctcccaggaacaatcgatggccttgcagcactcacacaggacccccttcccctaccccctcctctctgccgcaatacaggaacccccaggggaaagatgagcttttctaggctacaattttctcccaggaagctttgatttttaccgtttcttccctgtattttctttctctactttgaggaaaccaaagtaaccttttgcacctgctctcttgtaatgatatagccagaaaaacgtgttgccttgaaccacttccctcatctctcctccaagacactgtggacttggtcaccagctcctcccttgttctctaagttccactgagctccatgtgccccctctaccatttgcagagtcctgcacagttttctggctggagcctagaacaggcctcccaagttttaggacaaacagctcagttctagtctctctggggccacacagaaactctttttgggctcctttttctccctctggatcaaagtaggcaggaccatgggaccaggtcttggagctgagcctctcacctgtactcttccgaaaaatcctcttcctctgaggctggatcctagccttatcctctgatctccatggcttcctcctccctcctgccgactcctgggttgagctgttgcctcagtcccccaacagatgcttttctgtctctgcctccctcaccctgagccccttccttgctctgcacccccatatggtcatagcccagatcagctcctaacccttatcaccagctgcctcttctgtgggtgacccaggtccttgtttgctgttgatttctttccagaggggttgagcagggatcctggtttcaatgacggttggaaatagaaatttccagagaagagagtattgggtagatattttttctgaatacaaagtgatgtgtttaaatactgcaattaaagtgatactgaaacacaaaaaa

SEQ ID NO: 212 - protein, 385 aa, Homo sapiens
MLVRRGARAGPRMPRGWTALCLLSLLPSGFMSLDNNGTATPELPTQGTFSNVSTNVSYQETTTPSTLGSTSLHPVSQHGNEATTNITETTVKFTSTSVITSVYGNTNSSVQSQTSVISTVFTTPANVSTPETTLKPSLSPGNVSDLSTTSTSLATSPTKPYTSSSPILSDIKAEIKCSGIREVKLTQGICLEQNKTSSCAEFKKDRGEGLARVLCGEEQADADAGAQVCSLLLAQSEVRPQCLLLVLANRTEISSKLQLMKKHQSDLKKLGILDFTEQDVASHQSYSQKTLIALVTSGALLAVLGITGYFLMNRRSWSPTGERLGEDPYYTENGGGQGYSSGPGTSPEAQGKASVNRGAQENGTGQATSRNGHSARQHVVADTEL

SEQ ID NO: 213 - DNA, 2816 bp, Homo sapiens
ccttttttggcctcgacggcggcaacccagcctccctcctaacgccctccgcctttgggaccaaccaggggagctcaagttagtagcagccaaggagaggcgctgccttgccaagactaaaaagggaggggagaagagaggaaaaaagcaagaatcccccacccctctcccgggcggagggggcgggaagagcgcgtcctggccaagccgagtagtgtcttccactcggtgcgtctctctaggagccgcgcgggaaggatgctggtccgcaggggcgcgcgcgcagggcccaggatgccgcggggctggaccgcgctttgcttgctgagtttgctgccttctgggttcatgagtcttgacaacaacggtactgctaccccagagttacctacccagggaacattttcaaatgtttctacaaatgtatcctaccaagaaactacaacacctagtacccttggaagtaccagcctgcaccctgtgtctcaacatggcaatgaggccacaacaaacatcacagaaacgacagtcaaattcacatctacctctgtgataacctcagtttatggaaacacaaactcttctgtccagtcacagacctctgtaatcagcacagtgttcaccaccccagccaacgtttcaactccagagacaaccttgaagcctagcctgtcacctggaaatgtttcagacctttcaaccactagcactagccttgcaacatctcccactaaaccctatacatcatcttctcctatcctaagtgacatcaaggcagaaatcaaatgttcaggcatcagagaagtgaaattgactcagggcatctgcctggagcaaaataagacctccagctgtgcggagtttaagaaggacaggggagagggcctggcccgagtgctgtgtggggaggagcaggctgatgctgatgctggggcccaggtatgctccctgctccttgcccagtctgaggtgaggcctcagtgtctactgctggtcttggccaacagaacagaaatttccagcaaactccaacttatgaaaaagcaccaatctgacctgaaaaagctggggatcctagatttcactgagcaagatgttgcaagccaccagagctattcccaaaagaccctgattgcactggtcacctcgggagccctgctggctgtcttgggcatcactggctatttcctgatgaatcgccgcagctggagccccacaggagaaaggctggagctggaaccctgaccactcttcaggaagaaaggagtctgcacatgcagctgcaccctccctccgatccttcctcccacctccccctcccccttctcccacccctgcccccacttcctgtttgggcccctctcccatccagtgtctcacagccctgcttaccagataatgctactttatttatacactgtctagggcgaagacccttattacacggaaaacggtggaggccagggctatagctcaggacctgggacctcccctgaggctcagggaaaggccagtgtgaaccgaggggctcaggaaaacgggaccggccaggccacctccagaaacggccattcagcaagacaacacgtggtggctgataccgaattgtgactcggctaggtggggcaaggctgggcagtgtccgagagagcacccctctctgcatctgaccacgtgctacccccatgctggaggtgacatctcttacgcccaacccttccccactgcacacacctcagaggctgttcttggggccctacaccttgaggaggggcaggtaaactcctgtcctttacacattcggctccctggagccagactctggtcttctttgggtaaacgtgtgacgggggaaagccaaggtctggagaagctcccaggaacaatcgatggccttgcagcactcacacaggacccccttcccctaccccctcctctctgccgcaatacaggaacccccaggggaaagatgagcttttctaggctacaattttctcccaggaagctttgatttttaccgtttcttccctgtattttctttctctactttgaggaaaccaaagtaaccttttgcacctgctctcttgtaatgatatagccagaaaaacgtgttgccttgaaccacttccctcatctctcctccaagacactgtggacttggtcaccagctcctcccttgttctctaagttccactgagctccatgtgccccctctaccatttgcagagtcctgcacagttttctggctggagcctagaacaggcctcccaagttttaggacaaacagctcagttctagtctctctggggccacacagaaactctttttgggctcctttttctccctctggatcaaagtaggcaggaccatgggaccaggtcttggagctgagcctctcacctgtactcttccgaaaaatcctcttcctctgaggctggatcctagccttatcctctgatctccatggcttcctcctccctcctgccgactcctgggttgagctgttgcctcagtcccccaacagatgcttttctgtctctgcctccctcaccctgagccccttccttgctctgcacccccatatggtcatagcccagatcagctcctaacccttatcaccagctgcctcttctgtgggtgacccaggtccttgtttgctgttgatttctttccagaggggttgagcagggatcctggtttcaatgacggttggaaatagaaatttccagagaagagagtattgggtagatattttttctgaatacaaagtgatgtgtttaaatactgcaattaaagtgatactgaaacacaaaaaa

SEQ ID NO: 214 - protein, 328 aa, Homo sapiens
MLVRRGARAGPRMPRGWTALCLLSLLPSGFMSLDNNGTATPELPTQGTFSNVSTNVSYQETTTPSTLGSTSLHPVSQHGNEATTNITETTVKFTSTSVITSVYGNTNSSVQSQTSVISTVFTTPANVSTPETTLKPSLSPGNVSDLSTTSTSLATSPTKPYTSSSPILSDIKAEIKCSGIREVKLTQGICLEQNKTSSCAEFKKDRGEGLARVLCGEEQADADAGAQVCSLLLAQSEVRPQCLLLVLANRTEISSKLQLMKKHQSDLKKLGILDFTEQDVASHQSYSQKTLIALVTSGALLAVLGITGYFLMNRRSWSPTGERLELEP

SEQ ID NO: 215 - DNA, 2197 bp, Homo sapiens
atgcccaattataactcggcccccaggcctgcgttcagtgaggcctcccgtggcgtcagcatgttcgtgtggaggaatgtggaaggtcactctgtggccgtgttcccctggtactccatccccttcctgacccctccctgcagccacatgaggcccagcaacctgccagtcactcagtggcctccaaccagagaaaacaacctgccaagttggcagctgttgctcataagcgtccaccaggtgggacagggagtgttgaccctgggcggccccctggagccacctgccctgaaagcccagggcccgcaaccccacacactttgggggtggtggaacctggtaaaagctcacctcccaccacagaggaggagccctgggcccctcaggggagtccctgctggacagtgacacagagaatgaccatgatgatgctttcctctccatcatgtctcctgacacccagttgcctctaccactcagatgatgtcaggcccagtccctcagtgcctgcgcaaggaacaggactcatcttctgagaaggatggacgcagccccaacaaatgggacaaggaccacatccggtggcccatgagtgccggtcatgatcttcagcaagcggcaccaggccctggcagggcgcaccagggtcaccccaaccactataaccggaccatcagccagatgctgagcgagcggtggtacaccctggggcccaatgagacgcagaaataccacgacctggccttccaggtgaaggtggcccacttgcaacaaggaccgaaagaagtccagctcagaggccaagcccacaagccaggggctagcaggagtgtaacaagggctcgtgggagcggagcatatcagagacaggcactgccactgcccctggggtgtcctctgaactcctgtcagttgcagcccaaacactccagagctcggataccaaggagcagcttctgtggggcagaacggctgcacacagtcaggaaacctggctcagcctggcccaagccttctcccacagcggggtacacagcctggacggcagggaaatagaccgtcaggcactacgggaactgacacaggtggtgtctggcactgcatcatactctggcccaaagccttctactcagcatggagctccaggccactttgcagcccctggtgagggaggtgacccgtgggcagccctgctgctgcccacctgagctgctcattcccagcacatggccagtgaggacatagcgagtgacgaggagcacacggtcatccatgaggaggagggggtgatgatgtcattgctgatgatggctttagcaccactgacaccgatctcaagttcaaggagtgggtgaccgactgagagtggggacaactctggggaggagccagagggcaacaagggctttggtgggaaggtatttgcacctgtcattccttcctcctttactcctgccgccccttgctggatcctgagcccccagggtcccccgatccacctgcagcttttggcaaagtctatggtcccaccctgtcctcctcctacacatactcggatgcttcctcctcaaccttggcacccacctccttcttactgggcccaggagccttcaaagcccaggagtctggtcaaggcagcagagcgggccccctatgacccctacccctggggatgggggcccagggacgccttccaaggtgacctgtttcctcccaatggatcctgccaccttctggtgcaagagaccagaaagtgtgggcgacctggagctaccaggctcctcagtcatcagggtccctcccaacactaagggtcagggcagagggaaccccacggacatggattcccccacactggaggaccccaccacgcccagatgcaagatgagaagatgctccagctgcagtccaaagcccaacacccccaagtgtgccatgtgtgatggggacagcttcccctttgcctgtacaggtggagaagccgaggacaggctcagggaaccggagaccgagaagccagtgccggccctgatcatgcagctcttccaggcccactgcttcttcctgtccactaggccacagttgccctccaggcccactatgcacacatcttcccctccaaggtttgttctgcccctgccctgactcccagccctgtgggggtcctgaccggacctcacctggctcagactcttga

SEQ ID NO: 216 - DNA, 4459 bp, Homo sapiens
ttgtgttttttgtagagacgaggtttcaccatgtttcccagactgttctgaaactcctgagctcaaagcagtccacccaccttggcctcccaaagtgctgggattacaggtgtgagccatcttgctcattctagtttaaacttttgagtggtttgtgtctcctgattggactcctacaaatacagaattgatgctaggaagggtaccaggagatagacgcacacagatgggatttgggaataggtttggttatccaaggagcagtgctgagctccttgctaatgggatatgggaggctggtgatttccagaaagtgacctcacaatgactcaagctaccacatactgttgattgtgaaatgccagttgaagcatatgtcctgcgagcttaggggtgctacaagttgaccacagcagcagtaaagatgactctgaagaatggcatgggatggatcctttcgaatgcatttgagcagcggtctccaaccacagggccacagagctggagctggatctaccatgaaagacttctgaatccaggaagagagactgactgggcaacatgttattcaggtgggaccatccagttgcaggaaaacaagcttaacatgcccactgattctacattatgctcctacctcccggcagcctctccaggcccagaactttctccagtcagcctctacagaccaagctcatgactcacaatggcctatttaggcccataccctacctcacggcagtctccgcagatgagcctactgcctcacaacagcctccacaggcacagctccatcgttacaatggcctctttagacccagctcctgcctcccagccttctctccaggccctgaactttctcaagtcgacctcaccaggcccagttcatgcttctttgcagcctctccaggcccagctcctgcatcttggtggcccctccaggcccagcctctgcctcccgtcggcctctacagtcccaacatctgcctcacagcagattcttcaggcccagcatctgcctcactgtggaccccccaagccaagctcccaacctttcagcagcttctacacacccagctcctgccacccagtggcctctctaggccaagctcatgcttcacaagggcctttgcaggcccaacttttgtctcatggcaaccttccctggccagattcctgcttgtctcccagcagcctagacaggcccaggtcttgcctcacactggcctctctacatccagctcatgcctcacgttggcctctccaggcccaactcctgtcccaggacgtcatctccgggcccaaaacttactcaagtcagactctctggtcccaactgctgccttctggtggcctatgaaggcccaaaatctcctcaagttgacctctccaggcccagctcctgcctcctgtcagcatctacaggcccaacctctgcctcatggggtcttctccaggcccacctcttcctcttggctgggtctacaggcacaactgctgcctcacaacagccttttttggcccagttcctgtccagctcatggcggccaatgtaggcccaaaacttcctcaagtcaaactctccaggcccaccttctgcttcccggtggcatgaacaggcccagctttgacttgagaacagcctctgcaggccctgctcttgcctcccaggggctttttccaggcccagctcttgcctcatggcagctgcccgaggccaaatttctgcttgcctgccagcagcctcaacaggcacagctcctccctcacagtggcccatttagtcccaactcatgactgtcgggccatttccaggcctagtgcctgcctcgtggctgactcttgaagcccaaaacttcctcaaatcagccttttgcccaacttctgtctactgtcggactctacaggccagcctctgcctcacagtggaccctccagacccagatggtgtctcactgtggcatcctcaggtgaagctcctgcctttctgcagcctctacaggcccagctcctgccttgcagtggcctctttaggccaagctcatgccccatggcgacttttccaggcacagcttttgccttttgcagcctgtccaggcccagaatgtccttaactcagcatctccaggacgagctcatcctcccagtgcgtctacaggcccgtctcctgcctcacaacctcctttggcccaactcctgctgagcagctggcagcctctctaggccacagacttcttaaggtaaagcttttcaggcccacctttggcctcccggcagcctcagcaatcaaactattccctcactgcggccaccgaaagccaagtttctccctgcctcacggcatcctccgaaaactgagcatttgcctcacggtggcctccccaggccacgaatctgcctgcctcccaggcagctgctgcctcacaatggtctctttaggcccagttcatgctaaaagatggactctccaggcacagctcttgcctcctggcagcctctgcaggcccaaattctccaaaagatggcctctcctaactcagctcctgcctcatgtcggcctacacaggcccagactcttaccacacagtagaccctccaggcccaccacttgcctgatcatagcctcctaaggccaagctcctgcctttcggcagcctctacaggccaagctcctgcctcgcaattgcctttgtaggccaagatcatgccgtgaagtggcctttcctagcctaacttttgctttttgatgcatactccagtcccaaaacttcctccagtcagccggtccaggccaagctcttcctcccaaaggcttctgcaggccaaaatcgtcgtgaagtcaccctctgcaggcctagctcctgcgtccgagtgctgtgtaggccaagctaatgcctcacagcacacttttgaggctgagcgtttccttttgtgcatcctctccaagccctgaacttactccagttggcctctccagaccaagctctccctcccagtggcctctacaggccaaaattgtcctcaggtcagcctctccagggccaactcctagctaccggtggcttctgcggccaaaatcgacctcaagtcagcctcttcacacccagctcttgcctctgagtggcctctccaggagcaaaactttctcaagtcggcctctccatgcccagcctcctgcttcccgagggcatgtacaggcccagcctctgcctcacagcagactcttcacacccagctcttccctgtctgcggcctctccagtccaaagctgctcctgccttttggcagcttgtacaggtccagctcctccctcacggtgacctctttcggcccaactcatgcctcttgcaacgtgccgaagtgtcagctcctgcctcacactggcctgttgaggcccagctcatgcctctcgtggcctcaacgggcccatcccctccctgttggcggcctctacaggcccggcctctacctcacagtgggctctccaggcccacctcttcctcaccctggcctcctggggcaatgctcctccctctcgggagcctctgcgggcccagctcctgcctcccagtggcctctgtaggccaagcccgtgcctcagggcagactttccaggcctagcgtttgctgctttgcatcttctccaggccctggacttcctccagtcggcctctccaggcccagctcttcctctcagcgcctctgcaggcccagactgttgtcaagtcggcctccccaggcccagctccggcctctcggcggcctctctggatgcaaaagttcctcgagtcagcctctccaggcccagctcctcctgcctcccagtggcctctttcagcccagcccagctcatgcctcctggcggccttcccaggccctgcttttgacttttggtggcctctgcaggcctcgacaaggcccggcctcctgcctcccgaaggcctgcacaggcccagcctctgcctcacagcagactctccacgcccagctagctctcgcctcactgcggcctcccgagtccaaagctcctgcctctcggccgcttcggcaggcccagctcctgcctgccagtggcctcttcaggcccatggggctcattcctcacaacggcctttccaggcccagtttttcccttccggtggcctctccgggcccagaacctcctcaagtcggcctctccagacccacttgcaccctccgggcgtcctctccggacccagctcttcctcacggctgcgtctccaggcccgactcctgcctctcaacaacctctttggactcagtgcctacccatctcctggcggccttggtcggcccacagcttcctcaagccaagctccccaggcccaggtcaggcctcacggtggcctctccaggatgagctcctgccctccgatggcatctgcaggccccaaatggtctccggtcggtgggctcctccatgccaagcttgggcctc

SEQ ID NO: 217 - protein, 91 aa, Homo sapiens
MTLKNGMGWILSNAFEQRSPTTGPQSWSWIYHERLLNPGRETDWATCYSGGTIQLQENKLNMPTDSTLCSYLPAASPGPELSPVSLYRPSS

SEQ ID NO: 218 - DNA, 635 bp, Homo sapiens
tggggaacggaaaatgagggagttcaactctggccctcacaatccagtggaggagacgaaactcatctgcctctgtccctctgggcacgcctcatgccaggtgcatctgtggacaggggccatgctcctgggcttccaaagttggagaaagctgccaggctcagagccacctaagctgaagattcccttgagaacaagtactgtcctgcggtttcatggcctttcttccatttgtggttcttgcgaagtggaatttaaatgacatcttatcaagatggataaaccctagtttcccagtgctggaatatagaaaatggatggacaagtaaatcccactcagcacccatagtccaggcatggggacctcaacacacctgagccccagacatcacctttcattgtgagtagctctgagatgacacttctgctgttcccaattccagcattaattggattagatagttattttatgaagaattttcatatgccacaatcctgaccatatcttcaagtgaacagaaaaattctattaaaaagtcaaccttctgtctcactctgttgcccagactggagtgcagtggtgcaattatggctcacagcagcctcaacctcctgggctcaagcaatcctcctgc

SEQ ID NO: 219 - protein, 82 aa, Homo sapiens
MREFNSGPHNPVEETKLICLCPSGHASCQVHLWTGAMLLGFQSWRKLPGSEPPKLKIPLRTSTVLRFHGLSSICGSCEVEFK

SEQ ID NO: 220 - DNA, 2514 bp, Homo sapiens
gcagagcagggaagccaacctgagcaaacacagcagcccgagtgttcccaaggccaaaatgctgagaacgtccactcctaatctgtgtggtggtctgcattgccgggccccctggctctcttctggcattctctgcctctgcctcatattcttgttaggccaggtgggcttgctgcagggacacccccagtgcctggattacgggccccctttccagccccctctgcaccttgagttttgctctgactatgagtccttcggctgctgtgatcagcacaaggaccgccgcatcgctgcccggtactgggacatcatggaatattttgatctgaagagacatgagctgtgtggagattacattaaagacatcctttgccaggagtgctcgccctacgcagcccacctctacgacgccgaaaacacccagacgcctctccggaatctcccgggcctctgctctgattactgctctgccttccattctaactgtcactcagccatttccctgctgaccaatgaccgcggcctccaggagtctcatggaagggacggtacccgcttctgccacctcctggaccttcctgacaaggactattgcttccctaatgtcctgaggaacgactatctcaaccgccacctgggcatggtggcccaagatcctcagggctgcctgcagctctgcctgagcgaggtggccaacgggctgaggaaccccgtctccatggtccatgctggggacggcacccatcgcttctttgttgccgagcaggtaggagtggtgtgggtctacctccctgatgggagtcgcctggagcaacccttcctggacctcaagaacatcgtgttgaccaccccatggatcggggatgagagaggcttcttggggttggcttttcaccccaaattccgccacaatcgcaagttctatatttattattcgtgcctggacaagaagaaggtagaaaagatccgaattagtgagatgaaggtttctcgggctgatcctaacaaagctgacctgaaatcagagagggtcatcttggagattgaagaaccagcctcaaaccataatggcggacaacttctttttggcctggatggctatatgtacatattcactggggacgggggacaggctggagatccctttggcctgtttggaaatgctcagaacaaaagttccctgctgggaaaagttttaaggatcgatgtgaacagggcaggctcacatggcaagcggtaccgagtcccctcggacaatccatttgtttctgagccaggggcccaccccgccatctatgcctatgggatcaggaacatgtggcgttgtgctgtggaccgaggggaccccatcacgcgccagggccgaggccggatattctgtggggacgtgggccagaacaggtttgaagaggttgacctcattttgaaaggtggaaactatggctggagagcaaaggaagggtttgcatgttatgacaaaaaactttgtcacaatgcctctttggatgatgttctgccaatctatgcttatggccatgcagtggggaagtcagtcactggaggttatgtctatcgtggttgtgaatccccaaatctcaatggcctgtatatctttggagacttcatgagtggtcgacttatggctttgcaggaagatagaaaaaacaagaaatggaagaagcaggatctttgcctgggcagcaccacgtcctgtgccttcccagggctgatcagcacccatagcaagttcatcatctcctttgctgaagatgaagcaggggagctgtatttcctggcgacctcttacccaagtgcctatgcaccacgtggatctatttacaagtttgttgacccctcaaggcgagcacccccaggcaagtgcaaatacaagccagtgcccgtgagaaccaagagtaagcggatcccgttcagaccactcgccaagacagtcttggacttgctaaaggaacaatcagagaaagctgctagaaaatcttccagtgcaaccttagcttctggcccagcccagggtttgtctgagaaaggctcctccaagaagctggcttctcctacaagcagcaagaatacattgcgagggcctggtacaaagaagaaagccagagtggggccccacgtccgccagggcaagaggaggaagagcctgaaaagccacagtggcaggatgaggccatcagcagagcagaagcgagctggcagaagtctcccttgacctattggtcaaggtggccgacagggtgacgtgagagaggagagccacctcatcaaatgaaagtcactgctgaataaagaccttagaagtctgggaagccagggtagaggtggggcagggcggttttcctctccctgggaaatcttgctgtctactgaataaataaatgcaccttctctgtatgcagtgcttctgtgggagaccatatcccagattgctggtgcacctgggttatggtaagcactagtccatgagcctgcttggaatcacaaaaaaaaaaa

SEQ ID NO: 221 - protein, 529 aa, Homo sapiens
MVAQDPQGCLQLCLSEVANGLRNPVSMVHAGDGTHRFFVAEQVGVVWVYLPDGSRLEQPFLDLKNIVLTTPWIGDERGFLGLAFHPKFRHNRKFYIYYSCLDKKKVEKIRISEMKVSRADPNKADLKSERVILEIEEPASNHNGGQLLFGLDGYMYIFTGDGGQAGDPFGLFGNAQNKSSLLGKVLRIDVNRAGSHGKRYRVPSDNPFVSEPGAHPAIYAYGIRNMWRCAVDRGDPITRQGRGRIFCGDVGQNRFEEVDLILKGGNYGWRAKEGFACYDKKLCHNASLDDVLPIYAYGHAVGKSVTGGYVYRGCESPNLNGLYIFGDFMSGRLMALQEDRKNKKWKKQDLCLGSTTSCAFPGLISTHSKFIISFAEDEAGELYFLATSYPSAYAPRGSIYKFVDPSRRAPPGKCKYKPVPVRTKSKRIPFRPLAKTVLDLLKEQSEKAARKSSSATLASGPAQGLSEKGSSKKLASPTSSKNTLRGPGTKKKARVGPHVRQGKRRKSLKSHSGRMRPSAEQKRAGRSLP

SEQ ID NO: 222 - DNA, 1893 bp, Homo sapiens
gccaacgatacgcctgctgcagcaggaggagttacgagccgggccgcgcgctgcctaaatacctaaaccaggtttagcgcctgctcatataaagctctcctaactcgtcttccggtgggaatttcttcacgtgggccggagtcggagactgagtttagctttactgaggagctctaaatttaggcgggtatgagtgatttcagtgaagaattaaaagggcctgtgacagatgatgaagaagtggaaacatctgtgctcagtggtgcaggaatgcattttccttggcttcaaacatacgtagaaactgtggccattggagggaaaaggaggaaggattttgctcagacaacaagtgcttgtttaagttttatccaagaagctctgctgaagcaccaatggcagcaagctgcagaatacatgtacagttattttcagaccttggaagattcagatagctacaaaaggcaggctgcacctgagattatttggaagctcggaagtgaaattctattttatcatcccaaaagcaacatggagagtttcaatacttttgctaaccggatgaaaaatattggcgtcatgaattatttaaagatctccttacaacatgcattataccttctgcatcatggaatgcttaaagatgctaagagaaatctgagtgaggcagagacatggagacatggtgaaaatacgtcttcccgggaaatattaatcaaccttattcaggcctataaagggcttttacagtattatacctggtctgaaaagaagatggaattgtcaaagcttgataaggatgattatgcttacaatgcagtagcccaggatgtgttcaaccacagctggaagacatctgcaaatatttctgcattgattaaaattcctggagtttgggacccttttgtgaagagttatgtagaaatgctggaattctatggggatcgagatggagcccaagaggtactcaccaattatgcatatgatgaaaagtttccatcaaatccaaatgcccatatctacttatacaactttctaaagagacagaaggcaccaagatcaaaattgataagtgtgcttaagattttgtatcagattgtaccatctcataaattgatgttggaattccatacattacttagaaaatcagaaaaagaagaacaccgtaaactggggttggaggtattatttggagtcttagattttgccggatgcactaagaatataactgcttggaaatacttggcaaaatatctgaaaaatatcttaatgggaaaccaccttgcgtgggttcaagaagagtggaactccaggaaaaactggtggccaggctttcatttcagctacttttgggcaaaaagtgattggaaggaagatacagctttggcctgtgagaaagcttttgtggctggtttactgttaggaaaaggttgtagatatttccggtatattttaaagcaagatcaccaaatcttagggaagaaaattaagcggatgaagagatctgtgaaaaaatacagtattgtaaatccaagactctgatactgaattttagttatttcacagttgtagctacacagtaagtagcttggtagatagttattgaatgtatttatgtagtgtattaagaagcttatattactacaaaaaacttatttttatatatttttatatttttgtattatttatagctagagaaacaatattactgcctttgctctttgtaactatgtctgttttcttttttgtaatgttaaatgttacatttgttaaggaataattcttcaaatgacaaactaattacagaatatagctctacagcagttattgtttgcaaatactttgcctcttgctattgtgtaataaactgtaacttgtaaaaaaaaaaaaaaa

SEQ ID NO: 223 - protein, 450 aa, Homo sapiens
MSDFSEELKGPVTDDEEVETSVLSGAGMHFPWLQTYVETVAIGGKRRKDFAQTTSACLSFIQEALLKHQWQQAAEYMYSYFQTLEDSDSYKRQAAPEIIWKLGSEILFYHPKSNMESFNTFANRMKNIGVMNYLKISLQHALYLLHHGMLKDAKRNLSEAETWRHGENTSSREILINLIQAYKGLLQYYTWSEKKMELSKLDKDDYAYNAVAQDVFNHSWKTSANISALIKIPGVWDPFVKSYVEMLEFYGDRDGAQEVLTNYAYDEKFPSNPNAHIYLYNFLKRQKAPRSKLISVLKILYQIVPSHKLMLEFHTLLRKSEKEEHRKLGLEVLFGVLDFAGCTKNITAWKYLAKYLKNILMGNHLAWVQEEWNSRKNWWPGFHFSYFWAKSDWKEDTALACEKAFVAGLLLGKGCRYFRYILKQDHQILGKKIKRMKRSVKKYSIVNPRL

SEQ ID NO: 224 - DNA, 1723 bp, Homo sapiens
gccaacgatacgcctgctgcagcaggaggagttacgagccgggccgcgcgctgcctaaatacctaaaccaggtttagcgcctgctcatataaagctctcctaactcgtcttccggtgggaatttcttcacgtgggccggagtcggagactgagtttagctttactgaggagctctaaatttaggcgggtatgagtgatttcagtgaagaattaaaagggcctgtgacagatgatgaagaagtggaaacatctgtgctcagtggtgcaggaatgcattttccttggcttcaaacatacgtagaaactgtggattatttggaagctcggaagtgaaattctattttatcatcccaaaagcaacatggagagtttcaatacttttgctaaccggatgaaaaatattggcgtcatgaattatttaaagatctccttacaacatgcattataccttctgcatcatggaatgcttaaagatgctaagagaaatctgagtgaggcagagacatggagacatggtgaaaatacgtcttcccgggaaatattaatcaaccttattcaggcctataaagggcttttacagtattatacctggtctgaaaagaagatggaattgtcaaagcttgataaggatgattatgcttacaatgcagtagcccaggatgtgttcaaccacagctggaagacatctgcaaatatttctgcattgattaaaattcctggagtttgggacccttttgtgaagagttatgtagaaatgctggaattctatggggatcgagatggagcccaagaggtactcaccaattatgcatatgatgaaaagtttccatcaaatccaaatgcccatatctacttatacaactttctaaagagacagaaggcaccaagatcaaaattgataagtgtgcttaagattttgtatcagattgtaccatctcataaattgatgttggaattccatacattacttagaaaatcagaaaaagaagaacaccgtaaactggggttggaggtattatttggagtcttagattttgccggatgcactaagaatataactgcttggaaatacttggcaaaatatctgaaaaatatcttaatgggaaaccaccttgcgtgggttcaagaagagtggaactccaggaaaaactggtggccaggctttcatttcagctacttttgggcaaaaagtgattggaaggaagatacagctttggcctgtgagaaagcttttgtggctggtttactgttaggaaaaggttgtagatatttccggtatattttaaagcaagatcaccaaatcttagggaagaaaattaagcggatgaagagatctgtgaaaaaatacagtattgtaaatccaagactctgatactgaattttagttatttcacagttgtagctacacagtaagtagcttggtagatagttattgaatgtatttatgtagtgtattaagaagcttatattactacaaaaaacttatttttatatatttttatatttttgtattatttatagctagagaaacaatattactgcctttgctctttgtaactatgtctgttttcttttttgtaatgttaaatgttacatttgttaaggaataattcttcaaatgacaaactaattacagaatatagctctacagcagttattgtttgcaaatactttgcctcttgctattgtgtaataaactgtaacttgtaaaaaaaaaaaaaaa

SEQ ID NO: 225 - protein, 336 aa, Homo sapiens
MESFNTFANRMKNIGVMNYLKISLQHALYLLHHGMLKDAKRNLSEAETWRHGENTSSREILINLIQAYKGLLQYYTWSEKKMELSKLDKDDYAYNAVAQDVFNHSWKTSANISALIKIPGVWDPFVKSYVEMLEFYGDRDGAQEVLTNYAYDEKFPSNPNAHIYLYNFLKRQKAPRSKLISVLKILYQIVPSHKLMLEFHTLLRKSEKEEHRKLGLEVLFGVLDFAGCTKNITAWKYLAKYLKNILMGNHLAWVQEEWNSRKNWWPGFHFSYFWAKSDWKEDTALACEKAFVAGLLLGKGCRYFRYILKQDHQILGKKIKRMKRSVKKYSIVNPRL

SEQ ID NO: 226 - DNA, 10108 bp, Homo sapiens
gtgaccacaacatggctgcggcgcctgggctgctcgtctggctgctcgtgctccggctgccctggcgggtgccgggccagctggaccccagcactggccggcggttctcggagcacaaactctgcgcggacgacgaatgcagcatgttaatgtaccgcggtgaggctcttgaagatttcacaggcccggattgtcgttttgtgaattttaaaaaaggtgatcctgtatatgtttactataaactggcaagaggatggcctgaagtttgggctggaagtgttggacgcacttttggatattttccaaaagatttaatccaggtagttcatgaatataccaaagaagagctacaagttccaacagatgagacggattttgtttgttttgatggaggaagagatgattttcataattataatgtagaagaacttttagggtttttggaactgtacaattctgcagctacagattctgagaaagctgtagaaaaaactttacaggatatggaaaaaaaccctgaattatctaaggaaagggaacctgaacctgaaccagtagaagccaactcagaggaaagtgatagtgtattctcagaaaacactgaggatcttcaggaacagtttacaactcagaagcaccactcccatgcaaacagccaagcaaatcatgctcagggagagcaggcttcatttgaatcttttgaagaaatgctgcaagataaactaaaagtgccagaaagtgaaaacaacaaaaccagcaatagttctcaggtctcaaatgaacaggataagattgatgcctataaacttttgaaaaaagaaatgactctagacttgaaaaccaaatttggctcaacagctgatgcacttgtatctgatgatgagacaaccagactcgttacttcattagaagatgattttgatgaggaattggatactgagtattatgcagttggaaaggaagatgaggagaaccaagaagactttgatgagttgccattacttacctttacagatggggaagatatgaaaactccagcaaagtctggcgttgagaaatatccaacagataaagagcagaattcaaatgaagaggacaaggttcagctaactgtgccccctggcatcaaaaatgatgataaaaatatactaacaacctggggggacactatcttctctattgtcacaggaggtgaagaaacaagagatacgatggatttagagagctctagttcagaggaagaaaaagaagatgatgatgatgcattagtcccagatagcaaacaggggaaaccacagtcagcaacagattatagtgaccctgacaatgtagatgatggtctttttattgtagacattcctaaaacaaataatgacaaagaagtaaacgcagaacatcacattaaaggaaaagggaggggagttcaggaatccaagaggggcctggtacaagataagacagaattagaggatgaaaatcaagaaggcatgactgtgcacagttctgttcacagcaataacctcaactctatgccagctgctgaaaagggtaaagacacattaaaatcagcttatgatgatacagaaaatgacctaaaaggagcagctattcatatctcaaaaggaatgctccacgaagaaaagcctggagagcagattttggaaggtggctcagagagtgaatctgcacagaaagctgcagggaatcaaatgaatgacagaaagattcaacaggaatccctgggtagtgcaccactcatgggagatgaccaccctaacgcatccagagacagtgtggagggagacgctttggtaaatggggccaaactgcacacgctttcagtggagcatcaacgtgaggaattgaaagaggaattagttcttaaaactcaaaaccaacctagattctcctctccagatgagattgatttgcccagagaactggaagacgaggttcccattctgggaagaaatcttccctggcaacaagaaagagatgtggctgccacagccagtaagcaaatgagtgagaagataaggctctctgagggagaagccaaagaggactccttggatgaagagttttttcatcacaaggcaatgcagggcacagaggtaggacagacagaccaaactgacagcacaggaggaccagctttcctttctaaagtagaagaggatgattatccctctgaagaactactagaggatgaaaacgctataaatgcaaaacggtctaaagaaaaaaaccctgggaatcagggcaggcagtttgatgttaatctgcaagtccctgacagagcagttttagggaccattcatccagatccagaaattgaagaaagcaagcaagaaactagtatgattttggatagcgaaaaaacaagtgagactgctgccaaaggggtcaacacaggaggcagggaaccaaatacaatggtggaaaaagaacgccctctggcagataagaaagcacagagaccatttgaacgaagtgacttttctgacagcataaaaattcagactccagaattaggtgaagtgtttcagaataaagattctgattatctgaagaacgacaaccctgaggaacatctgaagacctcagggcttgcaggggagcctgagggagaactctcaaaagaggaccatgagaacacagagaagtacatgggcacagaaagccaggggtctgctgctgcagaacctgaagatgactcgttccactggactccacatacaagtgtagagccagggcatagtgacaagagggaggacttacttatcataagcagcttctttaaagaacaacagtctttgcagcggttccagaagtactttaatgtccatgagctggaagccttgctacaagaaatgtcatcaaaactgaagtcagcgcagcaggagagcctgccctataatatggaaaaagtcctagataaggtcttccgtgcttctgagtcacaaattctgagcatagcagaaaaaatgcttgatactcgtgtggctgaaaatagagatctgggaatgaacgaaaataacatatttgaagaggctgcagtgcttgatgacattcaagacctcatctattttgtcaggtacaagcactccacagcagaggagacagccacactggtgatggcaccacctctagaggaaggcttgggtggagcaatggaagagatgcaaccactgcatgaagataatttctcacgagagaagacagcagaacttaatgtgcaggttcctgaagaacccacccacttggaccaacgtgtgattggggacactcatgcctcagaagtgtcacagaagccaaatactgagaaagacctggacccagggccagttacaacagaagacactcctatggatgctattgatgcaaacaagcaaccagagacagccgccgaagagccggcaagtgtcacacctttggaaaacgcaatccttctaatatattcattcatgttttatttaactaagtcgctagttgctacattgcctgatgatgttcagcctgggcctgatttttatggactgccatggaaacctgtatttatcactgccttcttgggaattgcttcgtttgccattttcttatggagaactgtccttgttgtgaaggatagagtatatcaagtcacggaacagcaaatttctgagaagttgaagactatcatgaaagaaaatacagaacttgtacaaaaattgtcaaattatgaacagaagatcaaggaatcaaagaaacatgttcaggaaaccaggaaacaaaatatgattctctctgatgaagcaattaaatataaggataaaatcaagacacttgaaaaaaatcaggaaattctggatgacacagctaaaaatcttcgtgttatgctagaatctgagagagaacagaatgtcaagaatcaggacttgatatcagaaaacaagaaatctatagagaagttaaaggatgttatttcaatgaatgcctcagaattttcagaggttcagattgcacttaatgaagctaagcttagtgaagagaaggtgaagtctgaatgccatcgggttcaagaagaaaatgctaggcttaagaagaaaaaagagcagttgcagcaggaaatcgaagactggagtaaattacatgctgagctcagtgagcaaatcaaatcatttgagaagtctcagaaagatttggaagtagctcttactcacaaggatgataatattaatgctttgactaactgcattacacagttgaatctgttagagtgtgaatctgaatctgagggtcaaaataaaggtggaaatgattcagatgaattagcaaatggagaagtgggaggtgaccggaatgagaagatgaaaaatcaaattaagcagatgatggatgtctctcggacacagactgcaatatcggtagttgaagaggatctaaagcttttacagcttaagctaagagcctccgtgtccactaaatgtaacctggaagaccaggtaaagaaattggaagatgaccgcaactcactacaagctgccaaagctggactggaagatgaatgcaaaaccttgaggcagaaagtggagattctgaatgagctctatcagcagaaggagatggctttgcaaaagaaactgagtcaagaagagtatgaacggcaagaaagagagcacaggctgtcagctgcagatgaaaaggcagtttcggctgcagaggaagtaaaaacttacaagcggagaattgaagaaatggaggatgaattacagaagacagagcggtcatttaaaaaccagatcgctacccatgagaagaaagctcatgaaaactggctcaaagctcgtgctgcagaaagagctatagctgaagagaaaagggaagctgccaatttgagacacaaattattagaattaacacaaaagatggcaatgctgcaagaagaacctgtgattgtaaaaccaatgccaggaaaaccaaatacacaaaaccctccacggagaggtcctctgagccagaatggctcttttggcccatcccctgtgagtggtggagaatgctcccctccattgacagtggagccacctgtgagacctctctctgctactctcaatcgaagagatatgcctagaagtgaatttggatcagtggacgggcctctacctcatcctcgatggtcagctgaggcatctgggaaaccctctccttctgatccaggatctggtacagctaccatgatgaacagcagctcaagaggctcttcccctaccagggtactcgatgaaggcaaggttaatatggctccaaaagggccccctcctttcccaggagtccctctcatgagcacccccatgggaggccctgtaccaccacccattcgatatggaccaccacctcagctctgcggaccttttgggcctcggccacttcctccaccctttggccctggtatgcgtccaccactaggcttaagagaatttgcaccaggcgttccaccaggaagacgggacctgcctctccaccctcggggatttttacctggacacgcaccatttagacctttaggttcacttggcccaagagagtactttattcctggtacccgattaccacccccaacccatggtccccaggaatacccaccaccacctgctgtaagagacttactgccgtcaggctctagagatgagcctccacctgcctctcagagcactagccaggactgttcacaggctttaaaacagagcccataaaactatgacctctgaggtttcattggaaagaaagtgtactgtgcattatccattacagtaaaggatttcattggcttcaaaatccaaaagtttattttaaaaggtttgttgttagaactaagctgccttggcagtgtgcatttttgagccaaacaattcaaaaatgtcatttcttccctaaataaaaatcaccttttaagctagagcgtccttacaactttgaaatgtgcaataaagaatacctgtgttttagctaatgtagcatatgtaattgcaaaatgatttagaatgtcatgaaaaatatgaacatttcctgtggaaatgctttaagaacatgtatttccattatcctatttttagtgtacaccagctgaatacggagcaatggtgtttataagcgtttttttaaactatctggtcacaaagactgttacgctaaaaatgtttactaaaagatcactaaactatctcccctcttgctgaagttctttgtagtaatagctcataaaaatttgtttattaatatttcccaagtgtctgttgactcattggactgttatgaggcttgtgccatttggggaacatgtaaactcaggctcccagaactgaagatggtggctggtggcacacttccggctgctcctccgtcacctgtgaactctacaagtgacgtctttttatttcaaagaagtttatttcccacttgtatagcattcacatgctttctttacgatcctcattgtctatttgagaatggttttctgagagtgagtttacattagtagcaagagttgtttgacctgatgttccattgtttttaccattcctgtagaaaaagggtgcacaacagaaaaatgaaaatgatgtgtcatggccataaaagtatagaaatctttaaaaattttaaaatgtacagtcccttatctatctttcccattccttgccactgatttttgaggaatataataaaaagattggaagagtataatgccatgagaaagaatgatttaggactgtgagggttataacatgccctaggtcagcaaccaagggttgaaatcagttctgttttagggggaaatgggggcgacagatattattccaaaattaatattaattaatatttaaacgttggtgtttttatttaaaaatcagtaactaaccatctggaattgcaccatacttaaagtcttatccattactacactgtctttaaaacaatgtttctttaaatactctacaacgtttctaagaacgaacttcagacattttaattacagtaataatagcactccttttaaggagtttcagatccacactaaaactaaaatcataaaaggctgatacttttgtttgctgctaggctatattcttccattctttgaagtcctatgatgtaatatttttgaaacctagtgtatgtcttgtcactgttgtgatatttaatcgattaagaataccttgtaaaaaggagcaaaagcttcaatgtgaaacaattttctctctttatactaaacaactgaagatagatagtttagaaagataaggacctttgaaagaagacaactctgtcaaagttcataaggaatataaaaattcttcaggaaaagagaattcaatctatatgtcctcccgtttaatatcaagaatagaagaaattaagaggaaaactccacagaagagcataggccacttttagccatgtaaaaataagattaagtcacaaatacaacttttgaatttacctgtcaatatctctttaggacacaaaacaatgctgaagttaatataatttctaattttaaatgtcatttaagtgtagattatgccatctaggaaggtaagtaggaaaggtaaattaaatctatttttaaaattcaaaatattagagtatttttcccctctaaagccttttttggtgattattctgtatctgacataattgagaaactggtaagctgtaaagattccagtgtagcttctctgagaagttgtgagccagtccataactgcttcctcacatccatctgattgcaccatttctgcagcaaaccccaaagcagggtgccaatatgcagatggcatagggagtatcatccctcagccaaatcacttttccatctctaaagtttcatctattttggaagtcatctccaactaattgtgtctggatttagttgctaaaattgtcttatttatgaagcagcaatattcagcctgaaagcatttctgccatagttgttgtagttatatcgccaatggctgatttttttcattggaaagtaaatttaagtaattcgtgggatgtggtatattctgtgtcaacttcaagataatcactcattttctcgttatattcaggtctgaattaaagttaagttaatcacacagtgttcaatttaagcttctttaatgttgatgaaaggtatttgtagttcatataaactatacttatgtgaaggatagcagatgcttcatataaattatcattttgatatacatatcttatggtttatgagaaaagagaaaaaataatacatcggttttgctacactttaatgggttttttttttaagggattttttttcaggtcttgtcagcaacatcaaacaaaaggtactgagtactccacagggtacagagtgctgccaagcaccttagaaaaattacatgacacggagaaaatgcgcctcttgctccttgaagagcttacagtctagggatttgacaactcacagtcttaggaactgggcaaagtaaggcaaattcttcatcccctagagctattgtggactgaatcattttagaatttggaattaatccaatcaagatgagagacaagactaaatttggctgagaattcattcaggctcgcatagtttttattaacatccgtctagtaaacagaatggacctaacagacaactgaaagtaaagactagatctcttgaagtgcaagggctacaacaacttagttgtggttacttattttaaaaagcaaacatactgaatggtatgactagggtgattacactagtttaaaaataggccaggtactgacactgcattcccctcatgcattgctcatttaaaatagtgaatattaaaatatgtgggctttacatctaacccacagaaagcccaccgcaaatgttctgtgtatcaaatatccacctcatgtgtactatgaaagttttatttatgccccattaagtcaaaagtaaattatagtaagctaatgacctgcatattttcatatggatgaatgtcagtatatctaaataggaaataaatggcgatcctatctacctatataaaaaaaatagaatatctttccagattttgcatactcctcactgtaagaagaggtatgcaggttttaaggtttcacaatcagttgtcagaaaaacagcagttatgcctgcagtatctcgttagcatctgactcaattatttttagattacattgtttagaagacattgtaaacccatctaaaactttgtaattattttgagatggttccaatgttaaccctagaatcatcatcagaaagagtaacaatgtgatgtagaagaacagctaatcgacatgactaaaaatatgctcattttcagaaaaacaatctggtcatctggaaacaatcacagctacaacctagggaacactcccatgtgggatactgatctggccaaggcacactttctaagcaggaaaactatcagatcagggtgaatttaggccacttcagaggtgctgcctataaacatccagacagaccttcttaggcagcagaactggtcccattcctctcaaagcagtttgacactaccctacccacatcaacccaaagcttgacgttaagtcaaaagagcatattggagcaaaagtgaacagatgtgtaaactctagcacattcttattgctgtattaagtctgaagatgagcacatcctacccacaacagtattgttccaggaagcagggtaggagtagtggtaaattagaaaatagactattaattgcacaattaatagaaaagtaaaaacatgtttcaaaatctacaataaacctgtatcccaaggagtcctatacgtcagtgtgatgtgctggactctgaattctgtggtacagctttgcattggactccgtccggcctactggtctgggtacggcttgcttcctgcctgttgaagggtgaatatgctacacagagctatgatggtttctactgagtggtaaaattcacagaagttccaggttcatcatgtcaggatcattccttgtgcaaagtttgatgtagatgaagataaagtggtttcttggtcaataattgcaatttctttcttttaaagtcagtgggtttcttgtatctg

SEQ ID NO: 227 - protein, 1907 aa, Homo sapiens
MAAAPGLLVWLLVLRLPWRVPGQLDPSTGRRFSEHKLCADDECSMLMYRGEALEDFTGPDCRFVNFKKGDPVYVYYKLARGWPEVWAGSVGRTFGYFPKDLIQVVHEYTKEELQVPTDETDFVCFDGGRDDFHNYNVEELLGFLELYNSAATDSEKAVEKTLQDMEKNPELSKEREPEPEPVEANSEESDSVFSENTEDLQEQFTTQKHHSHANSQANHAQGEQASFESFEEMLQDKLKVPESENNKTSNSSQVSNEQDKIDAYKLLKKEMTLDLKTKFGSTADALVSDDETTRLVTSLEDDFDEELDTEYYAVGKEDEENQEDFDELPLLTFTDGEDMKTPAKSGVEKYPTDKEQNSNEEDKVQLTVPPGIKNDDKNILTTWGDTIFSIVTGGEETRDTMDLESSSSEEEKEDDDDALVPDSKQGKPQSATDYSDPDNVDDGLFIVDIPKTNNDKEVNAEHHIKGKGRGVQESKRGLVQDKTELEDENQEGMTVHSSVHSNNLNSMPAAEKGKDTLKSAYDDTENDLKGAAIHISKGMLHEEKPGEQILEGGSESESAQKAAGNQMNDRKIQQESLGSAPLMGDDHPNASRDSVEGDALVNGAKLHTLSVEHQREELKEELVLKTQNQPRFSSPDEIDLPRELEDEVPILGRNLPWQQERDVAATASKQMSEKIRLSEGEAKEDSLDEEFFHHKAMQGTEVGQTDQTDSTGGPAFLSKVEEDDYPSEELLEDENAINAKRSKEKNPGNQGRQFDVNLQVPDRAVLGTIHPDPEIEESKQETSMILDSEKTSETAAKGVNTGGREPNTMVEKERPLADKKAQRPFERSDFSDSIKIQTPELGEVFQNKDSDYLKNDNPEEHLKTSGLAGEPEGELSKEDHENTEKYMGTESQGSAAAEPEDDSFHWTPHTSVEPGHSDKREDLLIISSFFKEQQSLQRFQKYFNVHELEALLQEMSSKLKSAQQESLPYNMEKVLDKVFRASESQILSIAEKMLDTRVAENRDLGMNENNIFEEAAVLDDIQDLIYFVRYKHSTAEETATLVMAPPLEEGLGGAMEEMQPLHEDNFSREKTAELNVQVPEEPTHLDQRVIGDTHASEVSQKPNTEKDLDPGPVTTEDTPMDAIDANKQPETAAEEPASVTPLENAILLIYSFMFYLTKSLVATLPDDVQPGPDFYGLPWKPVFITAFLGIASFAIFLWRTVLVVKDRVYQVTEQQISEKLKTIMKENTELVQKLSNYEQKIKESKKHVQETRKQNMILSDEAIKYKDKIKTLEKNQEILDDTAKNLRVMLESEREQNVKNQDLISENKKSIEKLKDVISMNASEFSEVQIALNEAKLSEEKVKSECHRVQEENARLKKKKEQLQQEIEDWSKLHAELSEQIKSFEKSQKDLEVALTHKDDNINALTNCITQLNLLECESESEGQNKGGNDSDELANGEVGGDRNEKMKNQIKQMMDVSRTQTAISVVEEDLKLLQLKLRASVSTKCNLEDQVKKLEDDRNSLQAAKAGLEDECKTLRQKVEILNELYQQKEMALQKKLSQEEYERQEREHRLSAADEKAVSAAEEVKTYKRRIEEMEDELQKTERSFKNQIATHEKKAHENWLKARAAERAIAEEKREAANLRHKLLELTQKMAMLQEEPVIVKPMPGKPNTQNPPRRGPLSQNGSFGPSPVSGGECSPPLTVEPPVRPLSATLNRRDMPRSEFGSVDGPLPHPRWSAEASGKPSPSDPGSGTATMMNSSSRGSSPTRVLDEGKVNMAPKGPPPFPGVPLMSTPMGGPVPPPIRYGPPPQLCGPFGPRPLPPPFGPGMRPPLGLREFAPGVPPGRRDLPLHPRGFLPGHAPFRPLGSLGPREYFIPGTRLPPPTHGPQEYPPPPAVRDLLPSGSRDEPPPASQSTSQDCSQALKQSP

SEQ ID NO: 228 - DNA, 6531 bp, Homo sapiens
gtgaccacaacatggctgcggcgcctgggctgctcgtctggctgctcgtgctccggctgccctggcgggtgccgggccagctggaccccagcactggccggcggttctcggagcacaaactctgcgcggacgacgaatgcagcatgttaatgtaccgcggtgaggctcttgaagatttcacaggcccggattgtcgttttgtgaattttaaaaaaggtgatcctgtatatgtttactataaactggcaagaggatggcctgaagtttgggctggaagtgttggacgcacttttggatattttccaaaagatttaatccaggtagttcatgaatataccaaagaagagctacaagttccaacagatgagacggattttgtttgttttgatggaggaagagatgattttcataattataatgtagaagaacttttagggtttttggaactgtacaattctgcagctacagattctgagaaagctgtagaaaaaactttacaggatatggaaaaaaaccctgaattatctaaggaaagggaacctgaacctgaaccagtagaagccaactcagaggaaagtgatagtgtattctcagaaaacactgaggatcttcaggaacagtttacaactcagaagcaccactcccatgcaaacagccaagcaaatcatgctcagggagagcaggcttcatttgaatcttttgaagaaatgctgcaagataaactaaaagtgccagaaagtgaaaacaacaaaaccagcaatagttctcaggtctcaaatgaacaggataagattgatgcctataaacttttgaaaaaagaaatgactctagacttgaaaaccaaatttggctcaacagctgatgcacttgtatctgatgatgagacaaccagactcgttacttcattagaagatgattttgatgaggaattggatactgagtattatgcagttggaaaggaagatgaggagaaccaagaagactttgatgagttgccattacttacctttacagatggggaagatatgaaaactccagcaaagtctggcgttgagaaatatccaacagataaagagcagaattcaaatgaagaggacaaggttcagctaactgtgccccctggcatcaaaaatgatgataaaaatatactaacaacctggggggacactatcttctctattgtcacaggaggtgaagaaacaagagatacgatggatttagagagctctagttcagaggaagaaaaagaagatgatgatgatgcattagtcccagatagcaaacaggggaaaccacagtcagcaacagattatagtgaccctgacaatgtagatgatggtctttttattgtagacattcctaaaacaaataatgacaaagaagtaaacgcagaacatcacattaaaggaaaagggaggggagttcaggaatccaagaggggcctggtacaagataagacagaattagaggatgaaaatcaagaaggcatgactgtgcacagttctgttcacagcaataacctcaactctatgccagctgctgaaaagggtaaagacacattaaaatcagcttatgatgatacagaaaatgacctaaaaggagcagctattcatatctcaaaaggaatgctccacgaagaaaagcctggagagcagattttggaaggtggctcagagagtgaatctgcacagaaagctgcagggaatcaaatgaatgacagaaagattcaacaggaatccctgggtagtgcaccactcatgggagatgaccaccctaacgcatccagagacagtgtggagggagacgctttggtaaatggggccaaactgcacacgctttcagtggagcatcaacgtgaggaattgaaagaggaattagttcttaaaactcaaaaccaacctagattctcctctccagatgagattgatttgcccagagaactggaagacgaggttcccattctgggaagaaatcttccctggcaacaagaaagagatgtggctgccacagccagtaagcaaatgagtgagaagataaggctctctgagggagaagccaaagaggactccttggatgaagagttttttcatcacaaggcaatgcagggcacagaggtaggacagacagaccaaactgacagcacaggaggaccagctttcctttctaaagtagaagaggatgattatccctctgaagaactactagaggatgaaaacgctataaatgcaaaacggtctaaagaaaaaaaccctgggaatcagggcaggcagtttgatgttaatctgcaagtccctgacagagcagttttagggaccattcatccagatccagaaattgaagaaagcaagcaagaaactagtatgattttggatagcgaaaaaacaagtgagactgctgccaaaggggtcaacacaggaggcagggaaccaaatacaatggtggaaaaagaacgccctctggcagataagaaagcacagagaccatttgaacgaagtgacttttctgacagcataaaaattcagactccagaattaggtgaagtgtttcagaataaagattctgattatctgaagaacgacaaccctgaggaacatctgaagacctcagggcttgcaggggagcctgagggagaactctcaaaagaggaccatgagaacacagagaagtacatgggcacagaaagccaggggtctgctgctgcagaacctgaagatgactcgttccactggactccacatacaagtgtagagccagggcatagtgacaagagggaggacttacttatcataagcagcttctttaaagaacaacagtctttgcagcggttccagaagtactttaatgtccatgagctggaagccttgctacaagaaatgtcatcaaaactgaagtcagcgcagcaggagagcctgccctataatatggaaaaagtcctagataaggtcttccgtgcttctgagtcacaaattctgagcatagcagaaaaaatgcttgatactcgtgtggctgaaaatagagatctgggaatgaacgaaaataacatatttgaagaggctgcagtgcttgatgacattcaagacctcatctattttgtcaggtacaagcactccacagcagaggagacagccacactggtgatggcaccacctctagaggaaggcttgggtggagcaatggaagagatgcaaccactgcatgaagataatttctcacgagagaagacagcagaacttaatgtgcaggttcctgaagaacccacccacttggaccaacgtgtgattggggacactcatgcctcagaagtgtcacagaagccaaatactgagaaagacctggacccagggccagttacaacagaagacactcctatggatgctattgatgcaaacaagcaaccagagacagccgccgaagagccggcaagtgtcacacctttggaaaacgcaatccttctaatatattcattcatgttttatttaactaagtcgctagttgctacattgcctgatgatgttcagcctgggcctgatttttatggactgccatggaaacctgtatttatcactgccttcttgggaattgcttcgtttgccattttcttatggagaactgtccttgttgtgaaggatagagtatatcaagtcacggaacagcaaatttctgagaagttgaagactatcatgaaagaaaatacagaacttgtacaaaaattgtcaaattatgaacagaagatcaaggaatcaaagaaacatgttcaggaaaccaggaaacaaaatatgattctctctgatgaagcaattaaatataaggataaaatcaagacacttgaaaaaaatcaggaaattctggatgacacagctaaaaatcttcgtgttatgctagaatctgagagagaacagaatgtcaagaatcaggacttgatatcagaaaacaagaaatctatagagaagttaaaggatgttatttcaatgaatgcctcagaattttcagaggttcagattgcacttaatgaagctaagcttagtgaagagaaggtgaagtctgaatgccatcgggttcaagaagaaaatgctaggcttaagaagaaaaaagagcagttgcagcaggaaatcgaagactggagtaaattacatgctgagctcagtgagcaaatcaaatcatttgagaagtctcagaaagatttggaagtagctcttactcacaaggatgataatattaatgctttgactaactgcattacacagttgaatctgttagagtgtgaatctgaatctgagggtcaaaataaaggtggaaatgattcagatgaattagcaaatggagaagtgggaggtgaccggaatgagaagatgaaaaatcaaattaagcagatgatggatgtctctcggacacagactgcaatatcggtagttgaagaggatctaaagcttttacagcttaagctaagagcctccgtgtccactaaatgtaacctggaagaccaggtaaagaaattggaagatgaccgcaactcactacaagctgccaaagctggactggaagatgaatgcaaaaccttgaggcagaaagtggagattctgaatgagctctatcagcagaaggagatggctttgcaaaagaaactgagtcaagaagagtatgaacggcaagaaagagagcacaggctgtcagctgcagatgaaaaggcagtttcggctgcagaggaagtaaaaacttacaagcggagaattgaagaaatggaggatgaattacagaagacagagcggtcatttaaaaaccagatcgctacccatgagaagaaagctcatgaaaactggctcaaagctcgtgctgcagaaagagctatagctgaagagaaaagggaagctgccaatttgagacacaaattattagaattaacacaaaagatggcaatgctgcaagaagaacctgtgattgtaaaaccaatgccaggaaaaccaaatacacaaaaccctccacggagaggtcctctgagccagaatggctcttttggcccatcccctgtgagtggtggagaatgctcccctccattgacagtggagccacctgtgagacctctctctgctactctcaatcgaagagatatgcctagaagtgaatttggatcagtggacgggcctctacctcatcctcgatggtcagctgaggcatctgggaaaccctctccttctgatccaggatctggtacagctaccatgatgaacagcagctcaagaggctcttcccctaccagggtactcgatgaaggcaaggttaatatggctccaaaagggccccctcctttcccaggagtccctctcatgagcacccccatgggaggccctgtaccaccacccattcgatatggaccaccacctcagctctgcggaccttttgggcctcggccacttcctccaccctttggtaagatgatctgaacagtagtaattgacttgtaaagcacattcatcttctccatctatcccttgctaaaacaactgcaattgcggggctttgcaatgcagcagtgaagctgattgagtacaccgtaacttttccccaagtttcttcagacacaaagggtgctacataatctcctgtgattagatgggcaatagttgtctctaatagaacaaggaaaggggctatttataaaaagccagaaatattcatcacattgaacatctgtggctgtgtactaggctctgcaatggatagcaaggtagataaaatacatcccctaactaagatgtcctgtaggtcacaaatatacacattctacaacataaagcttctaatcacccataatggaagcataagcagtaggtcacagaatattaaggaaagacaaaaccctcaaccctcaccttgggaatacaaagaagggagatatgaaagagaaggtagaatttaacagctatctaatgaatgctgctgaatttaattagatggagctggaaagccttttccagcagggcaagcaccttaatttttatggcatttattaggtacatcttgagctactgcataaatttttaactgatacacagtagttaatggaatttatcaaaatttttattgcaatgaagccatatttagtctgtcttcttggtatggtatatagtacttccaagtacaaatctatctctctttttcagataaagatggcaggccaggcacagtggctcacgcctgtaatcccagcactttatgaatcccagcattcattagacgaggctgaggcaggtggatcccttgagcctaggagtttgagaccagcctgggcaacatggtgaaacccccatctctacaaaaaatccaaaaattagctgggagtggtggcgtgcacctgtagtcccagctactggggagtctgaggtgggaggattgattgagtccgggagattgaggctgcagtgagccatgatcactcattacactccagcccatgtgacaggcaagaccctgccgccaaaaaaaaaaaaaaaaaaaaaaaaggatgacagactatattaacatacctggcattat

SEQ ID NO: 229 - protein, 1808 aa, Homo sapiens
MAAAPGLLVWLLVLRLPWRVPGQLDPSTGRRFSEHKLCADDECSMLMYRGEALEDFTGPDCRFVNFKKGDPVYVYYKLARGWPEVWAGSVGRTFGYFPKDLIQVVHEYTKEELQVPTDETDFVCFDGGRDDFHNYNVEELLGFLELYNSAATDSEKAVEKTLQDMEKNPELSKEREPEPEPVEANSEESDSVFSENTEDLQEQFTTQKHHSHANSQANHAQGEQASFESFEEMLQDKLKVPESENNKTSNSSQVSNEQDKIDAYKLLKKEMTLDLKTKFGSTADALVSDDETTRLVTSLEDDFDEELDTEYYAVGKEDEENQEDFDELPLLTFTDGEDMKTPAKSGVEKYPTDKEQNSNEEDKVQLTVPPGIKNDDKNILTTWGDTIFSIVTGGEETRDTMDLESSSSEEEKEDDDDALVPDSKQGKPQSATDYSDPDNVDDGLFIVDIPKTNNDKEVNAEHHIKGKGRGVQESKRGLVQDKTELEDENQEGMTVHSSVHSNNLNSMPAAEKGKDTLKSAYDDTENDLKGAAIHISKGMLHEEKPGEQILEGGSESESAQKAAGNQMNDRKIQQESLGSAPLMGDDHPNASRDSVEGDALVNGAKLHTLSVEHQREELKEELVLKTQNQPRFSSPDEIDLPRELEDEVPILGRNLPWQQERDVAATASKQMSEKIRLSEGEAKEDSLDEEFFHHKAMQGTEVGQTDQTDSTGGPAFLSKVEEDDYPSEELLEDENAINAKRSKEKNPGNQGRQFDVNLQVPDRAVLGTIHPDPEIEESKQETSMILDSEKTSETAAKGVNTGGREPNTMVEKERPLADKKAQRPFERSDFSDSIKIQTPELGEVFQNKDSDYLKNDNPEEHLKTSGLAGEPEGELSKEDHENTEKYMGTESQGSAAAEPEDDSFHWTPHTSVEPGHSDKREDLLIISSFFKEQQSLQRFQKYFNVHELEALLQEMSSKLKSAQQESLPYNMEKVLDKVFRASESQILSIAEKMLDTRVAENRDLGMNENNIFEEAAVLDDIQDLIYFVRYKHSTAEETATLVMAPPLEEGLGGAMEEMQPLHEDNFSREKTAELNVQVPEEPTHLDQRVIGDTHASEVSQKPNTEKDLDPGPVTTEDTPMDAIDANKQPETAAEEPASVTPLENAILLIYSFMFYLTKSLVATLPDDVQPGPDFYGLPWKPVFITAFLGIASFAIFLWRTVLVVKDRVYQVTEQQISEKLKTIMKENTELVQKLSNYEQKIKESKKHVQETRKQNMILSDEAIKYKDKIKTLEKNQEILDDTAKNLRVMLESEREQNVKNQDLISENKKSIEKLKDVISMNASEFSEVQIALNEAKLSEEKVKSECHRVQEENARLKKKKEQLQQEIEDWSKLHAELSEQIKSFEKSQKDLEVALTHKDDNINALTNCITQLNLLECESESEGQNKGGNDSDELANGEVGGDRNEKMKNQIKQMMDVSRTQTAISVVEEDLKLLQLKLRASVSTKCNLEDQVKKLEDDRNSLQAAKAGLEDECKTLRQKVEILNELYQQKEMALQKKLSQEEYERQEREHRLSAADEKAVSAAEEVKTYKRRIEEMEDELQKTERSFKNQIATHEKKAHENWLKARAAERAIAEEKREAANLRHKLLELTQKMAMLQEEPVIVKPMPGKPNTQNPPRRGPLSQNGSFGPSPVSGGECSPPLTVEPPVRPLSATLNRRDMPRSEFGSVDGPLPHPRWSAEASGKPSPSDPGSGTATMMNSSSRGSSPTRVLDEGKVNMAPKGPPPFPGVPLMSTPMGGPVPPPIRYGPPPQLCGPFGPRPLPPPFGKMI

SEQ ID NO: 230 - DNA, 6791 bp, Homo sapiens
tccggaggaggaagctctgaaaaacagggggcccagtgccattccgcagggaattgtcgcttgcgttcagctgttctacacaatggactcagtacctgccactgtgccttctatcgccgctaccccgggggacccggaacttgtgggacccttgtctgtgctctacgcagccttcatagccaagctgctggagctagttgctacattgcctgatgatgttcagcctgggcctgatttttatggactgccatggaaacctgtatttatcactgccttcttgggaattgcttcgtttgccattttcttatggagaactgtccttgtttcacggaacagcaaatttctgagaagttgaagactatcatgaaagaaaatacagaacttgtacaaaaattgtcaaattatgaacagaagatcaaggaatcaaagaaacatgttcaggaaaccaggaaacaaaatatgattctctctgatgaagcaattaaatataaggataaaatcaagacacttgaaaaaaatcaggaaattctggatgacacagctaaaaatcttcgtgttatgctagaatctgagagagaacagaatgtcaagaatcaggacttgatatcagaaaacaagaaatctatagagaagttaaaggatgttatttcaatgaatgcctcagaattttcagaggttcagattgcacttaatgaagctaagcttagtgaagagaaggtgaagtctgaatgccatcgggttcaagaagaaaatgctaggcttaagaagaaaaaagagcagttgcagcaggaaatcgaagactggagtaaattacatgctgagctcagtgagcaaatcaaatcatttgagaagtctcagaaagatttggaagtagctcttactcacaaggatgataatattaatgctttgactaactgcattacacagttgaatctgttagagtgtgaatctgaatctgagggtcaaaataaaggtggaaatgattcagatgaattagcaaatggagaagtgggaggtgaccggaatgagaagatgaaaaatcaaattaagcagatgatggatgtctctcggacacagactgcaatatcggtagttgaagaggatctaaagcttttacagcttaagctaagagcctccgtgtccactaaatgtaacctggaagaccaggtaaagaaattggaagatgaccgcaactcactacaagctgccaaagctggactggaagatgaatgcaaaaccttgaggcagaaagtggagattctgaatgagctctatcagcagaaggagatggctttgcaaaagaaactgagtcaagaagagtatgaacggcaagaaagagagcacaggctgtcagctgcagatgaaaaggcagtttcggctgcagaggaagtaaaaacttacaagcggagaattgaagaaatggaggatgaattacagaagacagagcggtcatttaaaaaccagatcgctacccatgagaagaaagctcatgaaaactggctcaaagctcgtgctgcagaaagagctatagctgaagagaaaagggaagctgccaatttgagacacaaattattagaattaacacaaaagatggcaatgctgcaagaagaacctgtgattgtaaaaccaatgccaggaaaaccaaatacacaaaaccctccacggagaggtcctctgagccagaatggctcttttggcccatcccctgtgagtggtggagaatgctcccctccattgacagtggagccacctgtgagacctctctctgctactctcaatcgaagagatatgcctagaagtgaatttggatcagtggacgggcctctacctcatcctcgatggtcagctgaggcatctgggaaaccctctccttctgatccaggatctggtacagctaccatgatgaacagcagctcaagaggctcttcccctaccagggtactcgatgaaggcaaggttaatatggctccaaaagggccccctcctttcccaggagtccctctcatgagcacccccatgggaggccctgtaccaccacccattcgatatggaccaccacctcagctctgcggaccttttgggcctcggccacttcctccaccctttggccctggtatgcgtccaccactaggcttaagagaatttgcaccaggcgttccaccaggaagacgggacctgcctctccaccctcggggatttttacctggacacgcaccatttagacctttaggttcacttggcccaagagagtactttattcctggtacccgattaccacccccaacccatggtccccaggaatacccaccaccacctgctgtaagagacttactgccgtcaggctctagagatgagcctccacctgcctctcagagcactagccaggactgttcacaggctttaaaacagagcccataaaactatgacctctgaggtttcattggaaagaaagtgtactgtgcattatccattacagtaaaggatttcattggcttcaaaatccaaaagtttattttaaaaggtttgttgttagaactaagctgccttggcagtgtgcatttttgagccaaacaattcaaaaatgtcatttcttccctaaataaaaatcaccttttaagctagagcgtccttacaactttgaaatgtgcaataaagaatacctgtgttttagctaatgtagcatatgtaattgcaaaatgatttagaatgtcatgaaaaatatgaacatttcctgtggaaatgctttaagaacatgtatttccattatcctatttttagtgtacaccagctgaatacggagcaatggtgtttataagcgtttttttaaactatctggtcacaaagactgttacgctaaaaatgtttactaaaagatcactaaactatctcccctcttgctgaagttctttgtagtaatagctcataaaaatttgtttattaatatttcccaagtgtctgttgactcattggactgttatgaggcttgtgccatttggggaacatgtaaactcaggctcccagaactgaagatggtggctggtggcacacttccggctgctcctccgtcacctgtgaactctacaagtgacgtctttttatttcaaagaagtttatttcccacttgtatagcattcacatgctttctttacgatcctcattgtctatttgagaatggttttctgagagtgagtttacattagtagcaagagttgtttgacctgatgttccattgtttttaccattcctgtagaaaaagggtgcacaacagaaaaatgaaaatgatgtgtcatggccataaaagtatagaaatctttaaaaattttaaaatgtacagtcccttatctatctttcccattccttgccactgatttttgaggaatataataaaaagattggaagagtataatgccatgagaaagaatgatttaggactgtgagggttataacatgccctaggtcagcaaccaagggttgaaatcagttctgttttagggggaaatgggggcgacagatattattccaaaattaatattaattaatatttaaacgttggtgtttttatttaaaaatcagtaactaaccatctggaattgcaccatacttaaagtcttatccattactacactgtctttaaaacaatgtttctttaaatactctacaacgtttctaagaacgaacttcagacattttaattacagtaataatagcactccttttaaggagtttcagatccacactaaaactaaaatcataaaaggctgatacttttgtttgctgctaggctatattcttccattctttgaagtcctatgatgtaatatttttgaaacctagtgtatgtcttgtcactgttgtgatatttaatcgattaagaataccttgtaaaaaggagcaaaagcttcaatgtgaaacaattttctctctttatactaaacaactgaagatagatagtttagaaagataaggacctttgaaagaagacaactctgtcaaagttcataaggaatataaaaattcttcaggaaaagagaattcaatctatatgtcctcccgtttaatatcaagaatagaagaaattaagaggaaaactccacagaagagcataggccacttttagccatgtaaaaataagattaagtcacaaatacaacttttgaatttacctgtcaatatctctttaggacacaaaacaatgctgaagttaatataatttctaattttaaatgtcatttaagtgtagattatgccatctaggaaggtaagtaggaaaggtaaattaaatctatttttaaaattcaaaatattagagtatttttcccctctaaagccttttttggtgattattctgtatctgacataattgagaaactggtaagctgtaaagattccagtgtagcttctctgagaagttgtgagccagtccataactgcttcctcacatccatctgattgcaccatttctgcagcaaaccccaaagcagggtgccaatatgcagatggcatagggagtatcatccctcagccaaatcacttttccatctctaaagtttcatctattttggaagtcatctccaactaattgtgtctggatttagttgctaaaattgtcttatttatgaagcagcaatattcagcctgaaagcatttctgccatagttgttgtagttatatcgccaatggctgatttttttcattggaaagtaaatttaagtaattcgtgggatgtggtatattctgtgtcaacttcaagataatcactcattttctcgttatattcaggtctgaattaaagttaagttaatcacacagtgttcaatttaagcttctttaatgttgatgaaaggtatttgtagttcatataaactatacttatgtgaaggatagcagatgcttcatataaattatcattttgatatacatatcttatggtttatgagaaaagagaaaaaataatacatcggttttgctacactttaatgggttttttttttaagggattttttttcaggtcttgtcagcaacatcaaacaaaaggtactgagtactccacagggtacagagtgctgccaagcaccttagaaaaattacatgacacggagaaaatgcgcctcttgctccttgaagagcttacagtctagggatttgacaactcacagtcttaggaactgggcaaagtaaggcaaattcttcatcccctagagctattgtggactgaatcattttagaatttggaattaatccaatcaagatgagagacaagactaaatttggctgagaattcattcaggctcgcatagtttttattaacatccgtctagtaaacagaatggacctaacagacaactgaaagtaaagactagatctcttgaagtgcaagggctacaacaacttagttgtggttacttattttaaaaagcaaacatactgaatggtatgactagggtgattacactagtttaaaaataggccaggtactgacactgcattcccctcatgcattgctcatttaaaatagtgaatattaaaatatgtgggctttacatctaacccacagaaagcccaccgcaaatgttctgtgtatcaaatatccacctcatgtgtactatgaaagttttatttatgccccattaagtcaaaagtaaattatagtaagctaatgacctgcatattttcatatggatgaatgtcagtatatctaaataggaaataaatggcgatcctatctacctatataaaaaaaatagaatatctttccagattttgcatactcctcactgtaagaagaggtatgcaggttttaaggtttcacaatcagttgtcagaaaaacagcagttatgcctgcagtatctcgttagcatctgactcaattatttttagattacattgtttagaagacattgtaaacccatctaaaactttgtaattattttgagatggttccaatgttaaccctagaatcatcatcagaaagagtaacaatgtgatgtagaagaacagctaatcgacatgactaaaaatatgctcattttcagaaaaacaatctggtcatctggaaacaatcacagctacaacctagggaacactcccatgtgggatactgatctggccaaggcacactttctaagcaggaaaactatcagatcagggtgaatttaggccacttcagaggtgctgcctataaacatccagacagaccttcttaggcagcagaactggtcccattcctctcaaagcagtttgacactaccctacccacatcaacccaaagcttgacgttaagtcaaaagagcatattggagcaaaagtgaacagatgtgtaaactctagcacattcttattgctgtattaagtctgaagatgagcacatcctacccacaacagtattgttccaggaagcagggtaggagtagtggtaaattagaaaatagactattaattgcacaattaatagaaaagtaaaaacatgtttcaaaatctacaataaacctgtatcccaaggagtcctatacgtcagtgtgatgtgctggactctgaattctgtggtacagctttgcattggactccgtccggcctactggtctgggtacggcttgcttcctgcctgttgaagggtgaatatgctacacagagctatgatggtttctactgagtggtaaaattcacagaagttccaggttcatcatgtcaggatcattccttgtgcaaagtttgatgtagatgaagataaagtggtttcttggtcaataattgcaatttctttcttttaaagtcagtgggtttcttgtatctg

SEQ ID NO: 231 - protein, 722 aa, Homo sapiens
METCIYHCLLGNCFVCHFLMENCPCFTEQQISEKLKTIMKENTELVQKLSNYEQKIKESKKHVQETRKQNMILSDEAIKYKDKIKTLEKNQEILDDTAKNLRVMLESEREQNVKNQDLISENKKSIEKLKDVISMNASEFSEVQIALNEAKLSEEKVKSECHRVQEENARLKKKKEQLQQEIEDWSKLHAELSEQIKSFEKSQKDLEVALTHKDDNINALTNCITQLNLLECESESEGQNKGGNDSDELANGEVGGDRNEKMKNQIKQMMDVSRTQTAISVVEEDLKLLQLKLRASVSTKCNLEDQVKKLEDDRNSLQAAKAGLEDECKTLRQKVEILNELYQQKEMALQKKLSQEEYERQEREHRLSAADEKAVSAAEEVKTYKRRIEEMEDELQKTERSFKNQIATHEKKAHENWLKARAAERAIAEEKREAANLRHKLLELTQKMAMLQEEPVIVKPMPGKPNTQNPPRRGPLSQNGSFGPSPVSGGECSPPLTVEPPVRPLSATLNRRDMPRSEFGSVDGPLPHPRWSAEASGKPSPSDPGSGTATMMNSSSRGSSPTRVLDEGKVNMAPKGPPPFPGVPLMSTPMGGPVPPPIRYGPPPQLCGPFGPRPLPPPFGPGMRPPLGLREFAPGVPPGRRDLPLHPRGFLPGHAPFRPLGSLGPREYFIPGTRLPPPTHGPQEYPPPPAVRDLLPSGSRDEPPPASQSTSQDCSQALKQSP

SEQ ID NO: 232 - DNA, 6904 bp, Homo sapiens
gacgtgttttataggcggcataaagcgaaagtgcaggcagctgtggaaggcgaagttcaatcccagagtccgccccctgaattggggcctttccggaggaggaagctctgaaaaacagggggcccagtgccattccgcagggaattgtcgcttgcgttcagctgttctacacaatggactcagtacctgccactgtgccttctatcgccgctaccccgggggacccggaacttgtgggacccttgtctgtgctctacgcagccttcatagccaagctgctggagctagttgctacattgcctgatgatgttcagcctgggcctgatttttatggactgccatggaaacctgtatttatcactgccttcttgggaattgcttcgtttgccattttcttatggagaactgtccttgttgtgaaggatagagtatatcaagtcacggaacagcaaatttctgagaagttgaagactatcatgaaagaaaatacagaacttgtacaaaaattgtcaaattatgaacagaagatcaaggaatcaaagaaacatgttcaggaaaccaggaaacaaaatatgattctctctgatgaagcaattaaatataaggataaaatcaagacacttgaaaaaaatcaggaaattctggatgacacagctaaaaatcttcgtgttatgctagaatctgagagagaacagaatgtcaagaatcaggacttgatatcagaaaacaagaaatctatagagaagttaaaggatgttatttcaatgaatgcctcagaattttcagaggttcagattgcacttaatgaagctaagcttagtgaagagaaggtgaagtctgaatgccatcgggttcaagaagaaaatgctaggcttaagaagaaaaaagagcagttgcagcaggaaatcgaagactggagtaaattacatgctgagctcagtgagcaaatcaaatcatttgagaagtctcagaaagatttggaagtagctcttactcacaaggatgataatattaatgctttgactaactgcattacacagttgaatctgttagagtgtgaatctgaatctgagggtcaaaataaaggtggaaatgattcagatgaattagcaaatggagaagtgggaggtgaccggaatgagaagatgaaaaatcaaattaagcagatgatggatgtctctcggacacagactgcaatatcggtagttgaagaggatctaaagcttttacagcttaagctaagagcctccgtgtccactaaatgtaacctggaagaccaggtaaagaaattggaagatgaccgcaactcactacaagctgccaaagctggactggaagatgaatgcaaaaccttgaggcagaaagtggagattctgaatgagctctatcagcagaaggagatggctttgcaaaagaaactgagtcaagaagagtatgaacggcaagaaagagagcacaggctgtcagctgcagatgaaaaggcagtttcggctgcagaggaagtaaaaacttacaagcggagaattgaagaaatggaggatgaattacagaagacagagcggtcatttaaaaaccagatcgctacccatgagaagaaagctcatgaaaactggctcaaagctcgtgctgcagaaagagctatagctgaagagaaaagggaagctgccaatttgagacacaaattattagaattaacacaaaagatggcaatgctgcaagaagaacctgtgattgtaaaaccaatgccaggaaaaccaaatacacaaaaccctccacggagaggtcctctgagccagaatggctcttttggcccatcccctgtgagtggtggagaatgctcccctccattgacagtggagccacctgtgagacctctctctgctactctcaatcgaagagatatgcctagaagtgaatttggatcagtggacgggcctctacctcatcctcgatggtcagctgaggcatctgggaaaccctctccttctgatccaggatctggtacagctaccatgatgaacagcagctcaagaggctcttcccctaccagggtactcgatgaaggcaaggttaatatggctccaaaagggccccctcctttcccaggagtccctctcatgagcacccccatgggaggccctgtaccaccacccattcgatatggaccaccacctcagctctgcggaccttttgggcctcggccacttcctccaccctttggccctggtatgcgtccaccactaggcttaagagaatttgcaccaggcgttccaccaggaagacgggacctgcctctccaccctcggggatttttacctggacacgcaccatttagacctttaggttcacttggcccaagagagtactttattcctggtacccgattaccacccccaacccatggtccccaggaatacccaccaccacctgctgtaagagacttactgccgtcaggctctagagatgagcctccacctgcctctcagagcactagccaggactgttcacaggctttaaaacagagcccataaaactatgacctctgaggtttcattggaaagaaagtgtactgtgcattatccattacagtaaaggatttcattggcttcaaaatccaaaagtttattttaaaaggtttgttgttagaactaagctgccttggcagtgtgcatttttgagccaaacaattcaaaaatgtcatttcttccctaaataaaaatcaccttttaagctagagcgtccttacaactttgaaatgtgcaataaagaatacctgtgttttagctaatgtagcatatgtaattgcaaaatgatttagaatgtcatgaaaaatatgaacatttcctgtggaaatgctttaagaacatgtatttccattatcctatttttagtgtacaccagctgaatacggagcaatggtgtttataagcgtttttttaaactatctggtcacaaagactgttacgctaaaaatgtttactaaaagatcactaaactatctcccctcttgctgaagttctttgtagtaatagctcataaaaatttgtttattaatatttcccaagtgtctgttgactcattggactgttatgaggcttgtgccatttggggaacatgtaaactcaggctcccagaactgaagatggtggctggtggcacacttccggctgctcctccgtcacctgtgaactctacaagtgacgtctttttatttcaaagaagtttatttcccacttgtatagcattcacatgctttctttacgatcctcattgtctatttgagaatggttttctgagagtgagtttacattagtagcaagagttgtttgacctgatgttccattgtttttaccattcctgtagaaaaagggtgcacaacagaaaaatgaaaatgatgtgtcatggccataaaagtatagaaatctttaaaaattttaaaatgtacagtcccttatctatctttcccattccttgccactgatttttgaggaatataataaaaagattggaagagtataatgccatgagaaagaatgatttaggactgtgagggttataacatgccctaggtcagcaaccaagggttgaaatcagttctgttttagggggaaatgggggcgacagatattattccaaaattaatattaattaatatttaaacgttggtgtttttatttaaaaatcagtaactaaccatctggaattgcaccatacttaaagtcttatccattactacactgtctttaaaacaatgtttctttaaatactctacaacgtttctaagaacgaacttcagacattttaattacagtaataatagcactccttttaaggagtttcagatccacactaaaactaaaatcataaaaggctgatacttttgtttgctgctaggctatattcttccattctttgaagtcctatgatgtaatatttttgaaacctagtgtatgtcttgtcactgttgtgatatttaatcgattaagaataccttgtaaaaaggagcaaaagcttcaatgtgaaacaattttctctctttatactaaacaactgaagatagatagtttagaaagataaggacctttgaaagaagacaactctgtcaaagttcataaggaatataaaaattcttcaggaaaagagaattcaatctatatgtcctcccgtttaatatcaagaatagaagaaattaagaggaaaactccacagaagagcataggccacttttagccatgtaaaaataagattaagtcacaaatacaacttttgaatttacctgtcaatatctctttaggacacaaaacaatgctgaagttaatataatttctaattttaaatgtcatttaagtgtagattatgccatctaggaaggtaagtaggaaaggtaaattaaatctatttttaaaattcaaaatattagagtatttttcccctctaaagccttttttggtgattattctgtatctgacataattgagaaactggtaagctgtaaagattccagtgtagcttctctgagaagttgtgagccagtccataactgcttcctcacatccatctgattgcaccatttctgcagcaaaccccaaagcagggtgccaatatgcagatggcatagggagtatcatccctcagccaaatcacttttccatctctaaagtttcatctattttggaagtcatctccaactaattgtgtctggatttagttgctaaaattgtcttatttatgaagcagcaatattcagcctgaaagcatttctgccatagttgttgtagttatatcgccaatggctgatttttttcattggaaagtaaatttaagtaattcgtgggatgtggtatattctgtgtcaacttcaagataatcactcattttctcgttatattcaggtctgaattaaagttaagttaatcacacagtgttcaatttaagcttctttaatgttgatgaaaggtatttgtagttcatataaactatacttatgtgaaggatagcagatgcttcatataaattatcattttgatatacatatcttatggtttatgagaaaagagaaaaaataatacatcggttttgctacactttaatgggttttttttttaagggattttttttcaggtcttgtcagcaacatcaaacaaaaggtactgagtactccacagggtacagagtgctgccaagcaccttagaaaaattacatgacacggagaaaatgcgcctcttgctccttgaagagcttacagtctagggatttgacaactcacagtcttaggaactgggcaaagtaaggcaaattcttcatcccctagagctattgtggactgaatcattttagaatttggaattaatccaatcaagatgagagacaagactaaatttggctgagaattcattcaggctcgcatagtttttattaacatccgtctagtaaacagaatggacctaacagacaactgaaagtaaagactagatctcttgaagtgcaagggctacaacaacttagttgtggttacttattttaaaaagcaaacatactgaatggtatgactagggtgattacactagtttaaaaataggccaggtactgacactgcattcccctcatgcattgctcatttaaaatagtgaatattaaaatatgtgggctttacatctaacccacagaaagcccaccgcaaatgttctgtgtatcaaatatccacctcatgtgtactatgaaagttttatttatgccccattaagtcaaaagtaaattatagtaagctaatgacctgcatattttcatatggatgaatgtcagtatatctaaataggaaataaatggcgatcctatctacctatataaaaaaaatagaatatctttccagattttgcatactcctcactgtaagaagaggtatgcaggttttaaggtttcacaatcagttgtcagaaaaacagcagttatgcctgcagtatctcgttagcatctgactcaattatttttagattacattgtttagaagacattgtaaacccatctaaaactttgtaattattttgagatggttccaatgttaaccctagaatcatcatcagaaagagtaacaatgtgatgtagaagaacagctaatcgacatgactaaaaatatgctcattttcagaaaaacaatctggtcatctggaaacaatcacagctacaacctagggaacactcccatgtgggatactgatctggccaaggcacactttctaagcaggaaaactatcagatcagggtgaatttaggccacttcagaggtgctgcctataaacatccagacagaccttcttaggcagcagaactggtcccattcctctcaaagcagtttgacactaccctacccacatcaacccaaagcttgacgttaagtcaaaagagcatattggagcaaaagtgaacagatgtgtaaactctagcacattcttattgctgtattaagtctgaagatgagcacatcctacccacaacagtattgttccaggaagcagggtaggagtagtggtaaattagaaaatagactattaattgcacaattaatagaaaagtaaaaacatgtttcaaaatctacaataaacctgtatcccaaggagtcctatacgtcagtgtgatgtgctggactctgaattctgtggtacagctttgcattggactccgtccggcctactggtctgggtacggcttgcttcctgcctgttgaagggtgaatatgctacacagagctatgatggtttctactgagtggtaaaattcacagaagttccaggttcatcatgtcaggatcattccttgtgcaaagtttgatgtagatgaagataaagtggtttcttggtcaataattgcaatttctttcttttaaagtcagtgggtttcttgtatctg

SEQ ID NO: 233 - protein, 785 aa, Homo sapiens
MDSVPATVPSIAATPGDPELVGPLSVLYAAFIAKLLELVATLPDDVQPGPDFYGLPWKPVFITAFLGIASFAIFLWRTVLVVKDRVYQVTEQQISEKLKTIMKENTELVQKLSNYEQKIKESKKHVQETRKQNMILSDEAIKYKDKIKTLEKNQEILDDTAKNLRVMLESEREQNVKNQDLISENKKSIEKLKDVISMNASEFSEVQIALNEAKLSEEKVKSECHRVQEENARLKKKKEQLQQEIEDWSKLHAELSEQIKSFEKSQKDLEVALTHKDDNINALTNCITQLNLLECESESEGQNKGGNDSDELANGEVGGDRNEKMKNQIKQMMDVSRTQTAISVVEEDLKLLQLKLRASVSTKCNLEDQVKKLEDDRNSLQAAKAGLEDECKTLRQKVEILNELYQQKEMALQKKLSQEEYERQEREHRLSAADEKAVSAAEEVKTYKRRIEEMEDELQKTERSFKNQIATHEKKAHENWLKARAAERAIAEEKREAANLRHKLLELTQKMAMLQEEPVIVKPMPGKPNTQNPPRRGPLSQNGSFGPSPVSGGECSPPLTVEPPVRPLSATLNRRDMPRSEFGSVDGPLPHPRWSAEASGKPSPSDPGSGTATMMNSSSRGSSPTRVLDEGKVNMAPKGPPPFPGVPLMSTPMGGPVPPPIRYGPPPQLCGPFGPRPLPPPFGPGMRPPLGLREFAPGVPPGRRDLPLHPRGFLPGHAPFRPLGSLGPREYFIPGTRLPPPTHGPQEYPPPPAVRDLLPSGSRDEPPPASQSTSQDCSQALKQSP

SEQ ID NO: 234 - DNA, 231 bp, Homo sapiens
atggctcgtggacagcagaaaattcagtctcagcagaataatgccaaaaagcaagctggacaaaagaagaaacaaggacatgaccaaaaggctgctgccaaagctgccttaatatatacctgcactgtctgtaggacacgaatgccagaccctaagaccttcaagcagcactttgagagcaagcatcctaagacttcacttcctccagaattagctgatgttcaggcataa

SEQ ID NO: 235 - protein, 76 aa, Homo sapiens [sequence omitted]

SEQ ID NO: 236 - DNA, 2058 bp, Homo sapiens
cacagccggccgacaccacaccagccggggagccgccgccgccgccgccacctctgagcagccggctgggagcgagagccgacagctagtctgcaagccaccgctgtcgccatggggagccgcgtctcgcgggaagacttcgagtgggtctacaccgaccagccgcacgccgaccggcgccgggagatcctggcaaagtatccagagataaagtccttgatgaaacctgatcccaatttgatatggattataattatgatggttctcacccagttgggtgcattttacatagtaaaagacttggactggaaatgggtcatatttggggcctatgcgtttggcagttgcattaaccactcaatgactctggctattcatgagattgcccacaatgctgcctttggcaactgcaaagcaatgtggaatcgctggtttggaatgtttgctaatcttcctattgggattccatattcaatttcctttaagaggtatcacatggatcatcatcggtaccttggagctgatggcgtcgatgtagatattcctaccgattttgagggctggttcttctgtaccgctttcagaaagtttatatgggttattcttcagcctctcttttatgcctttcgacctctgttcatcaaccccaaaccaattacgtatctggaagttatcaataccgtggcacaggtcacttttgacattttaatttattactttttgggaattaaatccttagtctacatgttggcagcatctttacttggcctgggtttgcacccaatttctggacattttatagctgagcattacatgttcttaaagggtcatgaaacttactcatattatgggcctctgaatttacttaccttcaatgtgggttatcataatgaacatcatgatttccccaacattcctggaaaaagtcttccactggtgaggaaaatagcagctgaatactatgacaacctccctcactacaattcctggataaaagtactgtatgattttgtgatggatgatacaataagtccctactcaagaatgaagaggcaccaaaaaggagagatggtgctggagtaaatatcattagtgccaaagggattcttctccaaaactttagatgataaaatggaatttttgcattattaaacttgagaccagtgatgctcagaagctcccctggcacaatttcagagtaagagctcggtgataccaagaagtgaatctggcttttaaacagtcagcctgactctgtactgctcagtttcactcacaggaaacttgtgacttgtgtattatcgtcattgaggatgtttcactcatgtctgtcattttataagcatatcatttaaaaagcttctaaaaagctatttcgccaggcacggtggctcatgcctataatcccagcactttgggaggccaaggtgggtggatcacctgaggtcaggagttcgagaccagcctggccaacacggtgaaaccccatctctactaaaaatgcaaaaattagccgggcgtggcggcacatgcctgtaatcccagctacatgggaggctgaggtgggagaattgcttgaacccaggaggcggaggcagaggctgcagtgacccaagattgtgccactgcactccaccctgggcaacagagcaagaccccatctcaaaaataaataaatatatataaaaaataaaaagctatttctagtttatttcactataaagttttgctttattaaaaagctaataaacagctattaatcacagtgtattagtatttgttacatttttgtatttcactatctttatactatataatatggtaacttgggtaccgggggaactttaaaatttcatctcaaaaataatttttaaaaagcctgaggtatgatatagcataaaagattgagatgaaaatatatttccctgtaagctgaattactcatttaaaaattttaacttctatatgggacccgaattagacactgctgaatcctgtacagccttactcataaataaagtacttactgaatttccaccattcaaaaaaaaaaaaaaa

SEQ ID NO: 237 - protein, 323 aa, Homo sapiens
MGSRVSREDFEWVYTDQPHADRRREILAKYPEIKSLMKPDPNLIWIIIMMVLTQLGAFYIVKDLDWKWVIFGAYAFGSCINHSMTLAIHEIAHNAAFGNCKAMWNRWFGMFANLPIGIPYSISFKRYHMDHHRYLGADGVDVDIPTDFEGWFFCTAFRKFIWVILQPLFYAFRPLFINPKPITYLEVINTVAQVTFDILIYYFLGIKSLVYMLAASLLGLGLHPISGHFIAEHYMFLKGHETYSYYGPLNLLTFNVGYHNEHHDFPNIPGKSLPLVRKIAAEYYDNLPHYNSWIKVLYDFVMDDTISPYSRMKRHQKGEMVLE

SEQ ID NO: 238 - DNA, 1681 bp, Homo sapiens
cacagccggccgacaccacaccagccggggagccgccgccgccgccgccacctctgagcagccggctgggagcgagagccgacagctagtctgcaagccaccgctgtcgccatggggagccgcgtctcgcgggaagacttcgagtgggtctacaccgaccagccgcacgccgaccggcgccgggagatcctggcaaagtatccagagataaagtccttgatgaaacctgatcccaatttgatatggattataattatgatggttctcacccagttgggtgcattttacatagtaaaagacttggactggaaatgggtcatatttggggcctatgcgtttggcagttgcattaaccactcaatgactctggctattcatgagattgcccacaatgctgcctttggcaactgcaaagcaatgtggaatcgctggtttggaatgtttgctaatcttcctattgggattccatattcaatttcctttaagaggtatcacatggatcatcatcggtaccttggagctgatggcgtcgatgtagatattcctaccgattttgagggctggttcttctgtaccgctttcagaaagtttatatgggttattcttcagcctctcttttatgcctttcgacctctgttcatcaaccccaaaccaattacgtatctggaagttatcaataccgtggcacaggtcacttttgacattttaatttattactttttgggaattaaatccttagtctacatgttggcagcatctttacttggcctgggtttgcacccaatttctggacattttatagctgagcattacatgttcttaaagggtcatgaaacttactcatattatgggcctctgaatttacttaccttcaatgtgggttatcataatgaacatcatgatttccccaacattcctggaaaaagtcttccactggtgaggaaaatagcagctgaatactatgacaacctccctcactacaattcctggataaaagtactgtatgattttgtgatggatgatacaataagtccctactcaagaatgaagaggcaccaaaaaggagagatggtgctggagtaaatatcattagtgccaaagggattcttctccaaaactttagatgataaaattagccgggcgtggcggcacatgcctgtaatcccagctacatgggaggctgaggtgggagaattgcttgaacccaggaggcggaggcagaggctgcagtgacccaagattgtgccactgcactccaccctgggcaacagagcaagaccccatctcaaaaataaataaatatatataaaaaataaaaagctatttctagtttatttcactataaagttttgctttattaaaaagctaataaacagctattaatcacagtgtattagtatttgttacatttttgtatttcactatctttatactatataatatggtaacttgggtaccgggggaactttaaaatttcatctcaaaaataatttttaaaaagcctgaggtatgatatagcataaaagattgagatgaaaatatatttccctgtaagctgaattactcatttaaaaattttaacttctatatgggacccgaattagacactgctgaatcctgtacagccttactcataaataaagtacttactgaatttccaccattcaaaaaaaaaaaaaaa

SEQ ID NO: 239 - protein, 323 aa, Homo sapiens; identical to SEQ ID NO: 237

SEQ ID NO: 240 - DNA, 2921 bp, Homo sapiens
ctaggagctggcggtccgagctgtggcttgaaagaccgacgcgatgaagcccagacctgcagggttcgtggataataaactcaagcagcgagtcatccagtaccttaccagtaacaaatgtggcaaatatgtggacattggagtcttagcgtctgatttacaaagagtgtacagtatagactatggtcgaagaaaaagaaatgcttttaggattcaggtagaaaaagtatttagcataattagtagtgagaaggaacttaagaatttaacagaattagaagatgaacatttggcaaaaagggcaagacaaggtgaagaggataatgagtatactgaaagctattctgatgatgattcaagtatggaagactacccagatccacagtcagcaaatcacatgaacagttccctgctgtctttatatcggaaaggaaatcctgattctgtttcaaatactcctgagatggagcaaagagaaaccacctcttcaacaccacggataagttccaaaacaggctccattcccttgaagacccctgccaaagattctgaaggaggatggtttattgacaaaaccccaagtgtaaagaaagacagttttttcttggacctgtcatgtgagaaaagtaatcctaagaagccaataactgagatacaggattcaaaagattcttctcttttggagagtgatatgaaacggaaaggcaagctaaagaataaaggaagcaaaaggaagaaagaagatcttcaggaagtagatggagaaattgaagctgtcctgcaaaagaaagctaaagccagggggttagaattccagatctccaacgtgaagtttgaagatgtgggaggcaatgatatgacattaaaagaggtctgcaagatgctcatacacatgcgtcacccggaggtgtaccaccacctgggcgtcgtgccccctcgtggagttctccttcatggaccaccaggctgtgggaagacattacttgcacatgcaattgctggggaacttgacctgccaattttgaaagtggctgctccagagattgtgtctggagtatccggagagtctgagcagaagctgagagaactatttgagcaagctgtgtcaaatgcaccatgtatcattttcattgatgaaattgatgctattacccccaaaagagaagtggcttcaaaagatatggaacgaagaattgtagcccaactcctaacctgcatggatgatctgaataatgtggctgctacagcccgggtcctagttattggagctactaatcgaccagactcgttagaccctgctttgagacgtgcgggaaggttcgaccgagaaatatgcctaggtatcccagatgaagcatccagggaaagaatacttcaaacattgtgcagaaaactgaggcttcctcaagcttttgatttctgtcacttagcacacctaactccaggctttgttggtgctgatctcatggcactgtgccgagaggcagcaatgtgtgcagtcaatagagtcttaatgaagctacaggaacagcagaagaaaaatcctgaaatggaagatttgccatctaaaggagtccaggaggaaaggctgggaactgagcccacttctgaaacacaggatgaattacaaaggctgctggggttgctaagagaccaagatcccctctcagaggagcagatgcaaggactgtgcattgaactgaatgatttcattgttgctctatcctcagtccaaccctctgccaaaagggaaggctttgtcactgtccctaatgtgacatgggcagatattggtgccctggaagacattagagaggagctcaccatggcaatattggcaccagtacgcaacccagaccagttcaaagctcttggattggtgactccagctggggtcctccttgctggtcctcctggctgtgggaagactctgctggcgaaggctgttgcaaatgagtccggactaaattttatatctgtcaagggccccgaattactaaacatgtatgttggtgagagtgaacgtgctgtgcgacaagtttttcaacgagccaagaactcagcaccctgtgtgatattctttgatgaagtggatgctttatgtcctcgaagatcagaccgagagacaggggcaagtgtccgagtggtgaatcagctacttacagagatggatggtctggaagcacgccagcaggtttttattatggcagccactaacaggccagatataattgaccctgcaatcctgcgcccgggccgcctggacaaaacactgtttgtgggtttaccgccccctgcagatcgccttgccatcttaaaaactatcacaaaaaatggtaccaaaccaccactggatgcagatgtaaatttggaagcaattgctggtgaccttcgctgtgattgctatacgggcgcagatctctctgctttggtacgagaagcttctatctgtgccctgagacaggaaatggcaagacagaagagtggaaatgaaaaaggtgaactcaaggttagtcataagcattttgaagaagctttcaagaaagtaagatcatctatatcaaaaaaggatcaaatcatgtatgaacgtttgcaggagtccctcagccggtgatgtctccagcagccggcttagaggagctagcccatcaagccggcagagaatcccccacacgctctgaaggacccactttcagctggacacaggcgcggcctcatgtaaacattttattttcaaatgaatgaggccaagctgaagctgaagctgaagattcttcccatctggccagccttgtgtgaaaatgccttcttcctctttaagaaaaaggacaatttttaaactgctgaaataaaatgactgttacatttttcaaataaaacttttactttgaactattttgactataaaaaaaaaaaaaaaa

SEQ ID NO: 241 - protein, 856 aa, Homo sapiens
MKPRPAGFVDNKLKQRVIQYLTSNKCGKYVDIGVLASDLQRVYSIDYGRRKRNAFRIQVEKVFSIISSEKELKNLTELEDEHLAKRARQGEEDNEYTESYSDDDSSMEDYPDPQSANHMNSSLLSLYRKGNPDSVSNTPEMEQRETTSSTPRISSKTGSIPLKTPAKDSEGGWFIDKTPSVKKDSFFLDLSCEKSNPKKPITEIQDSKDSSLLESDMKRKGKLKNKGSKRKKEDLQEVDGEIEAVLQKKAKARGLEFQISNVKFEDVGGNDMTLKEVCKMLIHMRHPEVYHHLGVVPPRGVLLHGPPGCGKTLLAHAIAGELDLPILKVAAPEIVSGVSGESEQKLRELFEQAVSNAPCIIFIDEIDAITPKREVASKDMERRIVAQLLTCMDDLNNVAATARVLVIGATNRPDSLDPALRRAGRFDREICLGIPDEASRERILQTLCRKLRLPQAFDFCHLAHLTPGFVGADLMALCREAAMCAVNRVLMKLQEQQKKNPEMEDLPSKGVQEERLGTEPTSETQDELQRLLGLLRDQDPLSEEQMQGLCIELNDFIVALSSVQPSAKREGFVTVPNVTWADIGALEDIREELTMAILAPVRNPDQFKALGLVTPAGVLLAGPPGCGKTLLAKAVANESGLNFISVKGPELLNMYVGESERAVRQVFQRAKNSAPCVIFFDEVDALCPRRSDRETGASVRVVNQLLTEMDGLEARQQVFIMAATNRPDIIDPAILRPGRLDKTLFVGLPPPADRLAILKTITKNGTKPPLDADVNLEAIAGDLRCDCYTGADLSALVREASICALRQEMARQKSGNEKGELKVSHKHFEEAFKKVRSSISKKDQIMYERLQESLSR

SEQ ID NO: 242 - DNA, 2847 bp, Homo sapiens
ctaggagctggcggtccgagctgtggcttgaaagaccgacgcgatgaagcccagacctgcagggttcgtggataataaactcaagcagcgagtcatccagtatagactatggtcgaagaaaaagaaatgcttttaggattcaggtagaaaaagtatttagcataattagtagtgagaaggaacttaagaatttaacagaattagaagatgaacatttggcaaaaagggcaagacaaggtgaagaggataatgagtatactgaaagctattctgatgatgattcaagtatggaagactacccagatccacagtcagcaaatcacatgaacagttccctgctgtctttatatcggaaaggaaatcctgattctgtttcaaatactcctgagatggagcaaagagaaaccacctcttcaacaccacggataagttccaaaacaggctccattcccttgaagacccctgccaaagattctgaaggaggatggtttattgacaaaaccccaagtgtaaagaaagacagttttttcttggacctgtcatgtgagaaaagtaatcctaagaagccaataactgagatacaggattcaaaagattcttctcttttggagagtgatatgaaacggaaaggcaagctaaagaataaaggaagcaaaaggaagaaagaagatcttcaggaagtagatggagaaattgaagctgtcctgcaaaagaaagctaaagccagggggttagaattccagatctccaacgtgaagtttgaagatgtgggaggcaatgatatgacattaaaagaggtctgcaagatgctcatacacatgcgtcacccggaggtgtaccaccacctgggcgtcgtgccccctcgtggagttctccttcatggaccaccaggctgtgggaagacattacttgcacatgcaattgctggggaacttgacctgccaattttgaaagtggctgctccagagattgtgtctggagtatccggagagtctgagcagaagctgagagaactatttgagcaagctgtgtcaaatgcaccatgtatcattttcattgatgaaattgatgctattacccccaaaagagaagtggcttcaaaagatatggaacgaagaattgtagcccaactcctaacctgcatggatgatctgaataatgtggctgctacagcccgggtcctagttattggagctactaatcgaccagactcgttagaccctgctttgagacgtgcgggaaggttcgaccgagaaatatgcctaggtatcccagatgaagcatccagggaaagaatacttcaaacattgtgcagaaaactgaggcttcctcaagcttttgatttctgtcacttagcacacctaactccaggctttgttggtgctgatctcatggcactgtgccgagaggcagcaatgtgtgcagtcaatagagtcttaatgaagctacaggaacagcagaagaaaaatcctgaaatggaagatttgccatctaaaggagtccaggaggaaaggctgggaactgagcccacttctgaaacacaggatgaattacaaaggctgctggggttgctaagagaccaagatcccctctcagaggagcagatgcaaggactgtgcattgaactgaatgatttcattgttgctctatcctcagtccaaccctctgccaaaagggaaggctttgtcactgtccctaatgtgacatgggcagatattggtgccctggaagacattagagaggagctcaccatggcaatattggcaccagtacgcaacccagaccagttcaaagctcttggattggtgactccagctggggtcctccttgctggtcctcctggctgtgggaagactctgctggcgaaggctgttgcaaatgagtccggactaaattttatatctgtcaagggccccgaattactaaacatgtatgttggtgagagtgaacgtgctgtgcgacaagtttttcaacgagccaagaactcagcaccctgtgtgatattctttgatgaagtggatgctttatgtcctcgaagatcagaccgagagacaggggcaagtgtccgagtggtgaatcagctacttacagagatggatggtctggaagcacgccagcaggtttttattatggcagccactaacaggccagatataattgaccctgcaatcctgcgcccgggccgcctggacaaaacactgtttgtgggtttaccgccccctgcagatcgccttgccatcttaaaaactatcacaaaaaatggtaccaaaccaccactggatgcagatgtaaatttggaagcaattgctggtgaccttcgctgtgattgctatacgggcgcagatctctctgctttggtacgagaagcttctatctgtgccctgagacaggaaatggcaagacagaagagtggaaatgaaaaaggtgaactcaaggttagtcataagcattttgaagaagctttcaagaaagtaagatcatctatatcaaaaaaggatcaaatcatgtatgaacgtttgcaggagtccctcagccggtgatgtctccagcagccggcttagaggagctagcccatcaagccggcagagaatcccccacacgctctgaaggacccactttcagctggacacaggcgcggcctcatgtaaacattttattttcaaatgaatgaggccaagctgaagctgaagctgaagattcttcccatctggccagccttgtgtgaaaatgccttcttcctctttaagaaaaaggacaatttttaaactgctgaaataaaatgactgttacatttttcaaataaaacttttactttgaactattttgactataaaaaaaaaaaaaaaa

SEQ ID NO: 243 - protein, 750 aa, Homo sapiens
MEDYPDPQSANHMNSSLLSLYRKGNPDSVSNTPEMEQRETTSSTPRISSKTGSIPLKTPAKDSEGGWFIDKTPSVKKDSFFLDLSCEKSNPKKPITEIQDSKDSSLLESDMKRKGKLKNKGSKRKKEDLQEVDGEIEAVLQKKAKARGLEFQISNVKFEDVGGNDMTLKEVCKMLIHMRHPEVYHHLGVVPPRGVLLHGPPGCGKTLLAHAIAGELDLPILKVAAPEIVSGVSGESEQKLRELFEQAVSNAPCIIFIDEIDAITPKREVASKDMERRIVAQLLTCMDDLNNVAATARVLVIGATNRPDSLDPALRRAGRFDREICLGIPDEASRERILQTLCRKLRLPQAFDFCHLAHLTPGFVGADLMALCREAAMCAVNRVLMKLQEQQKKNPEMEDLPSKGVQEERLGTEPTSETQDELQRLLGLLRDQDPLSEEQMQGLCIELNDFIVALSSVQPSAKREGFVTVPNVTWADIGALEDIREELTMAILAPVRNPDQFKALGLVTPAGVLLAGPPGCGKTLLAKAVANESGLNFISVKGPELLNMYVGESERAVRQVFQRAKNSAPCVIFFDEVDALCPRRSDRETGASVRVVNQLLTEMDGLEARQQVFIMAATNRPDIIDPAILRPGRLDKTLFVGLPPPADRLAILKTITKNGTKPPLDADVNLEAIAGDLRCDCYTGADLSALVREASICALRQEMARQKSGNEKGELKVSHKHFEEAFKKVRSSISKKDQIMYERLQESLSR

SEQ ID NO: 244 - DNA, 652 bp, Homo sapiens
ggacggaaggagcggcggcgacggaggaggaggatggaggcggtggtgttcgtcttctctctcctcgattgttgcgcgctcatcttcctctcggtctacttcataattacattgtctgatttagaatgtgattacattaatgctagatcatgttgctcaaaattaaacaagtgggtaattccagaattgattggccataccattgtcactgtattactgctcatgtcattgcactggttcatcttccttctcaacttacctgttgccacttggaatatatatcgatacattatggtgccgagtggtaacatgggagtgtttgatccaacagaaatacacaatcgagggcagctgaagtcacacatgaaagaagccatgatcaagcttggtttccacttgctctgcttcttcatgtatctttatagtatgatcttagctttgataaatgactgaagctggagaagccgtggttgaagtcagcctacactacagtgcacagttgaggagccagagacttcttaaatcatccttagaaccgtgaccatagcagtatatattttcctcttggaacaaaaaactatttttgctgtatttttaccatataaagtatttaaaaaacaggaaaaaaaaaaaaaaaaaaaaaaaaaaaaaa

SEQ ID NO: 245 - protein, 139 aa, Homo sapiens
MEAVVFVFSLLDCCALIFLSVYFIITLSDLECDYINARSCCSKLNKWVIPELIGHTIVTVLLLMSLHWFIFLLNLPVATWNIYRYIMVPSGNMGVFDPTEIHNRGQLKSHMKEAMIKLGFHLLCFFMYLYSMILALIND

SEQ ID NO: 246 - DNA, 4447 bp, Homo sapiens
atgcggcggcgctcgcggatgctgctctgcttcgccttcctgtgggtgctgggcatcgcctactacatgtactcggggggcggctctgcgctggccgggggcgcgggcggcggcgccggcaggaaggaggactggaatgaaattgaccccattaaaaagaaagaccttcatcacagcaatggagaagagaaagcacaaagcatggagaccctccctccagggaaagtacggtggccagactttaaccaggaagcttatgttggagggacgatggtccgctccgggcaggacccttacgcccgcaacaagttcaaccaggtggagagtgataagcttcgaatggacagagccatccctgacacccggcatgaccagtgtcagcggaagcagtggcgggtggatctgccggccaccagcgtggtgatcacgtttcacaatgaagccaggtcggccctactcaggaccgtggtcagcgtgcttaagaaaagcccgccccatctcataaaagaaatcatcttggtggatgactacagcaatgatcctgaggacggggctctcttggggaaaattgagaaagtgcgagttcttagaaatgatcgacgagaaggcctcatgcgctcacgggttcggggggccgatgctgcccaagccaaggtcctgaccttcctggacagtcactgcgagtgtaatgagcactggctggagcccctcctggaaagggtggcggaggacaggactcgggttgtgtcacccatcatcgatgtcattaatatggacaactttcagtatgtgggggcatctgctgacttgaagggcggttttgattggaacttggtattcaagtgggattacatgacgcctgagcagagaaggtcccggcaggggaacccagtcgcccctataaaaacccccatgattgctggtgggctgtttgtgatggataagttctattttgaagaactggggaagtacgacatgatgatggatgtgtggggaggagagaacctagagatctcgttccgcgtgtggcagtgtggtggcagcctggagatcatcccgtgcagccgtgtgggacacgtgttccggaagcagcacccctacacgttcccgggtggcagtggcactgtctttgcccgaaacacccgccgggcagcagaggtctggatggatgaatacaaaaatttctattatgcagcagtgccttctgctagaaacgttccttatggaaatattcagagcagattggagcttaggaagaaactcagctgcaagcctttcaaatggtaccttgaaaatgtctatccagagttaagggttccagaccatcaggatatagcttttggggccttgcagcagggaactaactgcctcgacactttgggacactttgctgatggtgtggttggagtttatgaatgtcacaatgctgggggaaaccaggaatgggccttgacgaaggagaagtcggtgaagcacatggatttgtgccttactgtggtggaccgggcaccgggctctcttataaagctgcagggctgccgagaaaatgacagcagacagaaatgggaacagatcgagggcaactccaagctgaggcacgtgggcagcaacctgtgcctggacagtcgcacggccaagagcgggggcctaagcgtggaggtgtgtggcccggccctttcgcagcagtggaagttcacgctcaacctgcagcagtaggagggtccgggaggccctgccgtcctgtctcctgcaccattgggtggagtctggtgatcgcattattgattatgtttcttaaactttctgcgaaactaatatacctcagtattccatcatggtctgaaagtcaaacttcggcaaggcacggacgactgtgcagacacatcagcggcaagaagcgagaactgccctccccctcctctcggtgcagccagccgggcccccttccccaggccggagcgcccctcttccttccagctttcacttctgccggtccgcaactgagtgacacccagcgacaaccgactggggagtggtagaagcaactgaacggatgcgtgcgagctgaggacagggcgggaggaggggcacacatgccccaggggagcgaggagaactcttgaaatctccattttcaatcccttcgaaatcacgtatggtttccacaaagccgagtcgtgtcacgtggcaggtttacgtcaatagtccctctctctgctcctccattcgcaagtgtcttcctgggccagactcccctccccctcatgtacttgctatattgaggatgaagttttctatggtgggacactaaatataaagctatatagagaaagaatgtacggtcagttccctatggtttctgtagatcatcgtcatcttgtatattccccacaaagccgttcgcagcttccgggagaaggggccagagcccggtatggggcaagttctctaacagagggaggaggtggcctttgtgtcccctggaggcccccggatccagccagttggtgctactgctgtggccagctggggggcttcctccagaccaccggcctcggccccggcatccctgttgggcgtcagcctgagagtccctactgtgcgtcagaatccaccttgcgtgctgtgcgtatctgtgaacctgggagacggttacttattttgacagatatcactttgggtctttttacattaaatttcttttctctaaggaatataagacataccccatagctctgtgtgagccagcaataccgctgccccctggcgacagggcagaccaatgatgccaggcagctgtcacacgctagtattggcttcattgtgatctgagccctgcacgctgggccttcagaattaatggccagcagtgtcagggatgagcccgtcagccagggcacaggcctggctcacagtcctgcacacctgctggcctgggggagctccagccaggcagcgagtcctgccccgcccgcagctccctcccacaccccgcctggccaagatgactgcttcagggggctttggggaaagaattaggaagggtcagaaccaaacaatacctgctcatttacactgaggattcagggcgggagacaggagccttggggtcctgttaaaccacagacagttatgaactgaaagtcataacggggagaggtgcctggcttctacctgggtgctcaggaatgttcctcctcacccctgccactctgtggtcggtgccctgcttcctcctccactcctggccgccttctccagcgccgcacacacagatgctcagtctcagagaggctggcacggcctggcagtctgagaaaatcgtcagttagccactgcaggccctcggtgggacagcggcggccttggattaggagccacctgggagtgtgccggtgccatgctcctccctgtgtcttgtatgaaagggccactgtgtgtcttcctccccggcgggagcccacatgttgcactgtaggacagcggcccgaagtggaagcctggctggaggctgccctataggtctctctccgcctcccctgccatgcaaccagatgtgtgtgaatgggccacgtgcccccacgctggatactccgccacgcttctgtctttcacggtgggcgctcggggggagctgagaaaaccccttagtactgtgcgagctgtggagtgcaggccagagcagggtgtgcgtagcccccagcacccaggttcttctgtcagaccctgtgacctgcgagctgctactactgtaaggagggaaatggatgaatctggctcgttttaaaatcacgttttctgacgaatcctttgccccttcacctttaccccgcccgcacccctaggccctctcagccttcctatcatcccacgtgtctacccagacccttgtgcggcccatgccctgggggcggcgtcctgtccctgagctgggaggcggctttggatggtccgggcgtcaagagcaggggtgggccggggaggggtcctttgcggtgagctatgtttacattgacacagtgtgccaaagtgacttactgcggttgcgttagtttctgtcatcaggacactatctcaccctcccactcctgtttttaaaactcagaattctttcctaagagcccttcgaagcaaagcgtgccgaagttagttgtcttctctgtgctggtcctttcttatgtcctcataaaagctcagatgatggtatctgtgagtatgttttgcaaattcaaaatatagtttggtaattttttttgccagttgatttttaaaaagaactgctgtacagagctagtactttgtccattttatgaatggaaaccatccttgaaaattgtttaacttaaataaagagaagatactttctagataccgctctttgctggccagagtctgtcctggtgtgtgaaggctgggtggggtgggtgtggggactgggattggggtc

SEQ ID NO: 247 - protein, 571 aa, Homo sapiens
MRRRSRMLLCFAFLWVLGIAYYMYSGGGSALAGGAGGGAGRKEDWNEIDPIKKKDLHHSNGEEKAQSMETLPPGKVRWPDFNQEAYVGGTMVRSGQDPYARNKFNQVESDKLRMDRAIPDTRHDQCQRKQWRVDLPATSVVITFHNEARSALLRTVVSVLKKSPPHLIKEIILVDDYSNDPEDGALLGKIEKVRVLRNDRREGLMRSRVRGADAAQAKVLTFLDSHCECNEHWLEPLLERVAEDRTRVVSPIIDVINMDNFQYVGASADLKGGFDWNLVFKWDYMTPEQRRSRQGNPVAPIKTPMIAGGLFVMDKFYFEELGKYDMMMDVWGGENLEISFRVWQCGGSLEIIPCSRVGHVFRKQHPYTFPGGSGTVFARNTRRAAEVWMDEYKNFYYAAVPSARNVPYGNIQSRLELRKKLSCKPFKWYLENVYPELRVPDHQDIAFGALQQGTNCLDTLGHFADGVVGVYECHNAGGNQEWALTKEKSVKHMDLCLTVVDRAPGSLIKLQGCRENDSRQKWEQIEGNSKLRHVGSNLCLDSRTAKSGGLSVEVCGPALSQQWKFTLNLQQ

SEQ ID NO: 248 - DNA, 3453 bp, Homo sapiens
atgcctgactacagaactcgagctctcttcgtgcaaagtactctcggggactctgcaggacctgagctgcagttgctcagcatagtgcccggccgggatctgcagccaagcgattcattcacagcctcctcctcaccaccaccatctgtgtggtcagaacttgagcacatccgtggaaaatcagaagcaaccacagagctaaaaagacccagccttccagggagtattcattcctgcctatgtggggtgtggtgtggcgtggggaagagaacccccagctccttggtgtccagcttgcaggaccttgagctccttggccagaggcagcgacagctgtggatggagtcgacgcctcggccgccctataatccattcctcgtgccctgcacacccgtggggaaactcagtgcagagcatggaggtcccacccgaaagatgccccccagcgccagtgccgtggacttcttccagctctttgtcccagacaacgtcctcaagaacatggtggtgcagacaaacatgtatgccaagaagttccaggagcggtttgggagcgacggagcctgggtggaggtgacgctgacggagatgaaggcgttcctgggctacatgatctccaccagcatctcccactgcgagtccgtcctcagcatctggagcggaggcttctacagcaaccgcagcctcgccctcgtcatgagccaggcccgcttcgagaagatcctcaagtacttccacgtcgtggccttccgctccagccagaccacgcacgggctctacaaggtccagcccttcctcgactccctgcagaacagcttcgactctgccttcaggccttcccaaacccaggtgctacatgaacccctgatcgatgaggatcctgtattcattgccacgtgcacagagcgggagctgcgaaagaggaaaaagcggaaattcagcctctgggtcagacaatgttcttccactggcttcatcatccagatttatgtccacctgaaggaaggtgggggcccagatggcctggatgcgctgaagaataagccccagctccacagcatggtggccaggagcctgtgccggaacgcggcaggcaagaactacatcattttcacggggcccagcatcaccagcctgacgctgtttgaagagtttgagaagcaagggatttactgctgcggcttgctccgcgcgcggaagagtgactgcaccggcctcccactgtccatgctgaccaacccagccacacccccggcccggggccagtaccaaatcaagatgaaggggaacatgtccttgatctgctggtacaacaaaggacacttccgcttcctgaccaacgcctactccccggtgcagcagggagtcatcatcaaaaggaagagtggggagatcccatgccccttggccgtggaggcgtttgccgctcacctgagctacatctgcagatacgatgacaaatacagcaagtatttcatttctcataaaccaaacaagacctggcagcaggtgttctggttcgccatcagcatcgccatcaacaatgcctacatcctgtacaaaatgtcagacgcctaccacgtgaagaggtacagccgggcgcagtttggagagagactcgtcagagagctgctgggcttggaggatgcctctccgacccactgatgctgggggcgcaggactcggtcaagggaggggcaagaggaggaggagagcctgccgttccaacttgcccatcagagacccggacacggcctggtgtgtggcttgctgcctgggagggatgcacagggcctctggagggacaggatggacctggtcagaggacggttgctgtcctcatttgcattccaagaagagcatgtcctccctcgagaaacagtgccgccggtgtgatgagcacttacacccacgttctcaagggcagattctctcatgacatccgtggagcttgcgaggcagcgtggactggtgactgtgaaggaaggcccccgtggtagaatgagctggagcacgctctaagagagatgcctgcttcctaaagatctacagcaatctgggacgtggttcaagttcaagacttgaaggaagcaaagacgccctgcatggttacaatggctcaggtgtcaggggaggccggagggttttccagcatttgcctcatgccagcacctttgaaccggtctcttagaagaagacacacatcctgggtgtacagtggtgaaatggggagtgggtgcccattctgaaaaacgaggcattcctgctcattccctctgcttagctggtgggcaggggagagagggaaatgccaaaaacttggagtgaaggatgatgctattttttatttttaaatatatcttcaggttattttcttactgttgcttcagatctaatgtaaaaggcagatgtcccctcctctccacccccgacgctgaccccggcctcagtcacggctctttgcatgatcacagttctgtgttctggcctgtggcagggccgggaagggccgctggcttccgaacagacgtggttgctctccacgaggcgcatggggagcccgcgggccctaagctttgtcgcagatgtcatcattggcagaattacttgtcttgaaaaataagtagcattgctgaaacacacaaccgaattctctacgatggccatttgctcattgtctttcctctgtgtgtagtgagtgaccctggcagtgtttgcctgctcagagtggcccctcagaacaacagggctggccttggaaaaaccccaaaacaggactgtggtgacaactctggtcaggtgtgatttgacatgagggccggaggcggttgctgacggcaggactggagaggctgcgtgcccggcactggcagcgaggctcgtgtgtcccccaggcagatctgggcactttcccaacccaggtttatgcgtctccagggaagcctcggtgccagagtggtgggcagatctgaccatccccacagaccagaaacaaggaatttctgggattacccagtcccccttcaacccagttgatgtaaccacctcattttttacaaatacagaatctattctactcaggctatgggcctcgtcctcactcagttattgcgagtgttgctgtccgcatgctccgggccccacgtggctcctgtgctctagatcatggtgactcccccgccctgtggttggaatcgatgccacggattgcaggccaaatttcagatcgtgtttccaaacacccttgctgtgccctttaatgggattgaaagcacttttaccacatggagaaatatatttttaatttgtgatgcttttctacaaggtccactatttctgagtttaatgtgtttccaacacttaaggagactctaatgaaagctgatgaattttcttttctgtccaaacaagtaaaataaaaataaaagtctatttagatgttgaaaaaaaaaa

SEQ ID NO: 249 - protein, 554 aa, Homo sapiens
MPDYRTRALFVQSTLGDSAGPELQLLSIVPGRDLQPSDSFTASSSPPPSVWSELEHIRGKSEATTELKRPSLPGSIHSCLCGVWCGVGKRTPSSLVSSLQDLELLGQRQRQLWMESTPRPPYNPFLVPCTPVGKLSAEHGGPTRKMPPSASAVDFFQLFVPDNVLKNMVVQTNMYAKKFQERFGSDGAWVEVTLTEMKAFLGYMISTSISHCESVLSIWSGGFYSNRSLALVMSQARFEKILKYFHVVAFRSSQTTHGLYKVQPFLDSLQNSFDSAFRPSQTQVLHEPLIDEDPVFIATCTERELRKRKKRKFSLWVRQCSSTGFIIQIYVHLKEGGGPDGLDALKNKPQLHSMVARSLCRNAAGKNYIIFTGPSITSLTLFEEFEKQGIYCCGLLRARKSDCTGLPLSMLTNPATPPARGQYQIKMKGNMSLICWYNKGHFRFLTNAYSPVQQGVIIKRKSGEIPCPLAVEAFAAHLSYICRYDDKYSKYFISHKPNKTWQQVFWFAISIAINNAYILYKMSDAYHVKRYSRAQFGERLVRELLGLEDASPTH

SEQ ID NO: 250 - DNA, 2893 bp, Homo sapiens
taaaagcggcccggggcggccggcgcggcgcagaccctcggtgggcagcgcactccagtcttcccaggctagcggctgcagggagctccggcccgcggcccctccgcctcaagtctgggagctgccggtcccactctgtctttgcctatggggattcgagagtttcccagcggcgcacccaggggcaagagcattgccgttggcatgaggaggtcaccggacgtcagcccccggagactgtccgacatcagcccccagctccggcagctcaagtacttggtggtggacgaggcgattaaggaggatctgaaatggtcgcgctccgtggaggatctcaccagcgggccggtggggctcacgtccatcgaggagcggatcctgcgcatcactggctactatggctaccagccctgggcagcgagctgcaaaagggaggagcgcccccgggactccccgggcccggcggaggcccaggcaccggccggggtggaggccggcgggagagcgagtcgccgctgctggacgtgctcccgggcgcaactcaagaagatcttctggggcgtggcggtcgtgctgtgcgtgtgctcctcgtgggcgggctccacgcagctcgccaagctgaccttcaggaagttcgacgcgcccttcaccctcacgtggtttgccaccaactggaactttttattcttcccgttgtactacgtggggcacgtctgcaagtccacagagaagcagtctgtgaagcagcgatacagggaatgctgtcgattttttggagacaatggcttgactttgaaggtgttttttaccaaggcagcaccctttggtgttctttggacactcacaaactacctgtacttacatgcaataaagaaaataaacactacggatgtctccgtgttgttctgctgcaacaaagcttttgtgttcttgctctcatggatcgttctcagggacagattcatgggagtgaggattgtggccgccatcctcgccatcgctggcattgtgatgatgacctacgctgatggcttccacagccactccgtcatcggcatcgcactggtggtggcctcagcatcgatgtctgccctctacaaggttttgttcaagctcctcctgggcagtgctaagtttggagaagccgccttatttttgtccatcttgggtgtgtttaacatcctcttcatcacctgcattcctattatcctctactttaccaaagtggaatactggagctcttttgatgacattccatggggaaacctttgtggattttcagttcttttattgacattcaatattgtattaaattttggaattgccgttacatatcccactctgatgtctcttggaatcgtcctcagcatacctgtgaatgcagtgattgatcactacaccagtcagatcgtcttcaatggggtccgggtcatcgccatcatcatcatcggcctgggttttctcctcctgctcctgccagaggagtgggatgtctggttgatcaagctgctcacccgactcaaagtgaggaagaaggaggagcctgcagagggcgctgccgacctgagctcaggacctcagagcaagaacagaagagcccgcccttccttcgcccgctaacaccactcctctagaactcggtggtaatgactgggaggtctattcctgccgggaggaacctcagttgggtaaggtgtacatacctgtacagttttggtcatctgcggtaagttctatggtatttattggcatgtccaatttgcttgcacttttccacatcagaccttccacttaagggtaccaattcaatacaaaagagaaaagaagaacctctcagtgcttttccaacgaatgtaaagtgggtttaaaagttccctgcgtagatcgttttggatggctgacgttcttgacaagccagccatcagggcaagtgttttgaatcttagcaagtgttttgaatcttagcaactgaacatgacattgcacactgtgattatttttcagctatggtaggtcatattttgttttataccagagctgtactcttaattttaaggaatttcaatgaaccaaaagataactgtcaatttatttggatggatggatggagggatggaaggagggagggaaggatgtctgggatgtgaagaggcaaggcagaaatggatgatgaacatcaaaaactgtcagaggacaggtctgtgccaggtaccaggaaggacaagataagtccaagccccggctggcctgctctcacgtgtctgtgtaagatcatgcaagagaaatcacagtgccttctacagaattttcgtctttacctatgtgaagcgaggtgacgtgatacgtcactggcgccgtcttataatttagatgtaaaaatctttagaaacaaataaaactctctatatatgtgtatgtctgtgtacaaaaaaatgacagagctgatggccagtgtatacagagcgtggcccgcggtgtacaatacccatataaggtacattgtgcaggaggggaattgctggctgcttttacttcctgaccaagactgaaaaattatttactgaaatctgtaaacctttttatgaaacttttaagcaccaggctgtttacttacacaatttaggtctgccagaaaattctatctgtgatagatctgtaaagagggtcaggggttagagtttactatttttgaagtttacattgttacatatgaaatggaaacattattttgaaacgttgtcataacccaatggtgcattctgtaaccatggagtcttctgtttcctgggggaaaggggcattcatgacctgaactttttagcaaattattattctcagtttccattacctgtttggccaaacagattaataaaatatttgaaaaagaagcgtt

SEQ ID NO: 251 - protein, 490 aa, Homo sapiens
MGIREFPSGAPRGKSIAVGMRRSPDVSPRRLSDISPQLRQLKYLVVDEAIKEDLKWSRSVEDLTSGPVGLTSIEERILRITGYYGYQPWAASCKREERPRDSPGPAEAQAPAGVEAGGRASRRCWTCSRAQLKKIFWGVAVVLCVCSSWAGSTQLAKLTFRKFDAPFTLTWFATNWNFLFFPLYYVGHVCKSTEKQSVKQRYRECCRFFGDNGLTLKVFFTKAAPFGVLWTLTNYLYLHAIKKINTTDVSVLFCCNKAFVFLLSWIVLRDRFMGVRIVAAILAIAGIVMMTYADGFHSHSVIGIALVVASASMSALYKVLFKLLLGSAKFGEAALFLSILGVFNILFITCIPIILYFTKVEYWSSFDDIPWGNLCGFSVLLLTFNIVLNFGIAVTYPTLMSLGIVLSIPVNAVIDHYTSQIVFNGVRVIAIIIIGLGFLLLLLPEEWDVWLIKLLTRLKVRKKEEPAEGAADLSSGPQSKNRRARPSFAR

SEQ ID NO: 252 - DNA, 2408 bp, Homo sapiens
agcggagtccccgggagaagaagcggaggagggagagagccagcgaggcggcccaggggagcgggcgcgagtggcggctgccggagccgcctgtgcacgggcggcggcgaggcgagggtggcggtcgcctgagcagctagagccggggcggcgcggaatccgcatccgccgcgagtgtgatgaagctaccctgcctcgctgctccgcttgccgccagctgacaccgcctgcacccagcccgcccgggaggggagacgccgcggggccgtgaccttggcggaggagggcacactgataattcttgtatcttgagtgtggaccaagttttgggtgacatggcccaggggaataattatgggcagaccagcaacggggtggccgatgaatcacccaacatgctggtgtacagaaagatggaagacgtcatagcacggatgcaagatgaaaaaaatggaattcctattcgtacggtcaaaagctttctttccaagatacctagcgtcttctctggttcagacattgttcaatggttgataaagaacttaactatagaagatccagtggaggcgctccatttgggaacattaatggctgcccacggctacttctttccaatctcagatcatgtcctcacactcaaggatgatggcaccttttaccggtttcaaaccccctatttttggccatcaaattgttgggagccggaaaacacagattatgccgtttacctctgcaagagaacaatgcaaaacaaggcacgactggagctcgcagactatgaggctgagagcctggccaggctgcagagagcatttgcccggaagtgggagttcattttcatgcaagcagaagcacaagcaaaagtggacaagaagagagacaagattgaaaggaagatccttgacagccaagagagagcgttctgggacgtgcacaggcccgtgcctggatgtgtaaatacaactgaagtggacattaagaagtcatccagaatgagaaacccccacaaaacacggaagtctgtctatggtttacaaaatgatattagaagtcacagtcctacccacacacccacaccagaaactaaacctccaacagaagatgagttacaacaacagataaaatattggcaaatacagttagatagacatcggttaaaaatgtcaaaagtcgctgacagtctactaagttacacggaacagtatttagaatacgacccgtttcttttgccacctgacccttctaacccatggctgtccgatgacaccactttctgggaacttgaggcaagcaaagaaccgagccagcagagggtaaaacgatggggttttggcatggacgaggcattgaaagacccagttgggagagaacagttccttaaatttctagagtcagaattcagctcggaaaatttaagattctggctggcagtggaggacctgaaaaagaggcctattaaagaagtaccctcaagagttcaggaaatatggcaagagtttctggctcccggagcccccagtgctattaacttggattccaagagttatgacaaaaccacacataacgtgaaggaacctggacgatacacatttgaagatgctcaggagcacatttacaaactgatgaaaagtgattcatacccacgttttataagatccagtgcctatcaggagcttctacaggcaaagaaaaagtctggaaactcaatggatcgcagaacatcttttgaaaaatttgcacagaatgtggggaaatctctcacgtccaagaggttaacaagccttgctcagtcttactaaacggatcatcttgtagcatgaatgcagactggagtcactgcacacactttgtagctcaatgttgtgacctggagcagaggacattagaacaagatgttgcatgagcaaaggacctaaattgttatttttgtgtgtacattccatctccaatggactcttccgtctcaatgcctccattccaaactgttgtctgctttctttctccttctactatgctggatctgtgtctcttcctttttaacaagttcaagtgaagtaaaaccttttctttttttccttctttctctctctctctctctcaaagcttcagttagacacacagttcactgaaaattcagtcagtcaaaaactggaagaactgtaaaagaaaaaagtatatatcaataagtatacatgtggcttcacatttattaaacaataaattccgcacagaaagtttcatttcaccaatgtgtcacagtcagaaacaaactcatgtcttcgtctgttgtctgtacattctccgttaatgtttctcgcatttatttttataccatatttaaagaagaaacaccttttactccaaatgtattaaagttgatcccttctctgtcaaaaaaaaaaaaaaaa

SEQ ID NO: 253 - protein, 487 aa, Homo sapiens
MAQGNNYGQTSNGVADESPNMLVYRKMEDVIARMQDEKNGIPIRTVKSFLSKIPSVFSGSDIVQWLIKNLTIEDPVEALHLGTLMAAHGYFFPISDHVLTLKDDGTFYRFQTPYFWPSNCWEPENTDYAVYLCKRTMQNKARLELADYEAESLARLQRAFARKWEFIFMQAEAQAKVDKKRDKIERKILDSQERAFWDVHRPVPGCVNTTEVDIKKSSRMRNPHKTRKSVYGLQNDIRSHSPTHTPTPETKPPTEDELQQQIKYWQIQLDRHRLKMSKVADSLLSYTEQYLEYDPFLLPPDPSNPWLSDDTTFWELEASKEPSQQRVKRWGFGMDEALKDPVGREQFLKFLESEFSSENLRFWLAVEDLKKRPIKEVPSRVQEIWQEFLAPGAPSAINLDSKSYDKTTHNVKEPGRYTFEDAQEHIYKLMKSDSYPRFIRSSAYQELLQAKKKSGNSMDRRTSFEKFAQNVGKSLTSKRLTSLAQSY

SEQ ID NO: 254 - DNA, 1026 bp, Homo sapiens
atctcccaggcgaccggctccgcagcaagatggcggacgagaaggacagggaagagataatagtagcagaatttcacaaaaaaatcaaagaggcatttgaagtctttgaccatgagtcgaataatacagtggatgtgagagagattggaacaattatcaggtcattaggatgctgtcctacggaaggagagctgcatgatctgattgcagaggtagaggaagaagaacctactggatacattcgattcgaaaaatttcttccggtgatgacagaaatactactagaaagaaaatacagaccaattccagaagatgtccttcttcgagcttttgaggttttagattcagctaaacgtgggtttcttactaaggacgagctgatcaagtatatgactgaagaaggtgagcctttttctcaagaggaaatggaagaaatgttgtctgctgcaattgatccagaatcaaattcaattaattacaaggactatataacaatgatggtgatagatgaaaattaaatgttctaaagataatttctgattgaaagaacaattttagaaattgcttgttcttgttaatttcacatcttatcttaggattcctatatgtgatattttataccttgtgacataactattttaagacactttgtttttaaagatgatcgtaacactttaaaccaaatttagtatgtctagccttacagaatgataaattactatttatttaaaaactattcttaaaacattttaacattagaatggattgttgtttattttctacaataaaactcaggtcaccttcgaattaattaagctgacaaaatgaaaatgacttaattacccaaggtttggcatgtaaagatcttaagagggtgcagaacgaaccactcgaaaacgagtagcagtgtaatgaaggcttcttttttaaacaataacaaatgcttcatcaatctgagtgtggaaggtgatttatcaaaataaatattactaatcgaaaaaaaaaaaaaaaaaaaaaaaaaaaaaa

SEQ ID NO: 255 - protein, 162 aa, Homo sapiens
MADEKDREEIIVAEFHKKIKEAFEVFDHESNNTVDVREIGTIIRSLGCCPTEGELHDLIAEVEEEEPTGYIRFEKFLPVMTEILLERKYRPIPEDVLLRAFEVLDSAKRGFLTKDELIKYMTEEGEPFSQEEMEEMLSAAIDPESNSINYKDYITMMVIDEN

SEQ ID NO: 256 - DNA, 381 bp, Homo sapiens
atgacaccccagagcagccacgtgtggagcctggcatacgccggcttcctgcgctcctgggcgctgcgccgggggactggggcggggggcgatcggagagggagcgatgacggggtgctccggagaccccgcggggcccaggcgcaggaagaaacgggcggcggggggcgaggggcccgatcccacgcaaggagaggccaaggccagctcgcgccacaccccctctccaggccagagtcgtccgcgtgcagcgcggcgaagccctcagtttcccctgcccggcagcggcccgctgggtcaccaggctcacctgtcccagccccgggcggcttagtccatcacagaccggggctcgggcgggcgggggaccaagggccctag

SEQ ID NO: 257 - protein, 126 aa, Homo sapiens
MTPQSSHVWSLAYAGFLRSWALRRGTGAGGDRRGSDDGVLRRPRGAQAQEETGGGGRGARSHARRGQGQLAPHPLSRPESSACSAAKPSVSPARQRPAGSPGSPVPAPGGLVHHRPGLGRAGDQGP

SEQ ID NO: 258 - DNA, 8365 bp, Homo sapiens
agttaccaagctcggtgaaggagacaagttcccacagctgactcggctcggctctcccaccttcccggcagcggccgcgagccctgattgtatccctcgctttcctcgtgggggagcacggactgacttggctgaagaaaatgccagttctgtggatgtggccgtgacaagaggacgtgcggctggaagaggcagaaggggacgaggaaaagcatgctttgaagagaagaataaaccagcgaccccaaccctttctgcaaattggtgctattacttgtgggatccatttgctttcattccctcccaccccaccgctgaagaaaccttgccctgagggctgagagccagccccctgcagccgggggacgcttctgggttggaggaccttctggatgtagcgtcggtggaacctttagatactctcctctggaaaagccaccatgaattcggtagctgggaataaagagaggcttgcggtctccaccaggggcaagaaatacggggtgaatgaagtctgctcgcccaccaagcccgcagcgcccttctccccggaaagctggtaccggaaagcatacgaggagtcgcgcgccggcagccggcccactcctgagggcgcgggctcagcgctcggctcctcggggaccccgtctcccggctcgggcacctcgtccccgagctcgttcaccggctccccgggacccgcctcccccggcatcggcactagttcgccgggctccttgggcggctctccgggcttcggcacaggctccccgggctccggcagcggcggcggctcctcccccggctcggaccgcggcgtctggtgcgagaactgcaacgcccgcctggtggagctcaagaggcaggccctgaggttgctcctcccggggcccttcccgggcaaggaccctgctttctcggctgtgattcacgacaaactccaggtccccaacaccatccggaaggcatggaacgaccgggacaaccgctgtgacatttgcgccactcacctgaaccagttgaagcaggaggccatccagatggtgctgacgttggagcaggcagccggcagtgagcactacgacgcctcgccctgctccccgccaccgctctccaacatccccaccctggtggggtcccggcacgtgggtgggctccagcagcccagagactgggcctttgtgcccgccccctgtgccacctccaactacacaggcttcgccaacaagcacggcagcaaacccagcagccttggggtcagcaatggggcggaaaagaagagcgggtccccaacccaccaggccaaggtcagcctccagatggccaccagtccaagcaatgggaacatcctcaattcggtggccatccaggctcaccagtacctggatggcacctggtccctgtcgagaaccaacggggtcaccctgtacccataccagatctcccagctgatgacagagagtagccgggagggactaacagaagcagtgctgaaccgctacaatgcagacaagccttccgcctgcagtgtcccagcctcgcagggctcctgcgtggccagcgagacttccacaggcacatcggtggccgcctccttctttgcacgagctgcccagaagttaaatctgtcttctaaaaagaagaaacatcggccttccacttcttccgctgccgaaccaccgctctttgcaaccagcttcagtgggattctgcagacctcccctcccccagccccaccctgcctgctgagggctgtcaacaaggtgaaggacaccccggggctgggcaaggtgaaagtcatgcttcgcatctgttccaccttggctcgagatacttcagaatccagctctttcttaaaggtggacccacggaagaagcagatcaccttgtacgatcccctgacttgtggaggtcaaaatgccttccaaaagagaggcaaccaggttcctccaaagatgtttgccttcgatgcagtttttccacaagacgcttctcaggctgaagtgtgtgcaggcaccgtggcagaggtgatccagtctgtggtcaacggggcagatggctgcgtgttctgtttcggccacgccaaactgggaaaatcctacaccatgatcggaaaggatgattccatgcagaacctgggcatcattccctgtgccatctcttggctcttcaagctcataaacgaacgcaaggaaaagaccggcgcccgtttctcagtccgggtttccgccgtggaagtgtgggggaaggaggagaacctgcgggacctgctgtcggaggtggccacgggcagcctgcaggacggccagtccccgggcgtgtacctctgtgaggaccccatctgcggcacgcagctgcagaaccagagcgagctgcgggcccccaccgcagagaaggctgcctttttcctggatgccgccattgcctcccgcaggagccaccaacaggactgtgatgaggacgaccaccgcaactcacacgtgttcttcacactgcacatctaccagtaccggatggagaagagcgggaaagggggaatgtctggaggtcgcagccgcctgcatctcattgatctcggcagctgtgtgaaagctcttagcaaaaatcgagaaggaggctcagggctgtgtctctcgctgtctgctctgggcaatgtcatcctggctctcgtcaatggcagcaaacacattccatacaaagagagcaagctcgccatgttgctgcgggagtctctggggaacatgaactgccgtaccaccatgatcgcgcacatctcggccgcggtcgggagctacgcggagaccctgtccaccatccagattgcatcgagagtcttgaggatgaagaaaaagaagacgaagtacacatccagctcgtccggcggggagagctcctgcgaagaaggccgcatgcgcaggcccacccagctgagacccttccacaccagggccacggtggaccctgacttccccatcgctcacctgtccagcgaccccgactactcctccagcagcgagcagtcctgcgacaccgtcatctacatcgggcccaacggcacggccctctctgacaaggagctcaccgacaacgagggccccccagactttgtccctatcgtgccagccctgcagaagacccggggcgacagccggcccgcagaggcaggagaggctgcagccggcaagtcagaaagggactgcctgaagtgcaacacgtttgccgagctgcaggagaggctggactgcatcgacggcagcgaggagcccagcagctttcctttcgaagaactgcctgctcagtttgggccagagcaggcaagcagaggcccccggttaagccaagcagcgggggcaagcccactctctgagtctgataaggaagataatgggtccgaaggtcagctgaccaacagagaaggccctgaactcccagcctccaagatgcagaggagtcactcacctgtgcccgccgcggcacccgcccacagccccagcccggcctcacccaggagcgtcccgggcagcagtagccagcacagcgcctccccactcgtgcagagccccagcctccagagcagccgggagagcctcaactcctgcggcttcgtggaaggcaagcccaggcccatgggctccccccggctgggcatcgccagcctgtccaagacctcggagtacaagccacccagctctccttcccagagatgcaaagtctacacccagaagggggtcctgccgtctcccgccccactgcctccctcgagcaaggattccggcgtggcgtctagggagtccttgctgcagcccgaggtgcgtacgcccccggttggaatgagcccccaggttttgaaaaaatccatgtctgctgggagcgaagggttcccggaaactcctgtcgatgatgagcagcaggcagctactccttcagagtccaagaaggagatcctgagcaccacgatggtgacggtgcagcagccactggagctgaacggtgaggacgagctggtgttcacgctggtggaggagctgaccatcagcggggtcctggacagcggccgccccaccagcatcatcagcttcaacagcgactgctctgcacgggccctggcctcgggctcgcggcccgtcagcatcatcagcagcatcagcgaggacctggagtgctactccagcacggcccccgtctccgaggtcagcatcacacagttcttgcccctcccgaagatgagcctggatgagaaggcccaggacgcagggagcagacgctcttccatcagctcctggctgagcgagatgagcgcgggcagtgagggtgagcagtcgtgccacagtttcatagcccagacgtgttttgggcacggggaggcaatggcagaacctgtggcctcggagtttgtcagcagcctccagaacaccgctgtggtgtgcagagagaagcccaaggccagccccgacaacttgctcatcctgtctgagatgggagatgactctttcaacaaagcagcccccatcaaaggctgcaaaatatccacagtgagcaaggccatggtcaccatctccaacacggccaatctgagcagctgcgaggggtacatccccatgaagaccaatatcacagtttacccctgcattgccatgagcccccggaacatccaagagccggaggcccccaccgccacccccaaagcaggccccacattagcccagtcccgggagagtaaggaaaacagtgcaaagaaagagatgaaatttgaggacccgtggctgaaacgagaagaggaagtgaaaaaagagacggctcatcccaatgaagaagggatgatgaggtgtgagactgccacgggcccctcgaatgctgagaccagagcagagcaggagcaggacggaaagcccagtccgggagacaggctcagcagcagcagcggagaggtgtcggcctccccggtcactgacaacttcaggagggtcgtggatgggtgtgagatggccctgcccggtttggccacccagagccccgtgcatcccaacaaaagcgtcaagtccagcagccttcccagggcctttcagaaggccagccggcaggaggagccggacagcctctcctattactgcgctgctgagaccaacggggtgggtgcagcctcgggcaccccgccctccaaggctaccctggaggggaaggtggcttcccccaagcactgtgttctggctcggcccaaagggactccccctctgccccctgtccgaaagtccagcctggaccagaagaaccgggccagccctcagcacagtgccagcggcagcggcaccagcagccccctgaaccaaccagccgccttcccggcgggcctcccagacgagcctagcggcaagacgaaggacgccagcagcagcagcaagctcttcagtgccaagctggagcagctggccagcagaagcaactcgctgggcagggcgacagtcagccactacgaatgcctctccctggagcgggccgagagcctgtcctccgtgagctcccggctgcacgcgggcaaggacggcaccatgccccgcgcggggaggagcctgggccgcagcgccgggacctcgccccccagctccggggcctcgcccaaggccggccagtccaagatctccgccgtgagcagactcctcctggccagccccagagcgcgcggcccgtccgcctccaccaccaaaaccctcagcttctccaccaagtccctgccgcaggcggtgggccagggctccagctcgccccccggtgggaagcacacgccctggtccacgcagtccctcagcaggaacaggagctcgggcctggcctccaagcttcccctgcgggccgtcagcgggcgcatctcggagctgctgcagggtggcgcgggcgcccggggcttgcagctgcgggccgggcccgaggcggaggcgcgcgggggggccctggccgaggacgagcccgcggccgcgcacctgctcccgtcgccctacagcaagatcacgcccccgcggaggccccaccgctgcagcagcggccacggcagcgacaacagcagcgtgctgagcggggagctcccgccggccatggggaagacggccctgttctaccacagcggcggcagcagcggctacgagagcgtgatgcgggacagcgaggccaccggcagcgcgtcctcggcgcaggactccacgagcgagaacagcagctccgtgggcggcaggtgccggagcctcaagaccccgaagaaacgctccaatccaggttctcagagacggaggcttatcccagcactatccctggacacctcttcccctgtgagaaaaccccccaacagcacaggcgtccgctgggtggatggccccttgcggagcagcccgaggggccttggggaaccctttgagattaaagtctatgaaatcgatgacgtggagcgcctgcagcggcgacgagggggtgccagcaaggaggccatgtgcttcaatgcaaagctgaagattctggaacaccgccagcagaggatcgccgaggtccgcgcgaagtacgagtggctgatgaaggagctggaggcgaccaaacagtatctgatgctggatcccaacaagtggctcagtgaatttgacttggagcaggtttgggagctggattccctggagtacctggaggcactggagtgtgtgacggagcgcctggagagccgtgtcaacttctgcaaggcccatctcatgatgatcacctgcttcgacatcacctccaggcgccggtagatgagccagacccttgtcctagtggtcccccgctccccaggacttcagagatgttgcacgcccctaggccctctgtgctggggcatcaaagacaatgaatgaggatgaaggttggtggcaagtctggagcgggcgttgagcggaaggcgagttttcttttgttttctgtaggaaaggtgcaaacgtcaaacaccgtggaaggagaaaaggatgggaagcccgaggggtgtccaagccctgtgagactgaaaaagcactttgaggaaccttaaagaccttgtttgtacataagaactgctagcaaaagagacctcactcttctcttgctttcgtgagaaaggaggggcgtggatgtaggattgctgtggaaagcgaacacaaaacaacccagaatgactgattaagtgccttgcaaatctttattattatccaaacatttatgttcatactttcttgtgtacagatggtgctagtcaagatgaaaacaacaaaacaaacaagaaaaacattttggaaatgtattcacagctctttttctcttggtgttttatcctatttctgacttgctgtttctaagtaagttgtgtttgtagagctatttcttaatcagtattgcttatgaataaatattacctgtcttttatggttattctggtgaggccactcaaacagagagacttccctcggcacgagccagtgtgtgtgtttccaaagtaggtttggagcagcaggtgacctcgatgccacatcccaacaagcagcgtggtcaggtagacccagaaggttgattgtggggcaggtgctttagagaacaggtgaggagacggcacctgcagcacaggggaggaggagtcctttgcgacctgggccctccctgctcctgggaggtgggccgtatgttctgtagaccgtttgcccccctcaagtcctccacacatgtggttccttgacccacaaatccacagtttgcgtggccctcaaaattcatattcatttttattccaaaaagtcttgaacgaaagctggaaccaattcaccagagccatatttctttctttagtattttctagtgttgtgttgtagattgattaaagtgggtttttccccagctgagagaccttctcaggcttgttcagagacttcaactgtattggattagaagaaggattcttgagactgtacatcttgtctgttgtccagagtacaaggatttcagctctcctgtgtcccaaagcctctatgccaagaagggacaggcttgtcctctcagtctttgctcctgcccaaaggcagagagagcttcccctccataactcacacgaccctggataggcagaacatagctgaagactatggatgtccaggtcttggctcccaacaactcaggacctcaaattcagatgttcctccctataacaattcccttaggaattatgatacccattttagtgattgatagaaacctggggtacagagtggtcaagggatttccctgataaaagctgtggtgctgatgatagtgcagcccagaatctaagagtccctgcagccttcgcatcgaggatggtacttaggcgtgtgcagagcacgcttccctt

SEQ ID NO: 259 - protein, 2108 aa, Homo sapiens
MNSVAGNKERLAVSTRGKKYGVNEVCSPTKPAAPFSPESWYRKAYEESRAGSRPTPEGAGSALGSSGTPSPGSGTSSPSSFTGSPGPASPGIGTSSPGSLGGSPGFGTGSPGSGSGGGSSPGSDRGVWCENCNARLVELKRQALRLLLPGPFPGKDPAFSAVIHDKLQVPNTIRKAWNDRDNRCDICATHLNQLKQEAIQMVLTLEQAAGSEHYDASPCSPPPLSNIPTLVGSRHVGGLQQPRDWAFVPAPCATSNYTGFANKHGSKPSSLGVSNGAEKKSGSPTHQAKVSLQMATSPSNGNILNSVAIQAHQYLDGTWSLSRTNGVTLYPYQISQLMTESSREGLTEAVLNRYNADKPSACSVPASQGSCVASETSTGTSVAASFFARAAQKLNLSSKKKKHRPSTSSAAEPPLFATSFSGILQTSPPPAPPCLLRAVNKVKDTPGLGKVKVMLRICSTLARDTSESSSFLKVDPRKKQITLYDPLTCGGQNAFQKRGNQVPPKMFAFDAVFPQDASQAEVCAGTVAEVIQSVVNGADGCVFCFGHAKLGKSYTMIGKDDSMQNLGIIPCAISWLFKLINERKEKTGARFSVRVSAVEVWGKEENLRDLLSEVATGSLQDGQSPGVYLCEDPICGTQLQNQSELRAPTAEKAAFFLDAAIASRRSHQQDCDEDDHRNSHVFFTLHIYQYRMEKSGKGGMSGGRSRLHLIDLGSCVKALSKNREGGSGLCLSLSALGNVILALVNGSKHIPYKESKLAMLLRESLGNMNCRTTMIAHISAAVGSYAETLSTIQIASRVLRMKKKKTKYTSSSSGGESSCEEGRMRRPTQLRPFHTRATVDPDFPIAHLSSDPDYSSSSEQSCDTVIYIGPNGTALSDKELTDNEGPPDFVPIVPALQKTRGDSRPAEAGEAAAGKSERDCLKCNTFAELQERLDCIDGSEEPSSFPFEELPAQFGPEQASRGPRLSQAAGASPLSESDKEDNGSEGQLTNREGPELPASKMQRSHSPVPAAAPAHSPSPASPRSVPGSSSQHSASPLVQSPSLQSSRESLNSCGFVEGKPRPMGSPRLGIASLSKTSEYKPPSSPSQRCKVYTQKGVLPSPAPLPPSSKDSGVASRESLLQPEVRTPPVGMSPQVLKKSMSAGSEGFPETPVDDEQQAATPSESKKEILSTTMVTVQQPLELNGEDELVFTLVEELTISGVLDSGRPTSIISFNSDCSARALASGSRPVSIISSISEDLECYSSTAPVSEVSITQFLPLPKMSLDEKAQDAGSRRSSISSWLSEMSAGSEGEQSCHSFIAQTCFGHGEAMAEPVASEFVSSLQNTAVVCREKPKASPDNLLILSEMGDDSFNKAAPIKGCKISTVSKAMVTISNTANLSSCEGYIPMKTNITVYPCIAMSPRNIQEPEAPTATPKAGPTLAQSRESKENSAKKEMKFEDPWLKREEEVKKETAHPNEEGMMRCETATGPSNAETRAEQEQDGKPSPGDRLSSSSGEVSASPVTDNFRRVVDGCEMALPGLATQSPVHPNKSVKSSSLPRAFQKASRQEEPDSLSYYCAAETNGVGAASGTPPSKATLEGKVASPKHCVLARPKGTPPLPPVRKSSLDQKNRASPQHSASGSGTSSPLNQPAAFPAGLPDEPSGKTKDASSSSKLFSAKLEQLASRSNSLGRATVSHYECLSLERAESLSSVSSRLHAGKDGTMPRAGRSLGRSAGTSPPSSGASPKAGQSKISAVSRLLLASPRARGPSASTTKTLSFSTKSLPQAVGQGSSSPPGGKHTPWSTQSLSRNRSSGLASKLPLRAVSGRISELLQGGAGARGLQLRAGPEAEARGGALAEDEPAAAHLLPSPYSKITPPRRPHRCSSGHGSDNSSVLSGELPPAMGKTALFYHSGGSSGYESVMRDSEATGSASSAQDSTSENSSSVGGRCRSLKTPKKRSNPGSQRRRLIPALSLDTSSPVRKPPNSTGVRWVDGPLRSSPRGLGEPFEIKVYEIDDVERLQRRRGGASKEAMCFNAKLKILEHRQQRIAEVRAKYEWLMKELEATKQYLMLDPNKWLSEFDLEQVWELDSLEYLEALECVTERLESRVNFCKAHLMMITCFDITSRRR

SEQ ID NO: 260 - DNA, 6222 bp, Homo sapiens
gggggcggcagcggtggtagcagctggtacctcccgccgcctctgttcggagggtcgcggggcaccgaggtgctttccggccgccctctggtcggccacccaaagccgcgggcgctgatgatgggtgaggagggggcggcaagatttcgggcgcccctgccctgaacgccctcagctgctgccgccggggccgctccagtgcctgcgaactctgaggagccgaggcgccggtgagagcaaggacgctgcaaacttgcgcagcgcgggggctgggattcacgcccagaagttcagcaggcagacagtccgaagccttcccgcagcggagagatagcttgagggtgcgcaagacggcagcctccgccctcggttcccgcccagaccgggcagaagagcttggaggagccaaaaggaacgcaaaaggcggccaggacagcgtgcagcagctgggagccgccgttctcagccttaaaagttgcagagattggaggctgccccgagaggggacagaccccagctccgactgcggggggcaggagaggacggtacccaactgccacctcccttcaaccatagtagttcctctgtaccgagcgcagcgagctacagacgggggcgcggcactcggcgcggagagcgggaggctcaaggtcccagccagtgagcccagtgtgcttgagtgtctctggactcgcccctgagcttccaggtctgtttcatttagactcctgctcgcctccgtgcagttgggggaaagcaagagacttgcgcgcacgcacagtcctctggagatcaggtggaaggagccgctgggtaccaaggactgttcagagcctcttcccatctcggggagagcgaagggtgaggctgggcccggagagcagtgtaaacggcctcctccggcgggatgggagccatcgggctcctgtggctcctgccgctgctgctttccacggcagctgtgggctccgggatggggaccggccagcgcgcgggctccccagctgcggggccgccgctgcagccccgggagccactcagctactcgcgcctgcagaggaagagtctggcagttgacttcgtggtgccctcgctcttccgtgtctacgcccgggacctactgctgccaccatcctcctcggagctgaaggctggcaggcccgaggcccgcggctcgctagctctggactgcgccccgctgctcaggttgctggggccggcgccgggggtctcctggaccgccggttcaccagccccggcagaggcccggacgctgtccagggtgctgaagggcggctccgtgcgcaagctccggcgtgccaagcagttggtgctggagctgggcgaggaggcgatcttggagggttgcgtcgggccccccggggaggcggctgtggggctgctccagttcaatctcagcgagctgttcagttggtggattcgccaaggcgaagggcgactgaggatccgcctgatgcccgagaagaaggcgtcggaagtgggcagagagggaaggctgtccgcggcaattcgcgcctcccagccccgccttctcttccagatcttcgggactggtcatagctccttggaatcaccaacaaacatgccttctccttctcctgattattttacatggaatctcacctggataatgaaagactccttccctttcctgtctcatcgcagccgatatggtctggagtgcagctttgacttcccctgtgagctggagtattcccctccactgcatgacctcaggaaccagagctggtcctggcgccgcatcccctccgaggaggcctcccagatggacttgctggatgggcctggggcagagcgttctaaggagatgcccagaggctcctttctccttctcaacacctcagctgactccaagcacaccatcctgagtccgtggatgaggagcagcagtgagcactgcacactggccgtctcggtgcacaggcacctgcagccctctggaaggtacattgcccagctgctgccccacaacgaggctgcaagagagatcctcctgatgcccactccagggaagcatggttggacagtgctccagggaagaatcgggcgtccagacaacccatttcgagtggccctggaatacatctccagtggaaaccgcagcttgtctgcagtggacttctttgccctgaagaactgcagtgaaggaacatccccaggctccaagatggccctgcagagctccttcacttgttggaatgggacagtcctccagcttgggcaggcctgtgacttccaccaggactgtgcccagggagaagatgagagccagatgtgccggaaactgcctgtgggtttttactgcaactttgaagatggcttctgtggctggacccaaggcacactgtcaccccacactcctcaatggcaggtcaggaccctaaaggatgcccggttccaggaccaccaagaccatgctctattgctcagtaccactgatgtccccgcttctgaaagtgctacagtgaccagtgctacgtttcctgcaccgatcaagagctctccatgtgagctccgaatgtcctggctcattcgtggagtcttgaggggaaacgtgtccttggtgctagtggagaacaaaaccgggaaggagcaaggcaggatggtctggcatgtcgccgcctatgaaggcttgagcctgtggcagtggatggtgttgcctctcctcgatgtgtctgacaggttctggctgcagatggtcgcatggtggggacaaggatccagagccatcgtggcttttgacaatatctccatcagcctggactgctacctcaccattagcggagaggacaagatcctgcagaatacagcacccaaatcaagaaacctgtttgagagaaacccaaacaaggagctgaaacccggggaaaattcaccaagacagacccccatctttgaccctacagttcattggctgttcaccacatgtggggccagcgggccccatggccccacccaggcacagtgcaacaacgcctaccagaactccaacctgagcgtggaggtggggagcgagggccccctgaaaggcatccagatctggaaggtgccagccaccgacacctacagcatctcgggctacggagctgctggcgggaaaggcgggaagaacaccatgatgcggtcccacggcgtgtctgtgctgggcatcttcaacctggagaaggatgacatgctgtacatcctggttgggcagcagggagaggacgcctgccccagtacaaaccagttaatccagaaagtctgcattggagagaacaatgtgatagaagaagaaatccgtgtgaacagaagcgtgcatgagtgggcaggaggcggaggaggagggggtggagccacctacgtatttaagatgaaggatggagtgccggtgcccctgatcattgcagccggaggtggtggcagggcctacggggccaagacagacacgttccacccagagagactggagaataactcctcggttctagggctaaacggcaattccggagccgcaggtggtggaggtggctggaatgataacacttccttgctctgggccggaaaatctttgcaggagggtgccaccggaggacattcctgcccccaggccatgaagaagtgggggtgggagacaagagggggtttcggagggggtggaggggggtgctcctcaggtggaggaggcggaggatatataggcggcaatgcagcctcaaacaatgaccccgaaatggatggggaagatggggtttccttcatcagtccactgggcatcctgtacaccccagctttaaaagtgatggaaggccacggggaagtgaatattaagcattatctaaactgcagtcactgtgaggtagacgaatgtcacatggaccctgaaagccacaaggtcatctgcttctgtgaccacgggacggtgctggctgaggatggcgtctcctgcattgtgtcacccaccccggagccacacctgccactctcgctgatcctctctgtggtgacctctgccctcgtggccgccctggtcctggctttctccggcatcatgattgtgtaccgccggaagcaccaggagctgcaagccatgcagatggagctgcagagccctgagtacaagctgagcaagctccgcacctcgaccatcatgaccgactacaaccccaactactgctttgctggcaagacctcctccatcagtgacctgaaggaggtgccgcggaaaaacatcaccctcattcggggtctgggccatggcgcctttggggaggtgtatgaaggccaggtgtccggaatgcccaacgacccaagccccctgcaagtggctgtgaagacgctgcctgaagtgtgctctgaacaggacgaactggatttcctcatggaagccctgatcatcagcaaattcaaccaccagaacattgttcgctgcattggggtgagcctgcaatccctgccccggttcatcctgctggagctcatggcggggggagacctcaagtccttcctccgagagacccgccctcgcccgagccagccctcctccctggccatgctggaccttctgcacgtggctcgggacattgcctgtggctgtcagtatttggaggaaaaccacttcatccaccgagacattgctgccagaaactgcctcttgacctgtccaggccctggaagagtggccaagattggagacttcgggatggcccgagacatctacagggcgagctactatagaaagggaggctgtgccatgctgccagttaagtggatgcccccagaggccttcatggaaggaatattcacttctaaaacagacacatggtcctttggagtgctgctatgggaaatcttttctcttggatatatgccataccccagcaaaagcaaccaggaagttctggagtttgtcaccagtggaggccggatggacccacccaagaactgccctgggcctgtataccggataatgactcagtgctggcaacatcagcctgaagacaggcccaactttgccatcattttggagaggattgaatactgcacccaggacccggatgtaatcaacaccgctttgccgatagaatatggtccacttgtggaagaggaagagaaagtgcctgtgaggcccaaggaccctgagggggttcctcctctcctggtctctcaacaggcaaaacgggaggaggagcgcagcccagctgccccaccacctctgcctaccacctcctctggcaaggctgcaaagaaacccacagctgcagagatctctgttcgagtccctagagggccggccgtggaagggggacacgtgaatatggcattctctcagtccaaccctccttcggagttgcacaaggtccacggatccagaaacaagcccaccagcttgtggaacccaacgtacggctcctggtttacagagaaacccaccaaaaagaataatcctatagcaaagaaggagccacacgacaggggtaacctggggctggagggaagctgtactgtcccacctaacgttgcaactgggagacttccgggggcctcactgctcctagagccctcttcgctgactgccaatatgaaggaggtacctctgttcaggctacgtcacttcccttgtgggaatgtcaattacggctaccagcaacagggcttgcccttagaagccgctactgcccctggagctggtcattacgaggataccattctgaaaagcaagaatagcatgaaccagcctgggccctgagctcggtcgcacactcacttctcttccttgggatccctaagaccgtggaggagagagaggcaatggctccttcacaaaccagagaccaaatgtcacgttttgttttgtgccaacctattttgaagtaccaccaaaaaagctgtattttgaaaatgctttagaaaggttttgagcatgggttcatcctattctttcgaaagaagaaaatatcataaaaatgagtgataaatacaaggcccagatgtggttgcataaggtttttatgcatgtttgttgtatacttccttatgcttctttcaaattgtgtgtgctctgcttcaatgtagtcagaattagctgcttctatgtttcatagttggggtcatagatgtttccttgccttgttgatgtggacatgagccatttgaggggagagggaacggaaataaaggagttatttgtaatgactaaaa

SEQ ID NO: 261 - protein, 1620 aa, Homo sapiens
MGAIGLLWLLPLLLSTAAVGSGMGTGQRAGSPAAGPPLQPREPLSYSRLQRKSLAVDFVVPSLFRVYARDLLLPPSSSELKAGRPEARGSLALDCAPLLRLLGPAPGVSWTAGSPAPAEARTLSRVLKGGSVRKLRRAKQLVLELGEEAILEGCVGPPGEAAVGLLQFNLSELFSWWIRQGEGRLRIRLMPEKKASEVGREGRLSAAIRASQPRLLFQIFGTGHSSLESPTNMPSPSPDYFTWNLTWIMKDSFPFLSHRSRYGLECSFDFPCELEYSPPLHDLRNQSWSWRRIPSEEASQMDLLDGPGAERSKEMPRGSFLLLNTSADSKHTILSPWMRSSSEHCTLAVSVHRHLQPSGRYIAQLLPHNEAAREILLMPTPGKHGWTVLQGRIGRPDNPFRVALEYISSGNRSLSAVDFFALKNCSEGTSPGSKMALQSSFTCWNGTVLQLGQACDFHQDCAQGEDESQMCRKLPVGFYCNFEDGFCGWTQGTLSPHTPQWQVRTLKDARFQDHQDHALLLSTTDVPASESATVTSATFPAPIKSSPCELRMSWLIRGVLRGNVSLVLVENKTGKEQGRMVWHVAAYEGLSLWQWMVLPLLDVSDRFWLQMVAWWGQGSRAIVAFDNISISLDCYLTISGEDKILQNTAPKSRNLFERNPNKELKPGENSPRQTPIFDPTVHWLFTTCGASGPHGPTQAQCNNAYQNSNLSVEVGSEGPLKGIQIWKVPATDTYSISGYGAAGGKGGKNTMMRSHGVSVLGIFNLEKDDMLYILVGQQGEDACPSTNQLIQKVCIGENNVIEEEIRVNRSVHEWAGGGGGGGGATYVFKMKDGVPVPLIIAAGGGGRAYGAKTDTFHPERLENNSSVLGLNGNSGAAGGGGGWNDNTSLLWAGKSLQEGATGGHSCPQAMKKWGWETRGGFGGGGGGCSSGGGGGGYIGGNAASNNDPEMDGEDGVSFISPLGILYTPALKVMEGHGEVNIKHYLNCSHCEVDECHMDPESHKVICFCDHGTVLAEDGVSCIVSPTPEPHLPLSLILSVVTSALVAALVLAFSGIMIVYRRKHQELQAMQMELQSPEYKLSKLRTSTIMTDYNPNYCFAGKTSSISDLKEVPRKNITLIRGLGHGAFGEVYEGQVSGMPNDPSPLQVAVKTLPEVCSEQDELDFLMEALIISKFNHQNIVRCIGVSLQSLPRFILLELMAGGDLKSFLRETRPRPSQPSSLAMLDLLHVARDIACGCQYLEENHFIHRDIAARNCLLTCPGPGRVAKIGDFGMARDIYRASYYRKGGCAMLPVKWMPPEAFMEGIFTSKTDTWSFGVLLWEIFSLGYMPYPSKSNQEVLEFVTSGGRMDPPKNCPGPVYRIMTQCWQHQPEDRPNFAIILERIEYCTQDPDVINTALPIEYGPLVEEEEKVPVRPKDPEGVPPLLVSQQAKREEERSPAAPPPLPTTSSGKAAKKPTAAEISVRVPRGPAVEGGHVNMAFSQSNPPSELHKVHGSRNKPTSLWNPTYGSWFTEKPTKKNNPIAKKEPHDRGNLGLEGSCTVPPNVATGRLPGASLLLEPSSLTANMKEVPLFRLRHFPCGNVNYGYQQQGLPLEAATAPGAGHYEDTILKSKNSMNQPGP

SEQ ID NO: 262 - DNA, 2183 bp, Homo sapiens
ccagggcctgactaaacctggagactcgggtggccgaggggcttcataccagctgaagagcgacaagccgctggcagccgcggatctcaccgccgctcagggtttttagaacttcagccataaaaatgggcagaattttccttgatcatatcggtggtacccgtctgttttcttgtgcaaactgtgatacgatcctgaccaaccgctcagaactcatctccactcgtttcacaggcgccactggcagagcatttctttttaacaaggtagttaacctgcagtacagcgaagttcaagatcgggtcatgctcactggccgccacatggttcgagatgtgagctgcaaaaactgcaatagcaaactgggatggatctatgagtttgccactgaagacagccagcgatataaggaaggccgcgtgatcctggaacgtgctctagttcgagagagtgagggctttgaggagcatgtaccatctgataactcttgaagatacagagagaaatccatcttttcccaggtctccttcactgaaaacaaaaatctacttacatacactgtcaccttagcatcagagtcggattaatgaactgcggaacaagaggttgtgagaatctaagatggaacctttctttctttctttctttttttttaaattttgtattttccatccaacagcagtgtgtagagagaatattatgcagatgccgttaattttttaccctatgtttacatcttgaggcagcagagtctgtctgcagctatgtggtgagctatgtaaggaaaaaaatctgggctgttagagtgaaaaagtgtgttttatgtcaattgtgaaaggaaaatgttaggagtatggtttttaaacttgggcttcattttaaacttttttttttaaacccagttatttcacttgatttgctagcttcagagaagagatccgaatctgtgcccagcgctaaaggctcagtgttagcatggcttgtgctggccggtgtgccatattcttgttggagatgaaccgtagcaccagagcccattcttccttgtcagtcttggcccaaagatgtcaccattcctagttatttgtcaccacataattggtgttgattggaaactttttctgagatgggacagaactgctgggttgtctttttccatgtaacttaagcatagtaatataaataaagtaatagttggatgcttttggtcctgtgttgcttttaaaaacaccttataaaagaggagagtatttgataagcaattttcatagtagtaaagttttttttcatctcttaaactaaattgaccatgcatataatattctttgtttaaatgaaagcatactgttgaaacccgcagtgttgcatttagaaaacagttgaacagaatgtcaatgtgcattcatgcaaaaaaacatttaatctgcatctgttttagaaaagggggaaatgaagcaacttgtctaaaaatactgctttacaaagcatttcagcctttccccctcagttttgcattgattttttgacaagtctgtagagcctaatagtttccatcaaaggcctagatctcttatttagcatttttttcagctcttctctcagaagttcagctgttgaaacgaaaactgtactttgtaccctcacatacaaagggatcaaatttgacctggtgttattttagccccaaatttatgacattacacaatattaaaatgtaaatgtttctttacccaaactacttctagatattctagtatttgcttctggtggaattaaatgacggtaaaattggctaattatttgaatgaatgaatggatggatgttttgcatgctcaatttctaggtcctttgtctagaaaggaaatttgcctcagttgaattagtgaaatatttctgtcgttgatattaaaagtgacttctgagtacagttaagttcctcctatttgccactgggctgttggttagaagcataggtaactgattaagtaggtatgatactgcatttgaaataagtggacacaaactatcctttctccaccatggactcaatctgagaacaacagcattcatttccattcatttccatactggcttttgattatatgcagattcctagtagcatgccttacctacagcactatgtgcatttgctgtcacaataaagtatattttgtcttgcaaa

SEQ ID NO: 263 - protein, 121 aa, Homo sapiens
MGRIFLDHIGGTRLFSCANCDTILTNRSELISTRFTGATGRAFLFNKVVNLQYSEVQDRVMLTGRHMVRDVSCKNCNSKLGWIYEFATEDSQRYKEGRVILERALVRESEGFEEHVPSDNS

SEQ ID NO: 264 - DNA, 894 bp, Homo sapiens
atgggagaagaaggtacaggaaaggggttgcaagggcacgcccaccctcccgactgcaagcggagggaaggccgcagcccgaagctggcggagctgggccggcccgggcgacccccgggtgggctcacccggcagccgcagtggggcccgcgagcgcccccgccggcccagctgatggaggccacgagggcgggggaggcggacgttcatgggggggagggggcaaagggagacaccgccccagcccggtggctgggccgcttgggccgggcgtgggccctgctcaggacggttcacgccgtgcggtcatcgcggcccaaacaactcggtcaagttccgacttggattcggggcggagaccgggcgcgcccccgactatgcgacgggtgggggcggggcagccgcggcgcggcgcggcgggttgggggtcgcggccagaccgtccgcccagggggcgccgtgggcctcggcggcgggcctcggaggacgcgacggggaaacggggcggaggcgcgggcgccgcgcggaggggttgcggctgttgtcgcaccggtcgcccggctgcgcggcgggggcgggccgacggcggccgccgcgccaggcctcacaaagagcaaacagccccgcgcgtccgcccgcggtcccagcgccggggcccaccctgaaggatctggggcggccgctctgggaccccgggaagagcgcggcgaggaagaggcacttcctgcctgggccccccaccctgggccgattcccgagtgcctcgaagccgcccgacccgaacgggcgcctcagtccccaccggccccgagtccagcccctcccgcgggactcaccctgagcggcggtgagatccgcggctgccagcggcttgtcgctcttcagctggtatga

SEQ ID NO: 265 - protein, 297 aa, Homo sapiens
MGEEGTGKGLQGHAHPPDCKRREGRSPKLAELGRPGRPPGGLTRQPQWGPRAPPPAQLMEATRAGEADVHGGEGAKGDTAPARWLGRLGRAWALLRTVHAVRSSRPKQLGQVPTWIRGGDRARPRLCDGWGRGSRGAARRVGGRGQTVRPGGAVGLGGGPRRTRRGNGAEARAPRGGVAAVVAPVARLRGGGGPTAAAAPGLTKSKQPRASARGPSAGAHPEGSGAAALGPREERGEEEALPAWAPHPGPIPECLEAARPERAPQSPPAPSPAPPAGLTLSGGEIRGCQRLVALQLV

SEQ ID NO: 266 - DNA, 4670 bp, Homo sapiens
ttgagctcaaagcttagcagcttcaatgttgttgttaggcataaacagcttgcaaatttcaattttttttctctcctcacttttgaactagatttgggcaatggaggtgatgacagcattttagaagacagaacaggaattctaggtgtttaggcacgttgaagagaaacttgctagaggtgatgaagtggaaagaaaaagacaattcactatagggatcaacattattgcagttctgcaaaggatattttcttttaaaacatccatatctcttctttgccatggaaactacacccaatctacctgaacctgcggcacccctctgatgacccatttggattctctgatttcactgccaagattctcagttctccaaaatacttatcattcaggttgaataaaccagttctacagactgcttcttccatgcatttcccaatgatgctaactgcccttaaaattctttcagatttggaactgtatctgtatggaaacaacagagttttcttgaagtacaactaaggacaggtcaccactaggcactaacatcgctgacttgcatgattatggagatggtctatctgatgctgaaaatgtctctagttttttgacaacggctaaataaccatgggatcaagtggccttgggaaagcagcaacattagatgaactgctgtgcacttgcattgagatgtttgatgacaatggagagctggataatagttatttgccaagaatagttctactgatgcaccgatggtatttatcttccactgaattggcagaaaaacttctctgcatgtatcgaaatgccactggagaaagctgcaatgaatttcgattaaagatctgctacttcatgaggtactggattctgaagtttcctgcagagtttaatttggatcttggtttgattcgtatgactgaggaatttcgggaagtagctagtcaactaggatatgaaaaacacgtcagcctcatcgacatatccagcattccttcctatgactggatgagaagagtcacacagaggaaaaaagtatccaagaagggaaaagcctgtctgctgtttgaccatctggagcccattgaattggctgagcacctcacttttctggagcataaatcttttagaaggatctcattcactgattaccaaagctatgtcatccatggctgcctggagaataatccaaccttggaaagatcgattgctttatttaatggaatctctaagtgggtccagttgatggttcttagcaaaccaaccccccagcaaagggcagaagtcatcacaaagtttatcaatgttgcaaagaagctccttcagctcaaaaattttaacaccctgatggcagtggtgggaggcctcagtcatagttccatttcacgcctcaaagagacccattctcatctttcttcagaagttacaaagaactggaatgaaatgacagagttggtctcctccaacggcaattactgcaattaccgcaaggcctttgccgactgcgatggcttcaaaatccccatccttggagtacacttgaaagacttgatagctgtccatgtcattttcccagactggacagaggagaacaaagtgaacattgtgaaaatgcaccagctctccgttaccctgagtgaactagtctccctgcagaatgcctctcaccacttagaacccaacatggatttgatcaacctgctcacgctttccctggacctctatcacactgaagatgatatttacaaactgtcactggtgctggagcctagaaattctaaatcgcagcctacctcccctacgacgcccaacaagcctgtggtacccctggagtgggcattaggggtgatgccaaagccagaccccacggtcatcaacaagcacataaggaaattagtggagtctgtatttagaaactatgatcacgaccatgatgggtacatttcccaagaggactttgaaagtatagctgccaattttcccttcttggattccttctgtgttctggacaaagatcaggatggcctaattagtaaagatgaaatgatggcttacttcctgagagctaaatcccaactacactgtaaaatgggaccaggatttatccataattttcaggagatgacctatctcaagccaaccttctgcgaacactgtgcgggatttctctggggcataatcaagcaaggatacaaatgcaaagactgtggagccaattgtcacaaacagtgcaaagacctcctggttctggcctgcaggagatttgcccgggcgccctccttgagcagtggtcatgggtcactgcctggaagcccctcgctgcccccagcgcaggatgaggtgtttgagttccctggagtcactgctggacacagggatttagacagcagagccatcacactggttacaggctcttctcgcaagatctctgtgaggctacagagggccaccaccagccaggccacccagactgaacctgtctggtcagaggctggctggggggactcggggtcccacaccttccctaaaatgaaatccaagttccatgacaaagcagcaaaggacaaaggctttgccaaatgggaaaatgagaagcccagggtgcatgctggtgtggatgttgtagaccggggcacggagtttgaacttgaccaggatgaaggagaagagaccagacaggatggtgaggatggctgacttcaggctgcggaaactgaaggcaataatgttggcttttggaaggggcaagacgagaaactctgaagaaagctctgactctcaggaagttatctggaaagatacctggatgtttactgccttgggacactgtgggatctccatgtttggactatgggacagagaattgaccctaactaactatgaactatttatttcctcctcccctacccctagttaagtgccacaaagactgtgttatgtagtcagtacttttttctcatgtatctttctctagaccatttatatacgggtgaaatgaaagcctttttgcatgtacttgatactcagtctgtaaactcagacttcgctttttttgtgagactatcctttcaatatttttataaacttttgtgtgtgctgtggcagggaacagttaacaaggagtttatttagaggggtttttttcattttttgtttttcttgttttgttttgttttgttttgttcttcttggtgtgctttttggatgggaccagaacttaacattttcctgaggactaggaagctcatcagacactggaatgcagtgattcttctaatgatggtcaactgcaaggagaaactgtttacatccttcccactacacagttgctatgatatgtaacaagtcacacatgtatatatcacacaagtcttaccaattctgcgtcactaggaagctatagcatggtcgtgaaagctctcctaatacttacttaaatagccatggaagaaaattatgcttgtcccttctgactgggttaagccatctttcttaagattcctgaagtagaaatagcaattaagaaattaattcaagttttgacggttaacatttagcagaaaaacaaaccattgaataagctactaggtgaaatgcaaaacaaccatcaatttttttaaactcaataattttgtgaaaaaaaaaaccaccaccaaacttttggttgtaaaagagaacccttgttcccttcctaagaaactgccttccacaattaaagaatactcatagaaagaaaataatcataaatcatatttgattaacatttcatttaagcttttaaaatatcaattttttaaatagctcccatttacccaaaataactagttatgggtctatttcttccatgattagaggagagagaacttgattcaagatactgaaaaatagagctgggactgagcctgtgaatgacaggaatgatctattaccaggtgactagtcggaaactacacagacgtgcactggtctgcatttgggggctaaagtgtatatattccatttaaaatggaatttgtttgtatttggggcagtcttcagtaaagcctttctcctttcttttctccattgaggacagttctgctcagcaaaattgttgagtacctgttctgggcaggtcccacgctatatgcacaaagttaagaaaaacttggtcttagcccttgggagctgacagcccatgggcattaaggcaaagtagttccagtgatttaaaatacggttccaaatacgctaaaaccaacttgtgccaaccagatttacagattggaaatactgcagatgatgtgaagttatcagttggaggagctgtgattaagctggataataagagaacgtgccatctgtaaagcactcagaaggcagccatccctagatgttggtttcatgtatattacactatctactactatccataaatgcaataatatgcatgttaacaacattaaaaacagcaaacagcaatctaagtacagaaaagctttttgtgtgtttaaaaaaattgaagaaaattcaggaagaaacgtgttaataaacattgtactgttcttaaaaaaaaaaaaaaaaaaaaaaaaaaaaaaaaaaaaaaaaaaaaaaaaaaaaaaaaaaaaaaaaaaaaaaaaaaaaaaaaaaaaaaaaaaaaaaaaaaaaaaaaaaaaaaaaaaaaaaaa

SEQ ID NO: 267 - protein, 690 aa, Homo sapiens
MGSSGLGKAATLDELLCTCIEMFDDNGELDNSYLPRIVLLMHRWYLSSTELAEKLLCMYRNATGESCNEFRLKICYFMRYWILKFPAEFNLDLGLIRMTEEFREVASQLGYEKHVSLIDISSIPSYDWMRRVTQRKKVSKKGKACLLFDHLEPIELAEHLTFLEHKSFRRISFTDYQSYVIHGCLENNPTLERSIALFNGISKWVQLMVLSKPTPQQRAEVITKFINVAKKLLQLKNFNTLMAVVGGLSHSSISRLKETHSHLSSEVTKNWNEMTELVSSNGNYCNYRKAFADCDGFKIPILGVHLKDLIAVHVIFPDWTEENKVNIVKMHQLSVTLSELVSLQNASHHLEPNMDLINLLTLSLDLYHTEDDIYKLSLVLEPRNSKSQPTSPTTPNKPVVPLEWALGVMPKPDPTVINKHIRKLVESVFRNYDHDHDGYISQEDFESIAANFPFLDSFCVLDKDQDGLISKDEMMAYFLRAKSQLHCKMGPGFIHNFQEMTYLKPTFCEHCAGFLWGIIKQGYKCKDCGANCHKQCKDLLVLACRRFARAPSLSSGHGSLPGSPSLPPAQDEVFEFPGVTAGHRDLDSRAITLVTGSSRKISVRLQRATTSQATQTEPVWSEAGWGDSGSHTFPKMKSKFHDKAAKDKGFAKWENEKPRVHAGVDVVDRGTEFELDQDEGEETRQDGEDG

SEQ ID NO: 268 - DNA, 2745 bp, Homo sapiens
gcgcatgcgcgagtgtacgcgttgccggcgaagaggggagcctgacgactcggaaatttgaataccacagtagcatggagtgtgacctcatggagactgacatcttggagtcgttggaagatctaggttacaagggcccattgttggaagatggagcgctctctcaggcagtctctgctggagccagttcccccgagtttaccaaactctgtgcttggctggtgtctgaattaagagtgctctgtaaactagaggaaaacgtgcaagcaactaacagtccgagtgaagctgaagaattccagcttgaggtgagtgggctactaggggagatgaactgcccgtatctttcactgacatctggggatgtgaccaagcgccttctcattcagaagaactgcctcctcttgctcacatacctcatctcagaactagaagctgccagaatgctctgtgtgaatgctcctccaaaaaaagctcaagaaggaggcggtagtgaggtctttcaagagttgaaaggcatatgtattgctctaggaatgtccaaacctccagccaatataactatgttccaattcttcagcgggattgaaaaaaaattaaaggaaacattagcaaaagttccacctaatcatgtgggaaagcctttactgaagaagccaatgggaccagcccactgggaaaagatagaagcaattaaccaagccatagccaatgaatatgaagtccggagaaagctgctaataaaacgtttggatgtcactgtacaatcctttggctggtctgacagagctaagagccagacagaaaaattagccaaggtttaccagccgaaacgttcagtcttatcccctaaaactactatttctgttgcccatcttttggctgcaaggcaggacttgtcaaagattttaaggacaagcagcggctctataagagaaaagactgcctgtgccatcaataaggtgttgatgggcagggtgcctgacagaggtggtagacccaatgaaatcgaacctccacccccagagatgccaccgtggcagaagaggcaagatggcccccagcagcaaacaggaggccgaggaggagggagaggtggctatgaacattcctcatacggaggacgaggaggtcatgaacaaggaggcgggagaggtggacgtggtggctatgaccatggtggccgagggggaggaagaggaaataagcatcaaggaggctggacagatggagggagtggtggaggaggtggctaccaagatggtggttatcgagattcaggtttccagccaggtggctatcatggtggccacagcagtggtggctatcaaggcggaggttatggtggcttccaaacatcttcttcatatacaggaagtggataccagggtggtggctaccagcaggacaatagataccaagatggcgggcaccatggtgatcgtggtggtggtcgtggtgggcgaggtggtcgtggaggccgaggtggtcgtgcaggccagggaggaggctggggaggaagagggagccagaattatcaccaagggggtcaatttgaacagcatttccagcatggaggttatcagtataatcattctggatttggacagggaagacattacactagttgaggctaccgaaccttacattttgctagagctcaagtaatagaaacttagtttcagaatcctgaattcagcacctattttgaattaatgtgagaccacaggtggcaggcagattcctgcttggcataagcatttgtaggtcttcattcaattctgttagatttttttattggacttacataatgccgtttatttgagaaacacataacatctctcctttctatgaaaaattttttaaaaggtggttaaaattgcctttaattgcccagtagactaattccacagtcagaacatgcaaacttttttgaagaaattacttgaataagtagttttcatgttttcaatatgcagttttgaaaatgaggattcacctagacttttttagatttactactaggaaaccttcctcatatgaataaccatttatatgtgttttgcttaaagtattccaatgcctattttccaagcacagttctgccccccggttgacttttatgccacgtgtgcttcatgatggaacttttaggtcagttcctattaaatgagctcttctgcagatagcacattcagtagccttattttgttgatggaatactgtatcatatgctcaactctgaaaaccttgaacacggccaaaatccataaagattataaaagcaaactaagttgtgaagctatagtacatgtaggcatttagttaagtatagcaattcaaactgacctgcatccatccaaaacaaattcctccttcaaccttatttttacttgaaatttgctagaagaaatagcaaaccgaaatttgttttatgcatgagttaataccactggctcagcaaatacaagttagtttgctttaagcaggtaactttttttgtaatggaagaaatgcactacaaagttaagacagatttttgctaagtgcaggaggccctttattattgctgcagaaaacaaaagcctggctgagttgatgttttacattctcccttactgaaatctacatgacatgatgcttcttgctgggtttttgtacatgtaaacattgtcaagctgtgaaagaaaatggctggaggtgtgctttgtgtgaaaggtgagcaataaagtatctgttaagttc

SEQ ID NO: 269 - protein, 518 aa, Homo sapiens
MECDLMETDILESLEDLGYKGPLLEDGALSQAVSAGASSPEFTKLCAWLVSELRVLCKLEENVQATNSPSEAEEFQLEVSGLLGEMNCPYLSLTSGDVTKRLLIQKNCLLLLTYLISELEAARMLCVNAPPKKAQEGGGSEVFQELKGICIALGMSKPPANITMFQFFSGIEKKLKETLAKVPPNHVGKPLLKKPMGPAHWEKIEAINQAIANEYEVRRKLLIKRLDVTVQSFGWSDRAKSQTEKLAKVYQPKRSVLSPKTTISVAHLLAARQDLSKILRTSSGSIREKTACAINKVLMGRVPDRGGRPNEIEPPPPEMPPWQKRQDGPQQQTGGRGGGRGGYEHSSYGGRGGHEQGGGRGGRGGYDHGGRGGGRGNKHQGGWTDGGSGGGGGYQDGGYRDSGFQPGGYHGGHSSGGYQGGGYGGFQTSSSYTGSGYQGGGYQQDNRYQDGGHHGDRGGGRGGRGGRGGRGGRAGQGGGWGGRGSQNYHQGGQFEQHFQHGGYQYNHSGFGQGRHYTS

SEQ ID NO: 270 - DNA, 195 bp, Homo sapiens
atggagccagagccaactgaagacaaagatttggaagctgatgaagaggacaataggaaaagagatgcttatgatgatccagatgacttgatcttctttaatcaaaagaaaaagaagagaaaaacaaaaaagatacttcatattgatggaggtgaagaagatgtaaaggttcttaagactgaaagtgatatttaa

SEQ ID NO: 271 - protein, 64 aa, Homo sapiens [sequence omitted]

SEQ ID NO: 272 - DNA, 837 bp, Homo sapiens
atgcctagccccaggccgcgaggcagcccgccacccgctccctcgggctctcgggtccgacctccgcgctctggccgctctccggcgcccaggtcccctactggcccgaacacgccccgcgctcccggacgcttcgagtcccctttctcggtcgaggccatcctggcgaggcccgacccctgcgcgccggcggcctcccagccgtcgggctccgcctgcgtccacccggccttctggaccgctgcttccctgtgcgccaccgggggtctgccctgggcttgcccgacatcgtggctgcccgcctacctgagcgtaggtttttaccctgtgccagggccgcgcgtggctcccgtctgcggcctgctgggcttcggcgtcacagttgaagccgaggaccgcgacagtcttgctgaaaaagaccccggcgcgaggcttcccccgcacgctgctgaggtgggagaggggttggagctggctcactgctcaggactctgggccttcccagactgggccccaacggaggacctacaggacactgagagacagcaaaagagagtccgaactatgtttaacttggagcagctggaagagttggagaaagtgtttgcaaaacagcacaatctggtggggaagaagagagcccagctggcagctcggctcaaacttacagagaaccaggtgagagtctggttccagaaccgcagggtcaagtatcagaagcagcaaaagctgagggcagcagttacatctgccgaggctgcctccctggatgagccttccagcagctccatcgccagtatccagagtgatgatgccgagtcaggagtggacggctga

SEQ ID NO: 273 - protein, 278 aa, Homo sapiens
MPSPRPRGSPPPAPSGSRVRPPRSGRSPAPRSPTGPNTPRAPGRFESPFSVEAILARPDPCAPAASQPSGSACVHPAFWTAASLCATGGLPWACPTSWLPAYLSVGFYPVPGPRVAPVCGLLGFGVTVEAEDRDSLAEKDPGARLPPHAAEVGEGLELAHCSGLWAFPDWAPTEDLQDTERQQKRVRTMFNLEQLEELEKVFAKQHNLVGKKRAQLAARLKLTENQVRVWFQNRRVKYQKQQKLRAAVTSAEAASLDEPSSSSIASIQSDDAESGVDG

SEQ ID NO: 274 - DNA, 2561 bp, Homo sapiens
ccaagatggcggcctccatgtgcgacgtgttctccttctgcgtgggcgtggcgggccgcgcgcgggtctccgtggaagtccgtttcgtgagcagcgccaagggaaaggggctgtttgccacacagctcatccggaagggggagaccatcttcgtagaacggcccctggtggctgcacagtttctctggaatgcactttatcgctaccgagcctgtgaccactgccttagggcactagagaaggcagaggagaatgcccagaggctgaccgggaaaccaggccaggttctgcctcacccagagctgtgcactgtgcgcaaagacctccaccagaactgtccccattgccaagtgatgtactgcagtgcagaatgtcggttggcagccactgagcaataccaccaggtcctgtgcccaggcccctcccaggatgaccccttgcatcctctcaataagcttcaggaggcatggaggagtattcactacccacctgagactgcaagcatcatgttgatggctaggatggtggccacagtgaagcaggcgaaggacaaggaccgttggatcagactcttttcccagttttgtaacaaaacagccaatgaagaggaggaaattgtccataaacttctgggagacaaattcaagggccaactggaacttctgcggagactcttcacagaggccctctatgaggaagcagtcagccagtggttcactccagatggattccggtctctctttgctcttgttgggaccaatggccaaggaatcgggaccagctccctaagccagtgggtccatgcctgtgacactctggagttgaagcctcaggaccgtgagcagcttgacgccttcattgaccagctatacaaggacatcgaggcagcaactggagagtttcttaactgtgaaggatctggcctctttgtgcttcagagctgctgcaaccacagttgtgtgcccaatgcagagacctcctttccagaaaacaacttccttttgcatgtcactgctctggaggatattaagccaggagaggaaatttgtatcagctacttggactgctgtcagcgggagcgcagccgccacagccgccacaagatcctcagggagaactatctatttgtctgttcctgtcccaaatgcctggcagaggctgatgaacccaatgtgacctcagaagaggaagaggaagaggaggaggaggaggaaggagagccagaagatgcagagctgggggatgagatgactgatgtgtgatgttgccctgcccagaaagggccctgccctagaccctgccagaaaagggggctcttcccccagagaagtggcttggagggaacttcccactcccattgcctgctttccccattccagccctctctgctagagggtaggagagagcctggatctctggccccaacccccaccagacctcatgccctggacactgctgctgagttggctcagactctgcactggcactgagcctttcacaactggcctccccttgaggttcctccactctagggtttgaggggctggaatcagggccagggcctaacagtgtttcttcccctcggccccacggcccatactcaccccttcacctgaggcttctcccctctcaacttgctgttgatttcttttgaggggtaaaagaaagaccgagttcattgaagcagagatgggaggtggtgaggcgtcctcacctccccccaccacagctgtggctggtaaggcaactgcttgaccactggcccagcaagcagaggcgggcaggaggatctgggcatcctgagccccttccctgaggctgtctcctgggaatgctggaccagggggattacttcccccacccacacccccatttggacatctggggaagtggagattaacccctcccccagactcgtgccttgcctctcaggacctggcacagtggctggccttatggagtatggaaaaggcctctgccttcctcaggagggacacatagtgggtcatcaccctttctcacacctgcttcccaatgagcactcagcagcatggctgagacctggggcttgacaggcctgcgctccttagattaggatgctctggtattcctggggccagttaaaatgggtcagtgaggggctctcctggcctcaatctccatctttagggtctccacagactaacattgaagtcttccagaaacctcgaggagctgggctagatacttcgagagtagccctgtcttgtcccctcctacccccagattagcaccacccctctcactcttgggttggatgctatgggaattacaacccatcactcccaatgcctccctttcctggaggagcctgctgcattctcctgctgagggatcccagagagggcaggtgcccaccccacaggccctttcctggaccatggagccaggtgaaacctgtctggccccttacccattgggttcttactccttcacaacggtcagcactcctctcccagcccccctgcccactgttctcaataaaatgtgagtggtgagaggccaaaaaaaaaaaaaaaaaa

SEQ ID NO: 275 - protein, 302 aa, Homo sapiens
MYCSAECRLAATEQYHQVLCPGPSQDDPLHPLNKLQEAWRSIHYPPETASIMLMARMVATVKQAKDKDRWIRLFSQFCNKTANEEEEIVHKLLGDKFKGQLELLRRLFTEALYEEAVSQWFTPDGFRSLFALVGTNGQGIGTSSLSQWVHACDTLELKPQDREQLDAFIDQLYKDIEAATGEFLNCEGSGLFVLQSCCNHSCVPNAETSFPENNFLLHVTALEDIKPGEEICISYLDCCQRERSRHSRHKILRENYLFVCSCPKCLAEADEPNVTSEEEEEEEEEEEGEPEDAELGDEMTDV

SEQ ID NO: 276 - DNA, 1105 bp, Homo sapiens
gtcctgcgagcgacgcgcggcggggcggcgagaggaaacgcggcgccgggccgggcccggccctggagatggtccccggcgccgcgggctggtgttgtctcgtgctctggctccccgcgtgcgtcgcggcccacggcttccgtatccatgattatttgtactttcaagtgctgagtcctggggacattcgatacatcttcacagccacacctgccaaggactttggtggtatctttcacacaaggtatgagcagattcaccttgtccccgctgaacctccagaggcctgcggggaactcagcaacggtttcttcatccaggaccagattgctctggtggagagggggggctgctccttcctctccaagactcgggtggtccaggagcacggcgggcgggcggtgatcatctctgacaacgcagttgacaatgacagcttctacgtggagatgatccaggacagtacccagcgcacagctgacatccccgccctcttcctgctcggccgagacggctacatgatccgccgctctctggaacagcatgggctgccatgggccatcatttccatcccagtcaatgtcaccagcatccccacctttgagctgctgcaaccgccctggaccttctggtagaagagtttgtcccacattccagccataagtgactctgagctgggaaggggaaacccaggaattttgctacttggaatttggagatagcatctggggacaagtggagccaggtagaggaaaagggtttgggcgttgctaggctgaaagggaagccacaccactggccttcccttccccagggcccccaagggtgtctcatgctacaagaagaggcaagagacaggccccagggcttctggctagaacccgaaacaaaaggagctgaaggcaggtggcctgagagccatctgtgacctgtcacactcacctggctccagcctcccctacccagggtctctgcacagtgaccttcacagcagttgttggagtggtttaaagagctggtgtttggggactcaataaaccctcactgactttttagcaataaagcttctcatcagggttgcaaaaaaaaaaaaaaaaaaaaaaaa

SEQ ID NO: 277 - protein, 188 aa, Homo sapiens
MVPGAAGWCCLVLWLPACVAAHGFRIHDYLYFQVLSPGDIRYIFTATPAKDFGGIFHTRYEQIHLVPAEPPEACGELSNGFFIQDQIALVERGGCSFLSKTRVVQEHGGRAVIISDNAVDNDSFYVEMIQDSTQRTADIPALFLLGRDGYMIRRSLEQHGLPWAIISIPVNVTSIPTFELLQPPWTFW

SEQ ID NO: 278 - DNA, 1280 bp, Homo sapiens
caagcttctgggtatttctattgcgcgaggcattgtgggttgctgggcggcccggtctcggagaagaggggagagtggcgggccgctgaataagcttccaaaatgatggattctcagctggtagctggtgttgcattcaagaagactttctcttacgctgggtttgaaatgcaacccaaaaagtaccacaatcccaagattgcccttttgaatgtcgagctcgagttgaaagctgagaaagacaatgctgagataagagtccacacagttgaggattatcaggcaattgttgatgctgagtggaacattctctatgacaagttagagaagatccatcattctggagccaaagttgtcttgtccaaactccccattggggatgtggccacccagtactttgctgacagggacatgttctgtgctggccgagtacctgaggaggatctgaagaggacaatgatggcctgtggaggctcaatccagaccagtgtgaatgctctgtcagcagatgtgctgggtcgatgccaggtgtttgaagagacccagattggaggcgagaggtacaatttttttactggctgccccaaggccaagacatgcaccttcattctccgtggcggcgccgagcagtttatggaggagacagagcggtccctgcatgatgccatcatgatcgtcaggagggccatcaagaatgattcagtggtggctggtggcggggccattgagatggaactctccaagtacctgcgggattactcaaggactattccaggaaaacagcagctgttgattggggcatatgccaaggccttggagattatcccacgccagctgtgtgacaatgctggctttgatgccacaaacattctcaacaagctgcgggctcggcatgcccaggggggtacatggtatggagtagacatcaacaacgaggacattgctgacaactttgaagctttcgtgtgggagccagctatggtgcggatcaatgcgctgacagcagcctctgaggctgcgtgcctgatcgtgtctgtagatgaaaccatcaagaacccccgctcgactgtggatgctcccacagcagcaggccggggccgtggtcgtggccgcccccactgagaggcaccccacccatcacatggctggctggctgctgggtgcacttaccctccttggcttggttacttcattttacaaggaaggggtagtaattggcccactctcttcttactggaggctatttaaataaaatgtaagacttcagataactttgtaaa

SEQ ID NO: 279 - protein, 339 aa, Homo sapiens
MMDSQLVAGVAFKKTFSYAGFEMQPKKYHNPKIALLNVELELKAEKDNAEIRVHTVEDYQAIVDAEWNILYDKLEKIHHSGAKVVLSKLPIGDVATQYFADRDMFCAGRVPEEDLKRTMMACGGSIQTSVNALSADVLGRCQVFEETQIGGERYNFFTGCPKAKTCTFILRGGAEQFMEETERSLHDAIMIVRRAIKNDSVVAGGGAIEMELSKYLRDYSRTIPGKQQLLIGAYAKALEIIPRQLCDNAGFDATNILNKLRARHAQGGTWYGVDINNEDIADNFEAFVWEPAMVRINALTAASEAACLIVSVDETIKNPRSTVDAPTAAGRGRGRGRPH

SEQ ID NO: 280 - DNA, 1892 bp, Homo sapiens
caagcttctgggtatttctattgcgcgaggcattgtgggttgctgggcggcccggtctcggagaagaggggagagtggcgggccgctgaataagcttccaaaatgatgcccacaccagttatcctattgaaagaggggactgatagctcccaaggcatcccccagcttgtgagtaacatcagtgcctgccaggtgattgctgaggctgtaagaactaccctgggtccccgtggcatggacaagcttattgtagatggcagaggcaaagcaacaatttctaatgatggggccacaattctgaaacttcttgatgttgtccatcctgcagcaaagactttggtagacattgccaaatcccaagatgctgaggtgggtgatggcaccacctcagtgaccttgctggctgcagagtttctgaagcaggtgaaaccctatgtggaggaaggtttacacccccagatcatcattcgagctttccgcacagccacccagctggcagttaacaagatcaaagagattgctgtgaccgtgaagaaggcagataaagtggagcagaggaagctgctggaaaagtgtgccatgaccgctctgagctccaagctgatctcccagcagaaagctttctttgctaagatggtggtggatgcagtgatgatgctcgatgatttgctgcagcttaaaatgattggaatcaagaaggtacagggtggagccctcgaggattctcagctggtagctggtgttgcattcaagaagactttctcttacgctgggtttgaaatgcaacccaaaaagtaccacaatcccaagattgcccttttgaatgtcgagctcgagttgaaagctgagaaagacaatgctgagataagagtccacacagttgaggattatcaggcaattgttgatgctgagtggaacattctctatgacaagttagagaagatccatcattctggagccaaagttgtcttgtccaaactccccattggggatgtggccacccagtactttgctgacagggacatgttctgtgctggccgagtacctgaggaggatctgaagaggacaatgatggcctgtggaggctcaatccagaccagtgtgaatgctctgtcagcagatgtgctgggtcgatgccaggtgtttgaagagacccagattggaggcgagaggtacaatttttttactggctgccccaaggccaagacatgcaccttcattctccgtggcggcgccgagcagtttatggaggagacagagcggtccctgcatgatgccatcatgatcgtcaggagggccatcaagaatgattcagtggtggctggtggcggggccattgagatggaactctccaagtacctgcgggattactcaaggactattccaggaaaacagcagctgttgattggggcatatgccaaggccttggagattatcccacgccagctgtgtgacaatgctggctttgatgccacaaacattctcaacaagctgcgggctcggcatgcccaggggggtacatggtatggagtagacatcaacaacgaggacattgctgacaactttgaagctttcgtgtgggagccagctatggtgcggatcaatgcgctgacagcagcctctgaggctgcgtgcctgatcgtgtctgtagatgaaaccatcaagaacccccgctcgactgtggatgctcccacagcagcaggccggggccgtggtcgtggccgcccccactgagaggcaccccacccatcacatggctggctggctgctgggtgcacttaccctccttggcttggttacttcattttacaaggaaggggtagtaattggcccactctcttcttactggaggctatttaaataaaatgtaagacttcagataactttgtaaa

SEQ ID NO: 281 - protein, 543 aa, Homo sapiens
MMPTPVILLKEGTDSSQGIPQLVSNISACQVIAEAVRTTLGPRGMDKLIVDGRGKATISNDGATILKLLDVVHPAAKTLVDIAKSQDAEVGDGTTSVTLLAAEFLKQVKPYVEEGLHPQIIIRAFRTATQLAVNKIKEIAVTVKKADKVEQRKLLEKCAMTALSSKLISQQKAFFAKMVVDAVMMLDDLLQLKMIGIKKVQGGALEDSQLVAGVAFKKTFSYAGFEMQPKKYHNPKIALLNVELELKAEKDNAEIRVHTVEDYQAIVDAEWNILYDKLEKIHHSGAKVVLSKLPIGDVATQYFADRDMFCAGRVPEEDLKRTMMACGGSIQTSVNALSADVLGRCQVFEETQIGGERYNFFTGCPKAKTCTFILRGGAEQFMEETERSLHDAIMIVRRAIKNDSVVAGGGAIEMELSKYLRDYSRTIPGKQQLLIGAYAKALEIIPRQLCDNAGFDATNILNKLRARHAQGGTWYGVDINNEDIADNFEAFVWEPAMVRINALTAASEAACLIVSVDETIKNPRSTVDAPTAAGRGRGRGRPH

SEQ ID NO: 282 - DNA, 7121 bp, Homo sapiens
atgacaactggcttgtctgatcagcaggtggtctgtgaccttgatcacagggcagtggaagccctattgcaggcagttaggaagaggatggcaggggcctcgcccgcggtcccccatgagcgcgcccggctgaccggcggggcggccgcggtggagcccgcgtgccgcgggggcggcggggccatggcctcgctggacctgccgtaccgctgcccccgctgcggggagcacaagcgcttccggagcctgtcgtcgctgcgcgcgcacctggagtacagccacacctacgagacgctctacatcctctccaagaccaacagcatctgcgacggcgccgccgccgccgcggccgccgccgccgctgcctcggggttcccgctggctcccgagcccgccgccctgctggccgtgcccggcgcccggcgagaggtcttcgagagcacttccttccagggcaaggagcaggcggccgggccgtcgcccgcggcgccgcacctgctgcaccaccaccatcaccacgctcccctcgcccacttccccggcgacctggtgcccgctagcctgccctgtgaggagttggccgagccgggccttgtgcccgccgcagcagcgcgctatgcgctgcgcgagatcgagatcccgctgggggagctgttcgcccgcaagtccgtggcgtcctcggcgtgctcgacgccgccgcctggccccggccccggcccttgccccgggcctgcctccgcttcgcccgcgtccccctcacccgctgatgtggcctacgaagagggcctggcgcgcctcaagatccgcgcgctggagaagctggaggtggaccggcggctggagcggctgagcgaggaggtggagcagaagatcgcgggccaggtgggccggctgcaggccgagctggagcgcaaggcggccgaactggagactgcgcggcaggagagtgcgaggctcgggcgcgagaaggaggagctggaggagcgcgcgtctgagctctcccgccaggtggacgtgagcgtagagctgctggcctcactcaagcaggacctggtgcacaaggaacaggagctgagccgcaagcagcaggaggtggtgcagatcgaccagttcctgaaggagacggcggcgcgggaggccagcgccaagctgcggctgcagcagttcattgaggagctccttgagcgggctgaccgtgccgagcggcagctgcaggtcatcagcagcagctgtggcagcacgcccagcgccagcctgggccgtggaggtgggggcggtggtgctggacccaatgcccggggcccaggcagaatgcgagaacaccacgtgggcccggccgtgcctaacacatatgcagtgtcacggcatggctcctctccgagcacaggggcctccagccgtgtgccagccgcatcccagagctcaggctgctatgacagtgacagtctggagctgcccaggccagaggagggggcccctgaggacagtggccctgggggcttgggcacacgggcccaggctgccaacgggggctcagagcggtcccagccccctcgcagctcaggcctgcggcgccaggccatccagaactggcagcgcagaccccgccgacacagcactgagggggaagagggtgatgtctccgacgttggctcccgaaccactgagtcagaggctgagggcccgttggatgcgccccgccccgggcctgctatggctgggccattgagcagctgccggctctcagcccgccccgagggaggcagtgggcggggtcggcgagcagagagggtcagcccctcacgctccaatgaggtcatcagcccagagatcctgaagatgcgagctgccctcttctgcatcttcacctacctggacacgcgcacactgctgcatgctgccgaggtctgccgggactggcgcttcgtggcccgccaccccgcagtctggacaagggtgctgcttgagaatgcccgtgtctgctccaagttcctggcaatgctggctcagtggtgcacccaggcccactctctgacgctgcagaacttgaagccccggcagcggggaaagaaggagagcaaggaggagtatgcccggagcacccggggctgcctggaagctgggctggagtccctgctgaaggcagctggggggaacctgctgatcctgcgcatctcccactgtccaaacatcctcaccgaccgctcgctctggctggccagctgctactgccgtgccctgcaggctgtcacgtacaggagtgccacagaccccgtgggccatgaggtcatttgggccctgggcgcaggctgcagagagatcgtctccctccaagtggcaccacttcacccctgccagcagcccacacgcttcagtaaccgctgcctgcagatgattggtcgctgttggccccacctgcgggccctgggggtcgggggtgccggctgtggggtgcagggcctggcatcactcgcgagaaactgcatgcggctgcaggtcctggagcttgaccacgtgtcagagatcacccaggaggtggcagcagaggtctgccgggaaggcctgaagggactggagatgctggtgctcacggcgactcccgtcacccctaaggccctactgcacttcaacagcatctgccggaacctcaagtccattgtggtccagattgggattgcggattatttcaaagagcccagcagccctgaggcccagaagctgtttgaggacatggtgacaaaactccaggctctgcgacggaggcccggcttctctaagattctgcacatcaaggtggaaggcggctgctaacccgggtagggggcggcagggcccctgccagccccacaccagggcactctctttggacctcagagggaccctggtttggactagacctttggaggccgagtgttatccctggcttctggagggggactgtcaagtctcctgtcctcctcctggagcagcagagcaacaggcctgacccagggcactgcctccccagtacaggggcttggacagaagctgccctccgacccccaccctaccccggctggagtagcctctggcacagccagtgaggagctgtcaccaccagcgcctggtgtcatcacctggaggatctgcaataaccacccagtggctcctcagctgttctggctggcctctccttcctgaggcccagcctcctggtcaggagcatctggggccccaagccaatgggggctccacaaggcagctcagacttggcaaggagggctcttctcctcaaccttgctgcagccttctgggggcaccccttcagacagcctgcccaggctgtggatccacatttcctgggggtaccacagccagacctaggggcctgggcacgtggtcagccaaaagctgggggcagcagtacagtggggtagtgggggtgggtttggaaaggaaacagtcacccagaacttctccccaggatgagaccacccttccaaggtgggggattgccagggggagaaaacttatttattgctgtaagacaggacccctcctcccaacctcataccccaccgcacaccagagctaaattcaaagctgaaaggcgcacgtttctatacctacattcattcctgagggaccctccagagggtcaaggtcccagccccaggcagccctgtcacagtgagaagtagttcctgtccttaaggaatttccttctaatccaggtgcttgggcaggaacccgatggccttcgggtcaccaaggctgtctgggagggaggcacagggccgccctctgtgctgaggccgtggaggaagccaggaggagggtggcttgctttgcttccttgtctaattagcttgcttgaagatgtggccttggcagggagccagacccatggggccaaggaagaggaagagcatcctcaatagactcactcccccttccttggtctccacgggccccgtggactgagggctgcattggggtcttctgcctaggggaagtgctggacctgagctggagccacttggcttagaagccacaggattcacttttcactggcctttgcagtccccaaaggatcaggtctcagaaccaaggctccaaaggctgaggtctccccagttcctcctctcagaactcccacagtagctcagaggccgggggtcctgccaactttcatttggaaagttctttcgaacatctaaactagatctatcttagggtttctttctctcctagataggatcagctcccagccctagccattaggctgctggtcctggcgggggatggggtcccctcgttacccagtccttcccagggacccaacttcctaacacaacctggcttggacatgaagaccctcccccaggttaccttgtaaagagtcctccagagctgggatcccatgggcgcagcagcacacccagctcccatggcgtcactccctagctctgtcccagcttttgctatcattgctgacttttcctcctgtggctcattctgtccctgccctttgaaaacctaaaataccaagggtgtcatgctggcaactccctgcccagtcctgcacaaagccttggctgtgtgtggcaccccttgcctcctaccccagagcagctggctccattggcttctccctgcaccagccctgtcctcaggggtcaggaaaaagcagcacagctttctttcctctcctccagaggcctggaagggaggtggaggtccagtaagggcctggctgccttggatttcttggtcctgccttgccaactgcaccctgtagctcctgctccctgtgaccccagaaccagaggtgctgccttccctgtctcctagacaaagcacaaagggatgccctgcttggcttgagcctgcccaactgaaggattttctctgccccagggaccttccatccctgaatacaaggctctaggcaacttctctctgggtggtacacactagaatgcctggcattagccctagaaaggaggttggggtgtatgggtagtgagctagggtgggagaaaggtggtgctgaaaggacagatgctagttgtagtttcactcactcattcattcattagtgcaacagtactgagcaccacctgcactagaggcagaggggtgaacaagatacccttctgcctggggggacgtccacttcccatgggtttggctatttccaggaaagcccctcagtcctccaccctgttctggctgtgtgtgaaggatgtgtgtgagcaggcccaatcctttgcagcaagaatgagaggtcagagtattccattgcacacgcaccctggggctgacagacttgtgccccctagccttcatgcatgcccaagcactggcagctttgcagcccctgccccaccagccccttgacgctcttcttttgttctctcctcggggatgagctctgctgctgagtagggagcttttgcttgctgggaggctctatgcatggatttttttggtgaccatacagctagggctgaggatgggaacagggacagagggcctggctatccctagaagcacttcatccatctttacccacccaaacgggatcccttcacatctcatacccagtaagatgcaagaaaggaatatctgagagcaagcagccctgctccaggggccccaggtatgtgtagaggcccagtgggggtggccacttggtgtttctaccaccccctgccatccagtctggccccagtacctacctgggaggttggtgtacttggcttaagtacttcatgctttattcaggctgcttccccacagcaccggcaggaaatgaaggtgcacttatatgcatccctgcaggaataaagagtgggtggcctgcccagcccagcaccacagcctttccccagccaggagagaccacctaaggatcaaggcagctcctgttttcttggttctgtgacactcgagtctgagccagcccctcaggaattgcctcaaaagagaaaaacaaaaaaaagtcctccttcccaaggcctgctactccaaggtttggctccatcccttgcctttgggtcctgcctatttccccactcctggtctcttatctttggggccaccagtggggagtcacccgggccccaatccctctaaggcgctaagttgaaggaggccttcccagagtgactattggtgccaaagtcccagttcctgttggacttggggtaaaaacaggagatggtgagtgggtgtaaggcccaaatgcccagagaagttaactcgaacccatgggacctgtcccagcctgtcagtccctgatgagtgtaacttccttcccctgggggcctggcccttctctccaacccagtggccatgctttctcacccagccttgtgcccggcctgcatttctgtatatattgctgtgtattgtgtgtatgtatgtattcctggacaagtgtgttcatctgcagcccttgcctgaggataaggtttaggattgggtaaagatcagaataccagggccagctaaggcaacgactccctccccaaacccttgggacctcagccagtcccaaggctgccctgacaatcaggcaggctccccaccgtgaggccaagcctcctctgccactgccagcatggcccaagggaggcttggccttgggcttgccagcctcagctctgccctgacaagggtcttgtatccagggcagaggcctgaggtgacccaggcttgctttgtggctgatgccagcaggcttggttctagtgggcaccactggtgggcaacctccataactggcccttaggccctaccttcctacacagctaggctataatgggcctgagtgagagggtagcttccccagccccaagcacaggcagaggggtggagagcaatttttggttttatttttgtttctgaagtggtgcctgtacctccagcccccagggggccttccctggccacacttctctgccccacccaggcatcgccatcccagcactttgctccatgtcacccgtaagatgccctttgctgaatgtacctgagtgtatgtatttaaaaggactcacatgggcatcagagaatttatggctctgtatccaataaaaaagatggtgaaactggtctatctgccccagagaggt

SEQ ID NO: 283 - protein, 936 aa, Homo sapiens
MTTGLSDQQVVCDLDHRAVEALLQAVRKRMAGASPAVPHERARLTGGAAAVEPACRGGGGAMASLDLPYRCPRCGEHKRFRSLSSLRAHLEYSHTYETLYILSKTNSICDGAAAAAAAAAAASGFPLAPEPAALLAVPGARREVFESTSFQGKEQAAGPSPAAPHLLHHHHHHAPLAHFPGDLVPASLPCEELAEPGLVPAAAARYALREIEIPLGELFARKSVASSACSTPPPGPGPGPCPGPASASPASPSPADVAYEEGLARLKIRALEKLEVDRRLERLSEEVEQKIAGQVGRLQAELERKAAELETARQESARLGREKEELEERASELSRQVDVSVELLASLKQDLVHKEQELSRKQQEVVQIDQFLKETAAREASAKLRLQQFIEELLERADRAERQLQVISSSCGSTPSASLGRGGGGGGAGPNARGPGRMREHHVGPAVPNTYAVSRHGSSPSTGASSRVPAASQSSGCYDSDSLELPRPEEGAPEDSGPGGLGTRAQAANGGSERSQPPRSSGLRRQAIQNWQRRPRRHSTEGEEGDVSDVGSRTTESEAEGPLDAPRPGPAMAGPLSSCRLSARPEGGSGRGRRAERVSPSRSNEVISPEILKMRAALFCIFTYLDTRTLLHAAEVCRDWRFVARHPAVWTRVLLENARVCSKFLAMLAQWCTQAHSLTLQNLKPRQRGKKESKEEYARSTRGCLEAGLESLLKAAGGNLLILRISHCPNILTDRSLWLASCYCRALQAVTYRSATDPVGHEVIWALGAGCREIVSLQVAPLHPCQQPTRFSNRCLQMIGRCWPHLRALGVGGAGCGVQGLASLARNCMRLQVLELDHVSEITQEVAAEVCREGLKGLEMLVLTATPVTPKALLHFNSICRNLKSIVVQIGIADYFKEPSSPEAQKLFEDMVTKLQALRRRPGFSKILHIKVEGGC

SEQ ID NO: 284 - DNA, 2169 bp, Homo sapiens
ccgcggctccccgactcctttcccagaggtgagtgcccgaagccaggagcccggggcgcctaggtctgtgcgctgcggggaacccctaccgccagcctccccgccacccgcgcgcccccaagcccagcgggcgaggccccgggcgccccacagccggcgccgcgccatgctccaccttagcgagttttccgaacccgacgcgctcctcgtcaagtccactgaaggctgttgcgccgaacccagcgctgaattgccccggctgcctgccagggacgctcccgcggccaccggctaccctggagcaggcgacttcttgagctgggctttgaacagctgcggcgcaagtggggacttagccgactcctgcttcctggaggggcctgcgcccacaccccctcccggcctcagctacagcggtagcttcttcattcaggcagtgcccgaacacccgcacgacccggaggcactcttcaacctcatgtcgggcgtcttaggcctggcacccttccccggtccagaggcagcagcgtccagatccccgctggatgccccttttcctgcggggtccgatgccttgctgccgggtccgccggacctttactccccggatctgggcgctgcccctttcccagaggcgttctgggaggcctcgccttgcgcgggtgccccctcgcagtgcctgtatgagcctcagctctccccgcccgacgtcaagcccggcctccggcggcctcccgcctcgccagcgctggacgctgtctctgccttcaagggtccctacgcgccctgggagctgctttctgtgggggccccagggaactgtgggtcacagggagactaccaggccgccccggaggctcgttttcccgtaatagggaccaagattgaggacttgctgtccatcagctgccctgcggaactgccggccgtcccagccaacagactctatcccagcggggcctatgacgctttcccgctggccccgggtgacttaggggagggggctgagggcctccctgggctcctgacccctcctagtggggagggagggagtagcggcgacggcggagagtttctggccagtacgcagcctcagctttccccgctgggccttcgcagcgccgccgcggcggacttccctaaacctctggtggcggacatccctggaagcagtggcgtggctgcaccacccgtgccgccgccgccgcccacccctttcccccaggccaaggcgcgacgcaaggggcgccgcggcggcaaatgcagcacgcgctgcttctgcccgcggccgcacgccaaggccttcgcttgcccggtggagagttgtgtgcggagctttgcgcgctccgacgagctcaatcgccacctgcgcatccacacgggccacaaacccttccagtgccgcatctgcctccgcaacttcagccgcagcgaccacctcaccacgcacgtgcgcacccacaccggcgagaagccttttgcttgcgacgtgtgcggccgccgcttcgcgcgcagcgatgagaagaaacggcacagcaaggtgcacctcaagcagaaggcgcgcgccgaggagcggctcaagggcctcggcttttactcgctgggcctctccttcgcttctctctgagcaagagatgggtttatgggttggggcgccgccgttcggcgcgcacgagttccgggccgttcccctccccgctcttcttccaactcctcctcgcacgcccgagggccggcctccgtcccgcttccagtttccttgaagcgcccgccgcacacgccctattcagcaccagctcgccggacagttcccgcggtccaggcgctgtcacccttgtcagccgcgctttgggggaagtcttctgagaccacccagtgaataggcactaccctgggattcaagacagtcttttgtaactgcacacgccccacgccttcctctataacccccagagacaggctggggcaggccaaggcggtctcgcgcgggactttgtacagcagtgtcttatccagcagccgattggatgtaacgttttgctttgggttttttttccttttgttgttgttaatttttgtaaagcagacgctactctcaagcagttgacaaaactgtttatttttgcaattaaaattattgtgctaaaaaaaaaaaaaaaaaaaaaaaaa

SEQ ID NO: 285 - protein, 486 aa, Homo sapiens
MLHLSEFSEPDALLVKSTEGCCAEPSAELPRLPARDAPAATGYPGAGDFLSWALNSCGASGDLADSCFLEGPAPTPPPGLSYSGSFFIQAVPEHPHDPEALFNLMSGVLGLAPFPGPEAAASRSPLDAPFPAGSDALLPGPPDLYSPDLGAAPFPEAFWEASPCAGAPSQCLYEPQLSPPDVKPGLRRPPASPALDAVSAFKGPYAPWELLSVGAPGNCGSQGDYQAAPEARFPVIGTKIEDLLSISCPAELPAVPANRLYPSGAYDAFPLAPGDLGEGAEGLPGLLTPPSGEGGSSGDGGEFLASTQPQLSPLGLRSAAAADFPKPLVADIPGSSGVAAPPVPPPPPTPFPQAKARRKGRRGGKCSTRCFCPRPHAKAFACPVESCVRSFARSDELNRHLRIHTGHKPFQCRICLRNFSRSDHLTTHVRTHTGEKPFACDVCGRRFARSDEKKRHSKVHLKQKARAEERLKGLGFYSLGLSFASL

SEQ ID NO: 286 - DNA, 1859 bp, Homo sapiens
tagccagggcgggcggccacctctgccctactccttccctccgcgttccgggcctcggagccgccttgaggaggatgagtccctggagctggttcctgctgcagaccctctgcctcctgcccacgggcgcagcttcgcggcgcggggcgcccggcaccgccaactgcgagctcaagccccaacaaagcgagctgaattccttcttgtggaccattaagcgagacccaccatcttacttctttggcacaatccatgtcccgtacacccgagtttgggacttcatccccgacaactctaaggaggctttcctgcagagcagcattgtgtactttgagttggatctcacagacccctataccatctcagctctcaccagctgtcagatgctgccacagggcgagaacctccaagatgtgctccccagggacatctactgccgcctcaagcgccacctggagtatgtcaagctcatgatgcccttgtggatgaccccagaccagcgcggcaaggggctctacgcagactacctcttcaatgctattgccggaaactgggagcgcaagaggcctgtctgggtgatgctcatggtcaactccctgactgaagtggacattaagtcccgtggagtgcctgtcttagacctgttccttgcccaggaggctgagcggctgaggaaacagactggggcagtggaaaaggtggaagagcagtgccatccattgaatgggttgaacttttcacaggtcatctttgctttgaaccagaccctcctgcagcaggaaagcctgcgagcaggcagtcttcagatcccctacacgacggaggatctcatcaaacactataactgcggggacctcagctccgtcatcctcagccatgacagctcccaggttcccaattttattaatgccacgctaccacctcaggagcgcatcactgctcaggagattgacagctacttacgccgggagctgatctacaagcggaatgagagaatagggaagcgggtgaaggcccttttggaggagttccctgacaaaggcttcttctttgcctttggagctggtcatttcatgggcaacaacacagtgctggatgttttgcggcgtgaaggctatgaggtagaacacgcccctgctggacgacccatccacaaagggaagagtaaaaagacctccacacggcccactctgtccaccatctttgctccaaaagtccctaccctggaagtaccggcaccagaagccgtatcctcagggcactcaacgctgcctccccttgtgtcccggcctggaagtgccgacacgcccagtgaggccgaacagaggttccggaagaagcggaggcggtcacagcggaggccgcgactccggcaattcagcgatctgtgggtccgcctggaggagagtgacatagtcccgcaactccaggtccctgtcctggacaggcacatctccactgaactgcggctccctcgccgtgggcattcccaccacagccagatggtggccagcagtgcctgcctgtctctctggactcctgtgttctgggtgctggtgctggctttccaaacagagacacccctcctgtaacgactggaagcaccaggctaagaacctgacccctcggacttgaagaatggccattcctgtactccacattctggtctagccttgttgggcccaatccagaagagactgctcttgaaaaagcggcccagtgttgattcttctctttccaaggaatgtgactttgggttatccaactttgggggcaggtgtacagttttgtaacatagtgagttgtgtgaaaataaattataaatgagttgtatgaaaataaatacctttttttgtata

SEQ ID NO: 287 - protein, 505 aa, Homo sapiens
MSPWSWFLLQTLCLLPTGAASRRGAPGTANCELKPQQSELNSFLWTIKRDPPSYFFGTIHVPYTRVWDFIPDNSKEAFLQSSIVYFELDLTDPYTISALTSCQMLPQGENLQDVLPRDIYCRLKRHLEYVKLMMPLWMTPDQRGKGLYADYLFNAIAGNWERKRPVWVMLMVNSLTEVDIKSRGVPVLDLFLAQEAERLRKQTGAVEKVEEQCHPLNGLNFSQVIFALNQTLLQQESLRAGSLQIPYTTEDLIKHYNCGDLSSVILSHDSSQVPNFINATLPPQERITAQEIDSYLRRELIYKRNERIGKRVKALLEEFPDKGFFFAFGAGHFMGNNTVLDVLRREGYEVEHAPAGRPIHKGKSKKTSTRPTLSTIFAPKVPTLEVPAPEAVSSGHSTLPPLVSRPGSADTPSEAEQRFRKKRRRSQRRPRLRQFSDLWVRLEESDIVPQLQVPVLDRHISTELRLPRRGHSHHSQMVASSACLSLWTPVFWVLVLAFQTETPLL

SEQ ID NO: 288 - DNA, 896 bp, Homo sapiens
gccttttcaactattactggtctagaaataaggtcactgtatgatcttttcactgaaaactgattaaatttaaaaacacacacacacgcacatacacgtctggcctctagccatgtaatggcagtaccgatgctaacagcagctgttcactgtgtgccagcctccacccaagcatttcgcctggactgtcccactgcctgcattcaacacaattatttctgctgagcctaccatgtgccagacactgttctaggcacagagaatacaacagtgagtgacacacagttccctgttggtgccaattgctgtggagaacatgtaagctggctttaagtctttcagcctggaggaggccaagatgtaactttcttccagtgtcccaaatctgggttcatctgacaccagccgacttgaccatgccacctaagttggaccctaacaagatcaaagtcgtatacctgagttgcaccgggagtgaagtcaatgcctcatctgtgctggccaccaagatcagcccccctgcgtctgtctccaaaaaaggttggtgatgacattgccaagccaaccagtgactggaggggtctgaggactacagtgaaactgaccattcagaacagagaggcccagattgaggtggtaccttctgcttctgccctcgaagccttcaaggaaccaccaagaaatagaaagaaacaggaaaacattaaacacagtggaaatatcacttttgatgaggtcgtcaacgttgctcaacagatgcatcaccaatctttagccagagaactttctggaaccattaaagagatcctggggacttcccagtctgtgggctgaatcttgatggctgccacactcatgacatcaacaatggtgcagtggaatgcccagctagttaa

SEQ ID NO: 289 - DNA, 482 bp, Homo sapiens
gcgggcgccgctcttttgtttcttgctgcagcaacgcgagtgggagcaccaggatctcgggctcggaacgagactgcacggattgttttaagaaaatggcagacaaaccagacatgggggaaatcgccagcttcgataaggccaagctgaagaaaacggagacgcaggagaagaacaccctgccgaccaaagagaccattgagcaggagaagcggagtgaaatttcctaagatcctggaggatttcctacccccgtcctcttcgagaccccagtcgtgatgtggaggaagagccacctgcaagatggacacgagccacaagctgcactgtgaacctgggcactccgcgccgatgccaccggcctgtgggtctctgaagggacccccccccaatcggactgccaaattctccggtttgccccgggatattatagaaaattatttgtatgaataatgaaaataaaacacacctcgtggcatggc

SEQ ID NO: 290 - protein, 44 aa, Homo sapiens
MADKPDMGEIASFDKAKLKKTETQEKNTLPTKETIEQEKRSEIS

SEQ ID NO: 291 - DNA, 973 bp, Homo sapiens
aattaaaaattgcttcttctccgagaaaacaccaaatggcggatgacgccggtgcagcgggggggcccagagccctggtggccatgggatagggaaccgcggtggcttccacggaggtttcggcagtggcatccggggccggggtcgcgggagtggacggggccgtgccgaggccgcggagctcgcggaggcaaggccgaggataaggagtggatgcctgtcaccaagctgggccgcttggtcaaggacatgaagatcaagtccctggaggagatctatctcttctccctgcccattaaggaatctgagatcattgatttcttcctgggggactctctcaaggatgaggttttgaagattatgccggtgcagaagcagacccgtgccggccagcgcaccaggttcaaggcgtttgttgctatcggagactacaatggccatgtcggtctgggtgttaagtgctccaaggaggtggccacagccatccgtggggccatcatcctggccaagctctccattgtccccgtgcgcagaggctactgggggaacaagatcggcaagccccacaccgtcccttgcaaggtgacaggccgctgcggctctgtgctggtgcgcctcatccctgcacccaggggcactggcatcgtctccgcacctgtgcccaagaagctgctcatgatggctggtatcgatgactgctacacctcagcccggggctgcactgccaccctgggcaacttcgccaaggccacctttgatgccatctctaagacctacagctacctgacccccgacctctggaaggagactgtatttaccaagtctccctatcaggaattcactgaccacctcgtcaagacccacaccagagtctcggtgcagcggacccaggcttcagatgtggctacaacatagggtttttatacaagaaaaataaagtgaattaagcctgaaaaaaaaattttttaaataa

SEQ ID NO: 292 - DNA, 2390 bp, Homo sapiens
ggatttgcggagcgccgcgccgctgccgggagccggcaggcccgagagtgaccggagtcacggcgggcgccggcggagctgcggcgtcggacccgcctcctggaggagctcagccccgaccaggcccggccccattcccgccccgcgccgcctccccgccgccgccgccgccgccgccgcgggagcgctcccctgcccaccccgcccccgcggccgagcccgggagtcgagtgggagtcggccggccggcgcgggcagcgccgggaccccgcgggggacactgcagccggagcccgggaggggccgcgccgccaccgtctgaactaggatgtcccgacatgaaggtgtcagctgtgatgcatgtttaaaaggaaattttcgaggtcgcagatataagtgtttaatttgctacgattacgatctttgtgcatcttgttatgaaagtggtgcaacaacaacaaggcatacaactgaccacccaatgcagtgcatattaacaagggtagattttgatttatactatggtggggaagctttctctgtagagcagccacagtcttttacttgtccctattgtggaaaaatgggctatacggagacatctcttcaagaacatgttacttctgaacatgcagaaacatcaacagaagtgatttgtccaatatgtgcagcgttacctggaggcgatcctaatcatgtcacggatgactttgcagctcatcttacacttgaacacagagcccctagagatttagatgaatcgagtggtgttcgacatgtacgtagaatgtttcaccctggccggggattaggaggtcctcgtgctcgtagatcaaacatgcactttactagcagttctactggtggactttcttcttctcagagttcatattctccaagcaatagggaagccatggatcctatagctgagcttttatctcagttatcaggagtgagacgttctgcaggaggacagcttaattcctctggcccttccgcttctcagttacaacaactgcagatgcagctgcagctagaacggcagcatgcccaggcagcacggcaacaactggagaccgcacgcaacgcaacccggcgtactaacacaagcagtgtcaccactacaatcacacaatccacagcaacaaccaacatagctaatacagaaagcagtcagcagactctacagaattcccagtttcttttaacaaggttgaatgatcctaaaatgtctgaaacggagcgccagtccatggaaagcgagcgtgcagaccgcagcctgtttgtccaagagctccttctgtccactttagtgcgtgaagagagctcatcctcagatgaggatgatcggggggagatggcagattttggtgctatgggctgtgtagatattatgcctttagatgttgctttagaaaacctaaatttaaaagagagtaataaaggaaatgagcctccaccacctcctctttgatgacatcccaattcgcagacaatgtcctctgtgctgtatttgccaatgaaagtggacaacaactatcttgggtttgtttggtgattgtaatttcaggtctgtcactcttgttacattgtgtacattcaaaaggaagagagaaaatatatatgataatcatttccacttaactaatttttacttctagcaggtaaatgtaggtagcagtgcaggggtgatctctgcttcctgtaccttgacatgcaaaaggctctcctaatactccacattcaaactgaagaggaaaattgaaatctctaatgaagctgctgtgtgtatttatgaatattaatgaataaaaactgcttggatggtttaccttaactactgcatgaggttttttgcagcgtgcatgagttttagtgaccttgttatttaagaagttaaatacaaggagtaaaacttaaaaaaaaaatacaaagcccaaagctttcccaaacattattcaatggttacacgacgaagtagcttttgaataatgtctgcctgaatcacctttctttgtgtgcctcctacgcacaaagccagctctgcagtggaatctggggattatagccgggtgtggcactccgccctgtgtgactgtcctgtcgccctgttagtcatcttgcctgtgtggagctcagcctgtctctttaactcatctgtagaagacacaccagtaaagctactgttggaatctgctgcaggggcctttgtgtgccctaaaaacaaatcctgttcatgtttgtttaaagtttttactttttgtggttgtttaaaattttttcaattgttaaatatgttttattcaggtgtagatgaatttcatttattgactgttcaacagagttaacctgaattatgttgtctttgtttttaaaaatctcacattctc

SEQ ID NO: 293 - protein, 381 aa, Homo sapiens
MSRHEGVSCDACLKGNFRGRRYKCLICYDYDLCASCYESGATTTRHTTDHPMQCILTRVDFDLYYGGEAFSVEQPQSFTCPYCGKMGYTETSLQEHVTSEHAETSTEVICPICAALPGGDPNHVTDDFAAHLTLEHRAPRDLDESSGVRHVRRMFHPGRGLGGPRARRSNMHFTSSSTGGLSSSQSSYSPSNREAMDPIAELLSQLSGVRRSAGGQLNSSGPSASQLQQLQMQLQLERQHAQAARQQLETARNATRRTNTSSVTTTITQSTATTNIANTESSQQTLQNSQFLLTRLNDPKMSETERQSMESERADRSLFVQELLLSTLVREESSSSDEDDRGEMADFGAMGCVDIMPLDVALENLNLKESNKGNEPPPPPL

SEQ ID NO: 294 - DNA, 3224 bp, Homo sapiens
cgaggaccagcacctgaggccgggccgcaggccgacttcacagccaggcgcgcgcgtcgctgctgctgctgcggggctctggcgcgccagccggcgggacagcgggggctggcgggggccggggagcgccagatgatggatttggacatgcttctatgaagaaatgccacatggtccgagagcaaacatgtccaggctactcactttagtgactagggctcggtgccagcacttcccgggtaatcagacgtggtctgaccgaggatcaagaagcacatcatcaccaatgacatcatgacagcaagagagcacagccctcgccatggtgccagggcccgtgcaatgcagcgggcttccaccatcgacgtggcggccgacatgctgggcctctctctggcaggaaatatacaagacccagatgagcccattttagaatttagcttagcttgcagtgagctgcatactccatcgctagatcgaaagccaaatagttttgttgcggtgagtgtcaccacccctcctcaggcattctggacgaagcatgcacagacggagatcattgagggaaccaacaatcctatatttctaagcagtattgccttctttcaagactctcttatcaatcagatgacacaagtcaaactctccgtgtatgatgtcaaagatagatctcagggaacaatgtatttactgggctctggaacgttcattgtcaaagatctgctccaggacaggcatcataggttgcatttaacactaaggtctgcagagagtgaccgtgtaggtaacatcaccgtgattggctggcagatggaggagaagtcagaccaacggccccctgtgacccggtctgtggacactgtcaatgggaggatggttcttcctgtcgatgagagcttgacggaggcgttaggaatccgatccaaatacgcttcattgcgaaaggacactttgctgaaatcggtgttcggtggtgccatctgccgcatgtaccggtttccaaccactgatggtaaccatttgcggatcctggagcagatggcagagagcgtgctctccctgcacgtgccccggcagttcgtgaagctcctactagaggaagatgcagccagagtgtgtgagctggaggagctgggagagctgtccccttgctgggagagcctccggcgccaaattgtcacccagtaccagaccatcatcctcacataccaggagaacctgaccgacctccatcagtacagagggccctcgtttaaagcaagcagtttgaaagcagataaaaagttagaatttgttcccacaaacttgcacatacaaaggatgagagttcaagacgatggaggatcagatcagaactacgacatcgtcaccattggggcgccagcagcacactgccaaggttttaagtcaggaggtctccgcaaaaagctgcacaaatttgaagagaccaagaaacattttgaggagtgttgtacatcatctggctgccagtccataatctacataccccaggatgttgtcagagccaaggagatcatcgcccagatcaacaccctgaaaacccaagtgagttactacgcagagcggctgtcaagggcagccaaggacaggtctgccactggccttgagaggacactcgccatcttggcagacaagacacggcagctggtcacggtctgcgactgcaagctcctggccaactccatccatgggctgaacgctgcacggcctgactacattgcctccaaggcctctcccacttcgactgaggaggagcaggtgatgcttagaaatgaccaggacaccctcatggcccggtggacagggagaaacagccgatcttccctgcaggtggactggcacgaggaggagtgggagaaagtgtggctgaacgtggacaagagcctagagtgcatcattcagcgtgtggacaagctgctgcagaaggagcggctgcatggcgagggctgtgaggatgtcttcccctgtgcaggcagctgcaccagcaagaaagattgcagtccccctcctgaagagtccagcccaggtgaatggagtgaggccctttacccgctgctgaccactctcaccgactgcgtggccatgatgagtgacaaggccaagaaggccatggtattcctgctcatgcaggacagcgcgcccaccatagccacctacctgagcctgcagtaccgccgtgacgtggtcttctgccagacgctgaccgccctcatctgcggcttcatcattaagctgaggaactgcctgcatgacgacggcttcctgcgccagctctacaccatcgggctgctggcccagttcgagagcctgctgagcacctacggggaggagctggcaatgctggaggacatgagccttgggatcatggacttgaggaacgtgaccttcaaagtcactcaggccacttccagcgcctccgcagacatgctgcccgtcatcacaggaaatcgcgacgggtttaacgtgcgggtccctctgccgggcccgctgtttgacgccttgccccgggagatccagagtggcatgctgctgcgagtgcagcccgtcctcttcaacgtgggcatcaatgagcagcagacactggccgagaggtttggcgatacgtctttacaagaagtcatcaacgtggagagtttggtgcggttaaattcctactttgagcagtttaaggaagttttgcctgaggattgcctgcctcggtctcgcagtcagacgtgcctgccagagctgctgcggtttctgggtcagaacgtgcatgcccggaagaataagaacgtcgacattctctggcaagctgctgagatctgccgccgccttaatggggtccggttcaccagctgcaagagcgctaaggaccgtacagccatgtcggtgacactggagcagtgcctgatcctgcaacacgagcatggcatggccccgcaggtcttcacccaggccctggagtgcatgcgcagcattggaacacgggaggtagtcacccagaaaaacttgagcggcctggtgcccatccgagacttaaggctagaccccagcctcctctgttccatccctttattagctctgagccccaatttactgattgtgtggctctttctgagcatagcatacctggtgaccaaattgcgttgcaaatgaatatcattatgaaaaattaataagtcacaagaaaaacaaaagtgccagaagatgtccagccaccg

SEQ ID NO: 295 - protein, 954 aa, Homo sapiens
MTAREHSPRHGARARAMQRASTIDVAADMLGLSLAGNIQDPDEPILEFSLACSELHTPSLDRKPNSFVAVSVTTPPQAFWTKHAQTEIIEGTNNPIFLSSIAFFQDSLINQMTQVKLSVYDVKDRSQGTMYLLGSGTFIVKDLLQDRHHRLHLTLRSAESDRVGNITVIGWQMEEKSDQRPPVTRSVDTVNGRMVLPVDESLTEALGIRSKYASLRKDTLLKSVFGGAICRMYRFPTTDGNHLRILEQMAESVLSLHVPRQFVKLLLEEDAARVCELEELGELSPCWESLRRQIVTQYQTIILTYQENLTDLHQYRGPSFKASSLKADKKLEFVPTNLHIQRMRVQDDGGSDQNYDIVTIGAPAAHCQGFKSGGLRKKLHKFEETKKHFEECCTSSGCQSIIYIPQDVVRAKEIIAQINTLKTQVSYYAERLSRAAKDRSATGLERTLAILADKTRQLVTVCDCKLLANSIHGLNAARPDYIASKASPTSTEEEQVMLRNDQDTLMARWTGRNSRSSLQVDWHEEEWEKVWLNVDKSLECIIQRVDKLLQKERLHGEGCEDVFPCAGSCTSKKDCSPPPEESSPGEWSEALYPLLTTLTDCVAMMSDKAKKAMVFLLMQDSAPTIATYLSLQYRRDVVFCQTLTALICGFIIKLRNCLHDDGFLRQLYTIGLLAQFESLLSTYGEELAMLEDMSLGIMDLRNVTFKVTQATSSASADMLPVITGNRDGFNVRVPLPGPLFDALPREIQSGMLLRVQPVLFNVGINEQQTLAERFGDTSLQEVINVESLVRLNSYFEQFKEVLPEDCLPRSRSQTCLPELLRFLGQNVHARKNKNVDILWQAAEICRRLNGVRFTSCKSAKDRTAMSVTLEQCLILQHEHGMAPQVFTQALECMRSIGTREVVTQKNLSGLVPIRDLRLDPSLLCSIPLLALSPNLLIVWLFLSIAYLVTKLRCK

SEQ ID NO: 296 - DNA, 3217 bp, Homo sapiens
cgaggaccagcacctgaggccgggccgcaggccgacttcacagccaggcgcgcgcgtcgctgctgctgctgcggggctctggcgcgccagccggcgggacagcgggggctggcgggggccggggagcgccagatgatggatttggacatgcttctatgaagaaatgccacatggtccgagagcaaacatgtccaggctactcactttagtgactagggctcggtgccagcacttcccgggtaatcagacgtggtctgaccgaggatcaagaagcacatcatcaccaatgacatcatgacagcaagagagcacagccctcgccatggtgccagggcccgtgcaatgcagcgggcttccaccatcgacgtggcggccgacatgctgggcctctctctggcaggaaatatacaagacccagatgagcccattttagaatttagcttagcttgcagtgagctgcatactccatcgctagatcgaaagccaaatagttttgttgcggtgagtgtcaccacccctcctcaggcattctggacgaagcatgcacagacggagatcattgagggaaccaacaatcctatatttctaagcagtattgccttctttcaagactctcttatcaatcagatgacacaagtcaaactctccgtgtatgatgtcaaagatagatctcagggaacaatgtatttactgggctctggaacgttcattgtcaaagatctgctccaggacaggcatcataggttgcatttaacactaaggtctgcagagagtgaccgtgtaggtaacatcaccgtgattggctggcagatggaggagaagtcagaccaacggccccctgtgacccggtctgtggacactgtcaatgggaggatggttcttcctgtcgatgagagcttgacggaggcgttaggaatccgatccaaatacgcttcattgcgaaaggacactttgctgaaatcggtgttcggtggtgccatctgccgcatgtaccggtttccaaccactgatggtaaccatttgcggatcctggagcagatggcagagagcgtgctctccctgcacgtgccccggcagttcgtgaagctcctactagaggaagatgcagccagagtgtgtgagctggaggagctgggagagctgtccccttgctgggagagcctccggcgccaaattgtcacccagtaccagaccatcatcctcacataccaggagaacctgaccgacctccatcagtacagagggccctcgtttaaagcaagcagtttgaaagcagataaaaagttagaatttgttcccacaaacttgcacatacaaaggatgagagttcaagacgatggaggatcagatcagaactacgacatcgtcaccattggggcgccagcagcacactgccaaggttttaagtcaggaggtctccgcaaaaagctgcacaaatttgaagagaccaagaaacattttgaggagtgttgtacatcatctggctgccagtccataatctacataccccaggatgttgtcagagccaaggagatcatcgcccagatcaacaccctgaaaacccaagtgagttactacgcagagcggctgtcaagggcagccaaggacaggtctgccactggccttgagaggacactcgccatcttggcagacaagacacggcagctggtcacggtctgcgactgcaagctcctggccaactccatccatgggctgaacgctgcacggcctgactacattgcctccaaggcctctcccacttcgactgaggaggagcaggtgatgcttagaaatgaccaggacaccctcatggcccggtggacagggagaaacagccgatcttccctgcaggtggactggcacgaggaggagtgggagaaagtgtggctgaacgtggacaagagcctagagtgcatcattcagcgtgtggacaagctgctgcagaaggagcggctgcatggcgagggctgtgaggatgtcttcccctgtgcaggcagctgcaccagcaagaaagattgcagtccccctcctgaagagtccagcccaggtgaatggagtgaggccctttacccgctgctgaccactctcaccgactgcgtggccatgatgagtgacaaggccaagaaggccatggtattcctgctcatgcaggacagcgcgcccaccatagccacctacctgagcctgcagtaccgccgtgacgtggtcttctgccagacgctgaccgccctcatctgcggcttcatcattaagctgaggaactgcctgcatgacgacggcttcctgcgccagctctacaccatcgggctgctggcccagttcgagagcctgctgagcacctacggggaggagctggcaatgctggaggacatgagccttgggatcatggacttgaggaacgtgaccttcaaagtcactcaggccacttccagcgcctccgcagacatgctgcccgtcatcacaggaaatcgcgacgggtttaacgtgcgggtccctctgccgggcccgctgtttgacgccttgccccgggagatccagagtggcatgctgctgcgagtgcagcccgtcctcttcaacgtgggcatcaatgagcagcagacactggccgagaggtttggcgatacgtctttacaagaagtcatcaacgtggagagtttggtgcggttaaattcctactttgagcagtttaaggaagttttgcctgaggattgcctgcctcggtctcgcagtcagacgtgcctgccagagctgctgcggtttctgggtcagaacgtgcatgcccggaagaataagaacgtcgacattctctggcaagctgctgagatctgccgccgccttaatggggtccggttcaccagctgcaagagcgctaaggaccgtacagccatgtcggtgacactggagcagtgcctgatcctgcaacacgagcatggcatggccccgcaggtcttcacccaggccctggagtgcatgcgcagtgagggttgtcgaagagaaaatacaatgaagaatgttggaagtcgcaaatatgcatttaattccctgcagctgaaggctttccccaagcattacaggcctcccgaagggacttacggaaaagttgaaacgtgaacacacggtttcctctaattagctgttacataataaatgtgggtacctctagtgtcatatatgaattcttcaggagactgaaggattggtttattttgtgttcttt

SEQ ID NO: 297 - protein, 938 aa, Homo sapiens
MTAREHSPRHGARARAMQRASTIDVAADMLGLSLAGNIQDPDEPILEFSLACSELHTPSLDRKPNSFVAVSVTTPPQAFWTKHAQTEIIEGTNNPIFLSSIAFFQDSLINQMTQVKLSVYDVKDRSQGTMYLLGSGTFIVKDLLQDRHHRLHLTLRSAESDRVGNITVIGWQMEEKSDQRPPVTRSVDTVNGRMVLPVDESLTEALGIRSKYASLRKDTLLKSVFGGAICRMYRFPTTDGNHLRILEQMAESVLSLHVPRQFVKLLLEEDAARVCELEELGELSPCWESLRRQIVTQYQTIILTYQENLTDLHQYRGPSFKASSLKADKKLEFVPTNLHIQRMRVQDDGGSDQNYDIVTIGAPAAHCQGFKSGGLRKKLHKFEETKKHFEECCTSSGCQSIIYIPQDVVRAKEIIAQINTLKTQVSYYAERLSRAAKDRSATGLERTLAILADKTRQLVTVCDCKLLANSIHGLNAARPDYIASKASPTSTEEEQVMLRNDQDTLMARWTGRNSRSSLQVDWHEEEWEKVWLNVDKSLECIIQRVDKLLQKERLHGEGCEDVFPCAGSCTSKKDCSPPPEESSPGEWSEALYPLLTTLTDCVAMMSDKAKKAMVFLLMQDSAPTIATYLSLQYRRDVVFCQTLTALICGFIIKLRNCLHDDGFLRQLYTIGLLAQFESLLSTYGEELAMLEDMSLGIMDLRNVTFKVTQATSSASADMLPVITGNRDGFNVRVPLPGPLFDALPREIQSGMLLRVQPVLFNVGINEQQTLAERFGDTSLQEVINVESLVRLNSYFEQFKEVLPEDCLPRSRSQTCLPELLRFLGQNVHARKNKNVDILWQAAEICRRLNGVRFTSCKSAKDRTAMSVTLEQCLILQHEHGMAPQVFTQALECMRSEGCRRENTMKNVGSRKYAFNSLQLKAFPKHYRPPEGTYGKVET

SEQ ID NO: 298 - DNA, 1698 bp, Homo sapiens
tgagactggggcctcgctcgctcccgacccggttgcaagtgttgcggtgggagaaagtcgcgtccgcatcggaggggaagcgccgtcatgcctaagtattatgaggacaagccgcagggcggcgcgtgcgcgggcctgaaggaggacctgggcgcgtgtctgctgcagtcggactgtgtggtccaggaaggaaaatcacctcggcagtgtttgaaggaaggatactgcaactctttgaagtacgcattttttgagtgtaaaagatcagtgttggataacagggcaagattcagaggaagaaaaggatattgatgcattatgttgaagccaacatggaaaacaacaaatattttccctggtcattaacacaaagaagccaaaacaggaaacatactttttactacatctgtttggttggaccagatttcccctccgtggaacactgaagaaagtggatgagttgttttcgaatatgtataaagtaaatgattctcttgatccaagttatttttagaagaaaaacctaattgaacaggtatgggttgggagcataataaatgtgttttgagaattgttctaaagcacagaaaatggaaagactgttatttgcaaacttgactcttcaattgaattacccaattagtacaggccactgatttgactgacacagtcgataacatgcagcctatccagaaggtgtctgttgggaaagtttaggataaaactttttctttagttcagtcttttcctgtctagttctaaaatgaattgtgtttgattccttagagaagaaatacttcatttgtgctctgattcactgaagtaataacctcagcactttaatagcgtccacaggcatagctgatgctaggccccagattgtgttgcccaggctctttaccatcatcttcggactgtttttgtttcctggttacattttcagtctggcccgctctacataatgggccagtgtcagctccaagtccacatccttattatccatgattcaaaagggagagagagaacttcctttttcagggtccacaaatcaaatctataaaaggactctggtcttcccaggatcacctgcccttgcattggaccagtccctgtggaagaggggatgggggcctgtgatcttggccaggcctgggctatctatctgcactgtcattgctaactcctgtcagaatcacatggatgagtagtgggctgaatcccaaaaggaaaggggtttagagcaagtggaaacaacagatgttcactatagaaagcaagaatgaaaaccatgaagtggttgaagattagccttacagtaattttattctgatcacttaatacagtagagtcaaacaggaatccaagtttccaactttattatttttggcactgaagaattacaaagaactctagcgtctttatacctccgtggttcactggagttaaagcaatcggggcgttgtacagctcacttgagtttttaaaggttctactaaaaagtgagaattccacagcaatatgggtcattgttgcagaatatcacaaaggtctgttgtgtatactccttttcaccaggaaagggacaataatagtttttttcaatgtatatatatataagtgatctaactttttattaataaaagtaaacaactctaaaatgtaaaaaaaaaaaaaaaaaaaaaaaaaaaaaaaaaaaaa

SEQ ID NO: 299 - protein, 74 aa, Homo sapiens
MPKYYEDKPQGGACAGLKEDLGACLLQSDCVVQEGKSPRQCLKEGYCNSLKYAFFECKRSVLDNRARFRGRKGY

SEQ ID NO: 300 - DNA, 2184 bp, Homo sapiens
ggcggaagtcggttcccgtgacgcggcgcgccccaagggccggctccgttgagggaagggagcccgcccggtggcggctggggtcggctgctgggaggaggtggtgggctggttcggacgtgggtcgaggctgtagcaggactccaggtgaggcctgaggaccactctgccctcccgcggcccgggctcgcgccgggggccatttaatcccgacagcttgcggcctgacgtcgctgcggcctggcagtgaccacgtcggcgtccggcccctcggccggcgatagagttgcggctaaaatgaaaggacgcccagttacatttgcatcgtagataaagaaagagcatttagtataagcatgtccgaaatgttgcgtgggatgtaggcatactaaaaccttattcgtggcctgtctgaaatccaaatggagctgggtattctgtgtttttatttgctaaatctggcagccgtacccgcggccccgggcagggagggagcagctgggctcggccagaccctgccggcgtctggggggcctgcgaagtggaggggagacgggcagccgggcagtggccggcgttccccggagctcggaccggttggattggactccgacgctaccgctccctctgctgaactattccggatgtaaaacactagggatcggagtttttcttggttttttaatctcattctagtgaccgagaagcttgctggcagtgcgctgatggatctgtgtgaataggccatttatttgacctcttcagtaacactgttctaaccggctgaaactgctttcttaggcattttcttaaaagcttggtggttaagagcacggaatttcgagtcagatttccaatcttggctctatcactatcctcggagtcatggggcagtcacatcatccctgtctctgtaatggtagctgcccctggataagtgttattaggtgattcagaagggtgggctgttgcccttgcctgaggttgcagtctgcggttcccaagccccaagacccgcctcagaactaactgcatttgcttttgactcctggcctttctctagggttgggaagaacatggaaagtgacctccctgccaaataactcagaagaggagtgtcggtagccaaatgtttcttcagaatacgtgtaaaagaaatgtttttcttccatctaggaagatgttaccgagtacttcagtgaattccttagtgcaggggaacggagtcttgaattccagggatgcggcaagacacacagccggagcgaaacgctacaaatatctgagaaggcttttccgctttcggcaaatggactttgaatttgctgcctggcagatgctctacctgttcacatccccacagagagtttacagaaattttcattatcgaaaacagacgaaggaccagtgggccagagatgaccctgctttcttggtcctgttaagtatctggctctgtgtgtccactataggatttggctttgtgctggacatgggattctttgagacaataaagcttctcctttgggttgtactcatagattgtgtaggcgttggtcttctgatagcaactttaatgtggttcatctctaacaagtatttagtgaaacgacagagcagagactatgatgtggaatggggctatgcttttgatgtgcatctcaatgctttttatccactcctggtcattttgcattttatccagctttttttcatcaaccatgttatcctgacagacacatttattggatatttagttggaaataccttatggttggttgcagttggctattatatctatgtaactttcctgggatacagtgcattgccatttttgaaaaatacagtaattcttctgtatccatttgcacctctgattctgctctacgggctttccctggcactgggatggaacttcacccatactctctgttctttctataagtacagagtgaaataaaaagtgagaagaagattcaatcgtaactgtgtcaacagtattgtgaagtgatcatttcttgtaaaacttgtaaataaactatcatctttgtagatatcttaaaggtgtaaagtttgcaaatttgaagaaatatatattaacactgtggtcaggtacattccttaaaactaattaaatgtacatttctataataaatattttttaaactaaaaaaaaaaaaaaaa

SEQ ID NO: 301 - protein, 259 aa, Homo sapiens
MLPSTSVNSLVQGNGVLNSRDAARHTAGAKRYKYLRRLFRFRQMDFEFAAWQMLYLFTSPQRVYRNFHYRKQTKDQWARDDPAFLVLLSIWLCVSTIGFGFVLDMGFFETIKLLLWVVLIDCVGVGLLIATLMWFISNKYLVKRQSRDYDVEWGYAFDVHLNAFYPLLVILHFIQLFFINHVILTDTFIGYLVGNTLWLVAVGYYIYVTFLGYSALPFLKNTVILLYPFAPLILLYGLSLALGWNFTHTLCSFYKYRVK

SEQ ID NO: 302 - DNA, 8382 bp, Homo sapiens
cgcagcggcggcggcagcggcggcggcggctacagcagctccgccggcagccgcgggagcacggcgacgccagcggcgggaagggaaaaggccgaggcatcagcgtgtgaagaccgcaaagacgatcccgagtacagttgtgaacagcattgctgctaggctcctcctgcagatcatctgaaatgaacctctcttattgatttttattggcctagagccaggagtactgcattcagttgactttcagggtaaaaagaaaacagtcctggttgttgtcatcataaacatatggaccagtgtgatggtgaaatgagatgaggctccgcaatggaactgtagccactgctttagcatttatcacttccttccttactttgtcttggtatactacatggcaaaatgggaaagaaaaactgattgcttatcaacgagaattccttgctttgaaagaacgtcttcgaatagctgaacacagaatctcacagcgctcttctgaattaaatacgattgtgcaacagttcaagcgtgtaggagcagaaacaaatggaagtaaggatgcgttgaataagttttcagataataccctaaagctgttaaaggagttaacaagcaaaaaatctcttcaagtgccaagtatttattatcatttgcctcatttattgaaaaatgaaggaagtcttcaacctgctgtacagattggcaacggaagaacaggagtttcaatagtcatgggcattcccacagtgaagagagaagttaaatcttacctcatagaaactcttcattcccttattgataacctgtatcctgaagagaagttggactgtgttatagtagtcttcataggagagacagatattgattatgtacatggtgttgtagccaacctggagaaagaattttctaaagaaatcagttctggcttggtggaagtcatatcaccccctgaaagctattatcctgacttgacaaacctaaaggagacatttggagactccaaagaaagagtaagatggagaacaaagcaaaacctagattactgttttctaatgatgtatgctcaagaaaagggcatatattacattcagcttgaagatgatattattgtcaaacaaaattattttaataccataaaaaattttgcacttcaactttcttctgaggaatggatgattctagagttttcccagctgggcttcattggtaaaatgtttcaagcgccggatcttactctgattgtagaattcatattcatgttttacaaggagaaacccattgattggctcctggaccatattctctgggtgaaagtctgcaaccctgaaaaagatgcaaaacattgtgatagacagaaagcaaatctgcgaattcgcttcagaccttcccttttccaacatgttggtctgcactcatcactatcaggaaaaatccaaaaactcacggataaagattatatgaaaccattacttcttaaaatccatgtaaacccacctgcggaggtatctacttccttgaaggtctaccaagggcatacgctggagaaaacttacatgggagaggatttcttctgggctatcacaccgatagctggagactacatcttgtttaaatttgataaaccagtcaatgtagaaagttatttgttccatagcggcaaccaagaacatcctggagatattctgctaaacacaactgtggaagttttgccttttaagagtgaaggtttggaaataagcaaagaaaccaaagacaaacgattagaagatggctatttcagaataggaaaatttgagaatggtgttgcagaaggaatggtggatccaagtctcaatcccatttcagcctttcgactttcagttattcagaattctgctgtttgggccattcttaatgagattcatattaaaaaagccaccaactgatcatctgagaaaccaacacattttttcctgtgaatttgttaattaaagatagttaagcatgtatcttttttttatttctacttgaacactacctcttgtgaagtctactgtagataagacgattgtcatttccacttggaaagtgaatctcccataataattgtatttgtttgaaactaagctgtcctcagattttaacttgactcaaacatttttcaattatgacagcctgttaatatgacttgtactattttggtattatactaatacataagagttgtacatattgttacattctttaaatttgagaaaaactaatgttacatacattttatgaagggggtacttttgaggttcacttattttactattatagaccctcttttatagattatcagggattatatatataaatatataaatatacataaaaatgttatggaattaatttattagaaacacttaagaagtacatatttttgtgcagtagatttttgaatcgatactttttttgaaaaccagtttccttgcttttttaagttctttctatatttttctttggaaatgcaaacattacaaaccaatgccatttttcaaatgcactgccatttaagattgattatagatggatttcttaattgaagtacttttataatcacagtgactgaacaaaatattttcaaagacatttgtcattccttaaagccaagattttaaagactaatgtccttcctgagggttactttactatactgtgtatggtgtatagccacagaaagtcagtctgataaattttcaatgtgtaagtgtgatgcattcaacccagattattgtagacttaacttattatatttcctctgatatgtaaaatgacaaactcttctttcctttttaatctttgtctttaatccatgaattaggtgcattatctgctgttgattcttttatatctgcactcattttatgacgtcagacaaaatgttttctaggtgttgctattgtatgagtcataattggtataattttaaagaaaattgtaatattgttttttggtgaaatatattattagtagtatattttccaaaatgattttattgtagtatgaactgataagtgagtcccgtgtccaagagactgtatttattactcttaaacacgctattccaaatgatattactactataaacaaagaatattaccggtctcagcaatcagtgatctttataaaagtacttttaaaaaatgatgaattatcaccaggcgctgtggctcacgcctgtaatcccagcactttgggaggccgaggcgggcggatcacgaggtcaggagatcaagaccatcctggctaacacggtgaaaccctgtctctactaaaaatacaaaaaattagccaggcgtggtggcaggtgcctgtaatcccagctacttgggaggctgaggcaggagaatggcgtgaacccaggaggcagagctggcagtgagctgagatcgcaccactgcactccagcctgggcgacacagctagactccgtctcaaaaaaaaaaaaagatgaagtatcaacatcagttcccagccagtctgcttggacacactggggtgccacaagtgggttgcaggttggttgcagacgggcagagatggattctgctgagctttcagagtgaccactggctggggcctagcgctggggcaaggttccagctggctgcctctagcctggaggagcttcatctagttacccaatgtgctgaaccaacagcatgaaatagcatcatttcctgtgctgtgttacaaagtgcaaacgtttggaaacactgatacagtacaattatttccatcactccatgttgttataatttttagttacttttcttgattgaaaagtcaatcacattgccaaaaatgatttttatgtcagttaaaggccagttgaaatttttttattaggatgttttaaatttacttttcactttcttgaatttttttcttctcaaatttccttggcccagtgcccatgagcaaatttcattcaaaaacaggaataaccttttgtcataaaattttggcaccagcttggtatactaaattactgcaaagataactgagtaccagaagtaaaaatctctgcaggtgggcttaggagtactcttgggtccctggttcctcagttgccaactctggtttcatgaagaaagaccatgctctgaaaatctagggaggagaaagttattgcagcacctggtgtgatttgttacaacttctttaaagacagcctgcctggctagctttttcctgttttcatgcagtttgccctcccagcattggtccacctgttgttcccaagaaactcattcttgttcccaagactccttttagccaaatctttcctatcattccaggacttttttgtgcttctctccccatgaatctacccgtgcctagggtgtgtgccaggcacgtggcaggtggccagtcagcatctggatgtgagaccaattattccagcctgccctcctctttctctttttatcattttgtattatttttgagacagggtctcgctttgttgcccaggctggagtgcagtggtgctctcatagctcactgcagcctcgatctctggcctcaagcaatcctcctgcctcagcctcccaaagtgctgggattataggtgtgtgccaccatgtccagccccctttctctctcttaactccctctccctgctgtcgttgccatactcttgcatacacaatcggttgtctagtttttgattgtttgtgtgtatggtgtgtgctgtctctctgaccagatttcaggttcctgaggcgagcctgcagctcatactgctcatctgtcctctcctatggtgggtgctcagggcctctcactgttagttactccctcctttctgcccagttctgcactcaactagtagaagcagccatcctttccccaagcaggaaattgtagtggtcgcccttaagagcagtgtgagggcagaagattaagggaggggaagagtccctggaactggaagaaggtaaatactttgccttgagagggcgccgaatcattttaccaaaatagtaaatggaaaaagtgtcaaaggttgggactagttttaaaaacacatatagccagtagacacatgggggctgtttaaataaaaacatttttttacccggttctgccatcacacacactagtgacattccaagtactcagtggccatgtggagctagtggccaccacacttgacaccacggatgcagaacttttccatcactgcagaaagctctgttgaacagtactgtgtccagagtgctaattatgaacagcttagaaaccacaattaatacattctcatgaggttaaaagcagacatgggaatagaacataatgcaaatgatgatgaatattttgggtgagaagagaaagctgaggacccatttctaggattctaagatgtaagatttcttaagttctttatcttagtctcatgcattctccacatcacgcgctgtaccatactgtgtagtcagaacagacagtgtgattgaaaagctttggaaaaagttaacacaaaggattatttagcacataggctgtagatacgtatgtgtgtatttgttcaacaattggagatggttgaatacccttgaacaaagtgtgtatcttctcaaatcagtggttgcactagtcaataattagaaggtgttgttatttttaaaactataagcaaaattatgaaggcctttaaaaaatctatcataataatgaaaaagaggttgtctcccaacagtgctgtccctcaaagaaaagactggttatgtggaaacagcacgtttggagagattattctagtgaataacagtgtatatttgtggtaggcaaatttctaagaatgacccctactgacacccccaccaatgaccttgtataatatcctcccactttgagcatgggtggaacctgtttgatccatgattatatcatgttatgtagcaaaaggaagactgtctgggggtggctaatcaaatcttgtgactcctttaaaagcagagagttttctcgggctggtggcagaagtcaagagacaaagcagaaggacctcaggcaccattgctgttttaaggtagagggggctgcatgagaaggaatgcacatggctttgaggagctgagagaggccttggctaacagcaaaggagctgggaactgcagtcctacagccacgggaactgaattcagcccataagctcattcataggcttggaaaggcattcatctccagtctccagataagacccagcctggccaacactttgaatccagccttgtgagaccctaagccgagaactcacttaagcctgcttggacttctgacctacagaactatgagataataaatcagtggtgttttaagctgctaaatttgtggcaatttgttatgtaggaataggaaatgaatacagtattttaaaagaggtaaagaggaaatcttcatacttgattccctgtagtatgctggatatttcttggtaaatgcatgaataaagtctttagtagcaagtcatgtacctggaccttgttggggatgttctcgccagagatctcaattagtcttcattggacgtttgttggcaaagttgcagcatcttactgagtagcgtttggtaaaggaactgctagaatgagactataggaataggactgaaacagtgtgtaagggatcttttttatttctagaagaggtgttactttatactgatttagactgctctgagcctgtcagaagtaaattcaagaatgattaacagtggtattttagatacattaagagcaaaaataacctttgccttgtagagatcagataatctgtgtatcgagggatttaattttttttaaccaaaacttagtttctctttttatcatctagcacagatcaaatcctgtatgggccagccaaatgtttgtagtttgagaatgttttgcaaatacctctctgcttccaagccattaatagctaatgaagttttattttggtttgtccattaatttttctgcttatttttactgtattgccatgtccttgatacgagacaagtagaactaaaagagagaaaatgagaggttaagactgtcagaagatgagaaatgtgagtcataaccataccttagtgttttaagggaactttatccagtccaatccctttatagaaaaggaacttttccaagttatgttgcagtatttatagtgtgtaaaattttgtttgactttggtagttgtgcattttaaattatgaatcttatatgctacgataactagtatgcttactttctttaatgcatgtgatcatacaatgctaaaaaggtattttttaaagacccaaccaaactgaggattttgttatacatatctgtatcaacacctatatataaactcttcttcttacctgaaacactccttcacccggtttgggcactaactagatcattttcaaaggaacaaacaggaaggagcaagctggcactccagggtgcatctgagctgagaatttagaagacctcattcaagaaagtaaactgagcattgatgggaaagcactttgcgcgaagtaacattcccactgttaatgttgcagtcaaaattgtggaaaaaaaaaagtggtgctaaaattgttctgaaatgaagattgtttgttgtggggaatattttaatactcttggactttagggaggctattttatgtgtcacttgctcctagttgtttcattgtattagtaattagcaaactgtcctggaaccaagggtttggtacttttgcctgattagcattccattatttatttgaaatgctcagtgtttgctcaaatttggtgaaaatatcttttgaagacatattctctgagccttaaaaatggctgctatcgacagtactgtaagatgcactgccagtagatttgatacttttcatttcagtgtaggcagtaatgttttctaagaaagatttagaaatcagcaaagtgtaacaattgtgtttcatttatggaatggaaaaactgaagtgtcccattcagaacactttggaaaggttgtctgcattaggggatgtttctggaagcatcccttagagaagctgcctgaggaatctccttgccaggttgtaccagatttttttttttcttaaatgtattgtatatattttccttaaaatgtcttcattggctgaatgattcctatccgtagtaatattttaggtacttgttggatttttaaaggaagattatttattttcagatttgctgctataattgaaaacctagtaactggtcctgttgattgtgccttcatcactgtttctctgtgccacgaccgttcatgtgtatttgaaataaagaagtttaaaaagccatgttgaattcaagattccttctaataaaaataggtgaaacttaa

SEQ ID NO: 303 - protein, 535 aa, Homo sapiens
MRLRNGTVATALAFITSFLTLSWYTTWQNGKEKLIAYQREFLALKERLRIAEHRISQRSSELNTIVQQFKRVGAETNGSKDALNKFSDNTLKLLKELTSKKSLQVPSIYYHLPHLLKNEGSLQPAVQIGNGRTGVSIVMGIPTVKREVKSYLIETLHSLIDNLYPEEKLDCVIVVFIGETDIDYVHGVVANLEKEFSKEISSGLVEVISPPESYYPDLTNLKETFGDSKERVRWRTKQNLDYCFLMMYAQEKGIYYIQLEDDIIVKQNYFNTIKNFALQLSSEEWMILEFSQLGFIGKMFQAPDLTLIVEFIFMFYKEKPIDWLLDHILWVKVCNPEKDAKHCDRQKANLRIRFRPSLFQHVGLHSSLSGKIQKLTDKDYMKPLLLKIHVNPPAEVSTSLKVYQGHTLEKTYMGEDFFWAITPIAGDYILFKFDKPVNVESYLFHSGNQEHPGDILLNTTVEVLPFKSEGLEISKETKDKRLEDGYFRIGKFENGVAEGMVDPSLNPISAFRLSVIQNSAVWAILNEIHIKKATN

SEQ ID NO: 304 - DNA, 3884 bp, Homo sapiens
ggagccgagcgaagccggcgcgcctgcagctgggagctgggagctgggagcgcgccgggcgcagggccgggccggccgcgggagggtagtgtcagcgcccgcgtccagctcttcggccgcagacccgggctgtctggaggccgcgcggccacctgctgcgtcgccccggctttgggctggggctagacgcgcaccgcggcgggagcagccccggctcgccgcaccccgcggaaggtgcccttctctgcgcgtctcgccgagcccgggccacgctcctgtcccagcgagcttgacatgatttccacaagggtgatggacattaagcttcgggaggctgcagaaggccttggggaggacagcacaggaaagaaaaaatctaaattcaaaacttttaagaagttttttgggaagaagaagagaaaagaatcgccgtcgtccacaggaagtagcacctggaaacaaagtcagacgaggaatgaggtcattgccatcgaatccgggccagtgggctacgactccgaggatgagctggaggagtcgaggggcacgctgggcagccgggccctttctcacgacagtattttcattcctgagtccggacaggacgctactcggcctgtgcgggtgttttcccaagaaaatgtgtgtgatcggattaaagctctgcagttaaaaatacagtgtaatgtgaaaatggggccaccacctcctccaggggggcttcctgccaagcggggagaggatgccggcatgagctctgaggacgacgggctgcccaggagccccccagagatgtctctgctgcacgacgtgggtcctggtaccaccataaaggtctctgtcgtgtctccagaccacgtgagcgacagcaccgtctctgcccggatctcagacaacagcctggcaccagtggctgacttcagttatcctgcagaatcctcctcctgcctggacaactctgcagctaagcacaagctccaggtcaagccccgcaaccagcggtcgagtaagatgaggcggctctcatcgcgcgctcagtctgaatccctgagcgacctgacgtgcaccccagaggaggaggaaaacgaggagaagccacttttggaagtcagcccagaagagcgccccagctctgggcagcaggacgtggcgccagacagaggccctgagcctgggccaccggcgcccttgccgccacccggaggggcccgtgccagacgcgcccgcctgcagcactcctccgcgctcacggccagcgtggaggaggggggcgtccccggggaggacccctcaagccgcccggccaccccggagctcgccgagcccgagtcggcccccactctccgcgtggagcccccgtccccgccggagggccccccgaatcccggtcccgacggcggaaagcaggatggggaggcgccccccgcaggcccgtgtgccccggccacggacaaggcggaggaggtggtctgtgctcccgaagacgtcgcgagcccgtttcccaccgccatccctgagggggacacgactccccccgagactgaccccgccgccacctcagaggcgccctctgctcgcgacgggccagaacgcagtgtcccgaaggaagcggagccgacgccgcccgtgctcccggatgaggagaaggggcccccagggccggcgcctgagcccgagagagaagcggagacggagcccgagagaggagcggggaccgagcccgagagaattgggaccgagccctccacggcgcccgccccgagcccgccggcgcccaagagctgcctgaaacaccggcccgcggccgccagcgagggccccgccgcgtccccgccgcttgccgctgcggagtctcccccggtggagcccggccccggttccctcgacgcagaggccgccgccccggagcgccccaaggccgagcgagccgaggcgccaccggcgggcgccgagagggcggcgccagagcggaaggcggagaggggcggtgccgagctgcgaggcgcgaagaagttctcggtgtcctcgtgccgagcgcggcctcgtccgggcgtctcccgcccgctggaacgggccagcggccgcctgcccctcgcgaggagcggcccggtctggaggagcgaggcggctcttgacgacctccagggtctccccgagccccagcacgcgaaacctggccctcggaagctggcggagcgcggccctcaggactcgggggacagggcggccagcccggccgggccgcgcaagagccctcaggaggcggccgccgcgcccggcacgagagagccctgcccagccgcccaggagccggccccgagtgaggacagaaaccccttccccgtcaagctccggtccacctccctctcgctcaaatacagggatggcgcctctcaggaggtgaagggtgtgaagaggtacagtgccgaggtccggttagaaaggtcgctgaccgtgctcccgaaggaggagaagtgtcccctcgggacggcccccgcccttcgaggcaccagggcccccagcgaccaaggaaaggggaaggcccggccccccgagccgctcagctccaagccgcccctgccccggaagccgcttctgcagagcttcacgctcccgcaccagcccgcgccccccgacgccggcccgggagagcgggaacccaggaaggagcccaggacggcggagaaaaggccgctgcgcaggggagctgaaaagagtctgccgcctgcagcaacagggcctggagctgatgggcagcctgcgccaccctggatcaccgtcactcggcagaagcggagggggaccttggaccagccacccaaccaggaagacaagcctggggcacggaccctgaagtctgaaccaggaaagcaagccaaggtgcccgagagaggccaggagcctgtgaagcaagctgactttgttcgcagcaagtctttcctgataacccctgtgaagcccgctgtggaccggaagcagggggcaaagctcaacttcaaggaggggctgcaaagaggaatctcattgtcccatcagaacttggctcagtctgcagtgatgatggagaaggaactgcatcagctgaagagagccagttatgccagtacagatcagccatcctggatggaacttgccagaaagaaatctcaagcttggagtgacatgccccagattataaaataggtgggcagtgtgctgataaagcatgtccactaccctgacaagccacttagttaaaaactgccagtgtattgtggcaaacaaactgtgaaacttaaagattgattttatcatcaagttatgacgaacttggggaagaggaaggaaccaggcaaaacaaagaggataaacacacagccatactcctgggccagagggcccagaaacaagaacaacattgaaaaagtccaggaaccagttcctgtgcccaaaggtacgaatgtgtcttttcgaattcccttgataaagaagcctcagacaaggaagaaaatagaaatgaaattggacacataaataggacacccagcaaaggccagaagagaagcccttctaggagaagggacatctgtgcttccagctgagatcagcccatgtctctggtcgctctcttgcctgtggatcctgtcttctttcatgtttactacgaggcatgacattcatggcaaaacagggatgccgtttccaagagcagctataaaacaatctgttttcctaaagacagccactctgagaaggagatgaaggaacacggcagggttcatcaattcatagactgtttccaaaaataatttttaaacttttccactaggcatctgtgtctttaaccactgcacaatgcattgcctgtttaataaaaggtttcaaacatgaaaaaaaaaaaaaaa

SEQ ID NO: 305 - protein, 962 aa, Homo sapiens
MISTRVMDIKLREAAEGLGEDSTGKKKSKFKTFKKFFGKKKRKESPSSTGSSTWKQSQTRNEVIAIESGPVGYDSEDELEESRGTLGSRALSHDSIFIPESGQDATRPVRVFSQENVCDRIKALQLKIQCNVKMGPPPPPGGLPAKRGEDAGMSSEDDGLPRSPPEMSLLHDVGPGTTIKVSVVSPDHVSDSTVSARISDNSLAPVADFSYPAESSSCLDNSAAKHKLQVKPRNQRSSKMRRLSSRAQSESLSDLTCTPEEEENEEKPLLEVSPEERPSSGQQDVAPDRGPEPGPPAPLPPPGGARARRARLQHSSALTASVEEGGVPGEDPSSRPATPELAEPESAPTLRVEPPSPPEGPPNPGPDGGKQDGEAPPAGPCAPATDKAEEVVCAPEDVASPFPTAIPEGDTTPPETDPAATSEAPSARDGPERSVPKEAEPTPPVLPDEEKGPPGPAPEPEREAETEPERGAGTEPERIGTEPSTAPAPSPPAPKSCLKHRPAAASEGPAASPPLAAAESPPVEPGPGSLDAEAAAPERPKAERAEAPPAGAERAAPERKAERGGAELRGAKKFSVSSCRARPRPGVSRPLERASGRLPLARSGPVWRSEAALDDLQGLPEPQHAKPGPRKLAERGPQDSGDRAASPAGPRKSPQEAAAAPGTREPCPAAQEPAPSEDRNPFPVKLRSTSLSLKYRDGASQEVKGVKRYSAEVRLERSLTVLPKEEKCPLGTAPALRGTRAPSDQGKGKARPPEPLSSKPPLPRKPLLQSFTLPHQPAPPDAGPGEREPRKEPRTAEKRPLRRGAEKSLPPAATGPGADGQPAPPWITVTRQKRRGTLDQPPNQEDKPGARTLKSEPGKQAKVPERGQEPVKQADFVRSKSFLITPVKPAVDRKQGAKLNFKEGLQRGISLSHQNLAQSAVMMEKELHQLKRASYASTDQPSWMELARKKSQAWSDMPQIIK

SEQ ID NO: 306 - DNA, 772 bp, Homo sapiens
ggataacccgcggccgcgcctgcccgctcgcacccctctcccgcgcccggttctccctcgcagcacctcgaagtgcgcccctcgccctcctgctcgcgccccgccgccatggctgcctcccccgcgcggcctgctgtcctggccctgaccgggctggcgctgctcctgctcctgtgctggggcccaggtggcataagtggaaataaactcaagctgatgcttcaaaaacgagaagcacctgttccaactaagactaaagtggccgttgatgagaataaagccaaagaattccttggcagcctgaagcgccagaagcggcagctgtgggaccggactcggcccgaggtgcagcagtggtaccagcagtttctctacatgggctttgacgaagcgaaatttgaagatgacatcacctattggcttaacagagatcgaaatggacatgaatactatggcgattactaccaacgtcactatgatgaagactctgcaattggtccccggagcccctacggctttaggcatggagccagcgtcaactacgatgactactaaccatgacttgccacacgctgtacaagaagcaaatagcgattctcttcatgtatctcctaatgccttacactacttggtttctgatttgctctatttcagcagatctttctacctactttggtgatcaaaaaagaagagttaaaacaacacatgtaaatgccttttgatatttcatgggaatgtttaaaaatagaaataaagcattttgttaaaacga

SEQ ID NO: 307 - protein, 148 aa, Homo sapiens
MAASPARPAVLALTGLALLLLLCWGPGGISGNKLKLMLQKREAPVPTKTKVAVDENKAKEFLGSLKRQKRQLWDRTRPEVQQWYQQFLYMGFDEAKFEDDITYWLNRDRNGHEYYGDYYQRHYDEDSAIGPRSPYGFRHGASVNYDDY

SEQ ID NO: 308 - DNA, 2132 bp, Homo sapiens
ggcggggctctcggggccgctgccgccgccgccgccgcgcattgtgcagcaggcgggcccccgcgcggcagggccctggacccgcgcggctcccggggatggtgagcaaggcgctgctgcgcctcgtgtctgccgtcaaccgcaggaggatgaagctgctgctgggcatcgccttgctggcctacgtcgcctctgtttggggcaacttcgttaatatgaggtctatccaggaaaatggtgaactaaaaattgaaagcaagattgaagagatggttgaaccactaagagagaaaatcagagatttagaaaaaagctttacccagaaatacccaccagtaaagtttttatcagaaaaggatcggaaaagaattttgataacaggaggcgcagggttcgtgggctcccatctaactgacaaactcatgatggacggccacgaggtgaccgtggtggacaatttcttcacgggcaggaagagaaacgtggagcactggatcggacatgagaacttcgagttgattaaccacgacgtggtggagcccctctacatcgaggttgaccagatataccatctggcatctccagcctcccctccaaactacatgtataatcctatcaagacattaaagaccaatacgattgggacattaaacatgttggggctggcaaaacgagtcggtgcccgtctgctcctggcctccacatcggaggtgtatggagatcctgaagtccaccctcaaagtgaggattactggggccacgtgaatccaataggacctcgggcctgctacgatgaaggcaaacgtgttgcagagaccatgtgctatgcctacatgaagcaggaaggcgtggaagtgcgagtggccagaatcttcaacacctttgggccacgcatgcacatgaacgatgggcgagtagtcagcaacttcatcctgcaggcgctccagggggagccactcacggtatacggatccgggtctcagacaagggcgttccagtacgtcagcgatctagtgaatggcctcgtggctctcatgaacagcaacgtcagcagcccggtcaacctggggaacccagaagaacacacaatcctagaatttgctcagttaattaaaaaccttgttggtagcggaagtgaaattcagtttctctccgaagcccaggatgacccacagaaaagaaaaccagacatcaaaaaagcaaagctgatgctggggtgggagcccgtggtcccgctggaggaaggtttaaacaaagcaattcactacttccgtaaagaactcgagtaccaggcaaataatcagtacatccccaaaccaaagcctgccagaataaagaaaggacggactcgccacagctgaactcctcacttttaggacacaagactaccattgtacacttgatgggatgtatttttggcttttttttgttgtcgtttaaagaaagactttaacaggtgtcatgaagaacaaactggaatttcattctgaagcttgctttaatgaaatggatgtgcctaaaagctcccctcaaaaaactgcagattttgccttgcactttttgaatctctctttttatgtaaaatagcgtagatgcatctctgcgtattttcaagtttttttatcttgctgtgagagcatatgttgtgactgtcgttgacagttttatttactggtttctttgtgaagctgaaaaggaacattaagcgggacaaaaaatgccgattttatttataaaagtgggtacttaataaatgagtcgttatactatgcataaagaaaaatcctagcagtattgtcaggtggtggtgcgccggcattgattttagggcagataaaagaattctgtgtgagagctttatgtttctcttttaattcagagtttttccaaggtctacttttgagttgcaaacttgactttgaaatattcctgttggtcatgatcaaggatatttgaaatcactactgtgttttgctgcgtatctggggcgggggcaggttggggggcacaaagttaacatattcttggttaaccatggttaaatatgctattttaataaaatattgaaactcaccagtcatggaaaaaaaaaaaaaaaaaaaaaaaaaaaaaaaaaaaaaaaaaaaaaaaaa

SEQ ID NO: 309 - protein, 420 aa, Homo sapiens
MVSKALLRLVSAVNRRRMKLLLGIALLAYVASVWGNFVNMRSIQENGELKIESKIEEMVEPLREKIRDLEKSFTQKYPPVKFLSEKDRKRILITGGAGFVGSHLTDKLMMDGHEVTVVDNFFTGRKRNVEHWIGHENFELINHDVVEPLYIEVDQIYHLASPASPPNYMYNPIKTLKTNTIGTLNMLGLAKRVGARLLLASTSEVYGDPEVHPQSEDYWGHVNPIGPRACYDEGKRVAETMCYAYMKQEGVEVRVARIFNTFGPRMHMNDGRVVSNFILQALQGEPLTVYGSGSQTRAFQYVSDLVNGLVALMNSNVSSPVNLGNPEEHTILEFAQLIKNLVGSGSEIQFLSEAQDDPQKRKPDIKKAKLMLGWEPVVPLEEGLNKAIHYFRKELEYQANNQYIPKPKPARIKKGRTRHS

SEQ ID NO: 310 - DNA, 6329 bp, Homo sapiens
cgcgtccatttgaacgtctcgcacgccttcctgccattagcactcgagcccgctgctgttgcccgttcttcctccagaataggggagggagagggaatgagaagctgctgcggcccaagagtcactgtgaaggaccccgccgctgccctcgggcctcctcggcccctgcgcctccggggagcagccggggctcgccgcgcctgacgcgtcccgagttatacagaaataatgttgatatttggaacccatgtcgaacttctatgaagaaaggacaacgatgattgcagcaagggatttgcaggaatttgttccttttggtcgagaccactgcaagcaccaccctaatgctttgaaccttcaacttcgccagctgcagccagcttctgaattatggtcttctgatggtgctgctggcttggtgggatcccttcaggaggttacaatccacgagaaacagaaggaaagctggcagttaaggaaaggagtaagtgaaattggagaagatgtggactatgatgaggaactctatgttgctggaaatatggtgatatggagcaaaggaagtaaaagccaggcattggcagtttataaagcatttacagttgacagtcctgttcagcaggcattgtggtgtgacttcattatatcacaggataagtctgaaaaggcctacagtagcaatgaagtagaaaaatgcatatgtatattgcaaagctcatgtattaacatgcatagcatagaaggaaaggattacatagcttcattaccatttcaggttgcaaatgtttggcccactaaatatggattgctgtttgaacgaagcgcttcttcacatgaagtacctccaggttcacccagagaacctttacctactatgttcagcatgctgcacccactagatgaaataactccacttgtttgtaaatctggaagtctttttggttcatcacgggtgcaatatgttgtagatcatgcaatgaaaattgttttcctcaatactgacccctctattgtaatgacttatgatgctgttcaaaatgtgcattctgtgtggactctccggagagtcaaatcagaggaagagaatgttgttttaaagttctctgaacaggggggaaccccacagaatgtggccactagcagctccctcacagcacatctcagaagcctctccaaaggagattcccctgtgacttcacctttccagaattactcctccattcacagccagagtcgctcaacctcatcacccagtctacattctcgctcaccttctatttccaacatggcagctctaagtcgtgctcattctcctgcgttaggagtgcactctttttcaggggtgcaaaggttcaacatttcaagccataatcagtctccaaagagacatagtatttctcattctccaaatagtaattctaatggctcctttcttgcaccagaaacggagccaattgttcctgaactgtgtattgaccatttgtggacagaaacgattactaatataagagagaaaaattcacaagcctcaaaagtgtttattacatctgacctatgtgggcaaaagttcctgtgctttttagtagagtcccagctccagttacgctgtgtaaagtttcaagagagtaatgataaaacccagctcatctttggttcagtgaccaacataccagcaaaggatgcagcaccagtggagaaaatagacaccatgctggtcttggaaggcagtggaaacctggtgctatacacaggagtggttcgggtgggaaaggtttttattcctggactgccagctccctctctgacgatgtccaacacaatgcctcggcccagtactccactagatggcgttagtactccaaagcctcttagtaaactccttggatcattggacgaggttgttctgttgtccccagttccagaactgagggattcttcaaaacttcatgattctctctataatgaggattgtactttccaacagcttggaacttacattcattctatcagagatcctgtccataacagagtcaccctggaactgagtaatggctccatggttaggatcactattcctgaaattgccacctctgagttagtacaaacgtgtttgcaagcaattaagtttatcctgccaaaagaaatagcagttcagatgcttgtcaagtggtacaatgtccacagtgctccaggaggacccagttatcactcagagtggaatttatttgtgacttgtctcatgaacatgatgggttataacacagaccgcttagcatggactagaaattttgactttgaaggatcactttctcctgtcattgcgcccaaaaaagcaaggccttccgagactggatctgatgatgactgggaatatttactaaattcagactaccaccagaatgttgagtctcatcttttgaacagatctttatgtctgagtccttcagaagcttcacagatgaaggatgaggatttttcacagaatctcagtctggattcttctacacttctctttactcacatacctgcaatttttttcgttcttcaccttgtgtatgaggagcttaagttgaatactctaatgggagaaggaatttgttcacttgttgaacttctcgttcagttggcaagggacttaaaattggggccttatgtagatcattactatagagactacccaacgcttgtcagaactactggacaagtgtgcacaattgatccaggtcaaacaggatttatgcatcatccatcattttttacgtctgagccaccaagtatttatcagtgggtgagttcttgtctgaagggtgaaggaatgccaccttatccttacctccctggaatctgtgaaagaagcagacttgtagtcttgagtattgcactgtacatacttggtgatgagagcttggtttctgatgaatcctcacagtatttaaccagaataactatagccccccagaagttgcaagtagaacaagaggaaaacaggtttagtttcaggcattctacatctgtttctagtctagctgaaagattggttgtctggatgactaatgtaggattcactttaagagatttggaaactcttccctttggaattgctcttcccatcagagatgcaatttatcactgtcgtgagcagcctgcctcagactggccagaagctgtctgtctcttgattggacgtcaggatctttccaagcaggcctgcgaaggaaacttacccaaagggaagtctgtgctctcatcagatgttccttcaggaacagaaactgaggaggaagatgacggcatgaatgacatgaatcacgaggtcatgtcattaatatggagtgaagatttaagggtgcaggatgtgcgaaggcttcttcagagtgcgcatcctgtccgtgtcaacgtagtgcagtacccagagctcagtgaccacgagttcatcgaggaaaaggaaaacagattgctccaattgtgtcagcgaactatggctcttcctgtaggacgaggaatgtttaccttgttttcgtaccatcctgttccaacagagccattgcctattcctaaattgaatctgactgggcgtgcccctcctcggaacacaacagtagaccttaatagtggaaacatcgatgtgcctcccaacatgacaagctgggccagctttcataatggtgtggctgctggcctgaagatagctcctgcctcccagatcgactcagcttggattgtttacaataagcccaagcatgctgagttggccaatgagtatgctggctttctcatggctctgggtttgaatgggcaccttaccaagctggcgactctcaatatccatgactacttgaccaagggccatgaaatgacaagcattggactgctacttggtgtttctgctgcaaaactaggcaccatggatatgtctattactcggcttcttagcattcacattcctgctctcttacccccaacgtccacagagctggatgttcctcacaatgtccaagtggctgcagtggttggcattggccttgtatatcaagggacagctcacagacatactgcagaagtcctgttggctgagataggacggcctcctggtcctgaaatggaatactgcactgacagagagtcatactccttagctgctggcttggccctgggcatggtctgcttggggcatggcagcaatttgataggtatgtctgatctcaatgtgcctgagcagctctatcagtacatggttggaggacataggcgctttcaaacaggaatgcatagggagaaacataaatcaccaagttatcaaatcaaagaaggagataccataaatgtggatgtgacttgtccaggtgctactctagctttggctatgatctacttaaaaaccaataacagatctattgcagattggctccgagcccctgacaccatgtatttgttggactttgtgaagccagaatttctcttgcttaggacacttgctcgatgcctgattttgtgggatgatattttaccaaattccaagtgggttgacagcaatgttcctcaaattataagagaaaatagtatctctctcagtgaaatcgaattgccgtgctcagaggatttgaatttggaaactttgtcccaagcacatgtctacataattgcaggagcctgcttgtctctgggttttcgatttgctggctcagaaaacttatcagcatttaactgtttgcataaatttgccaaagattttatgacttatttgtccgcacctaatgcttctgttacaggtcctcataacctagaaacttgtctgagcgtggtgctgctgtctctcgccatggtcatggctggctcaggaaacctaaaggttttgcagctttgtcgcttcttacacatgaaaacgggtggtgaaatgaactatggttttcacttagcccaccacatggcccttggacttctatttttgggaggaggaaggtactctttgagcacatcaaattcttccattgccgctcttctctgtgccctttatccgcacttcccagctcacagcactgacaaccggtatcatctccaggctctccggcacctctatgtgctggccgcggagcccaggcttctagtgcctgtggatgtggacacaaacacgccctgctatgccctcttagaagttacctacaagggcactcagtggtatgaacaaaccaaagaagaattgatggctcctacccttcttccagaactccatcttttaaagcagattaaagtaaaaggcccaagatactgggaactgctcatagatttaagcaaaggaacacaacacttgaagtccatcctttccaaggatggggttttatatgttaaactccgggcgggtcagctctcctacaaagaagatccaatgggatggcaaagtttgttggctcagactgttgctaacaggaactctgaagcccgggctttcaagccagaaacaatctcagcattcacttctgatccagcacttctgtcatttgctgaatatttctgcaagccaactgtgaacatgggtcagaaacaggaaattctggatctcttttcttcagtactctatgaatgtgttacccaggagaccccagagatgttgcctgcatacatagcaatggatcaggctataagaagacttgggagaagagaaatgtctgagacttctgaactttggcagataaagttggtgttagagtttttcagctcccgaagccatcaggagcggctgcagaaccaccctaagcgggggctctttatgaactcggaattcctccctgttgtgaagtgcaccattgataataccctggaccagtggctacaagtcgggggtgatatgtgtgtgcacgcctacctcagcgggcagcccttggaggaatcacagctgagcatgctggcctgcttcctcgtctaccactctgtgccagctccacagcacctgccacctataggactagaagggagcacaagctttgctgaactgctcttcaaatttaagcagctaaaaatgccagtgcgagctttgctgagattggctcctttgcttcttggaaatccacagccaatggtgatgtgaccgtgtctggcggtgaacctaccctgaaacgtgacttctgcacaacaaacgtgaccaaacatcaaagctaaagcaatgtttataaagttttatggtataactagggggaaatgagctgcacaaacctcaatgtattttaaatctgttgctgtcatcattaacggtatatgacatataaaagcaagttaaaatttacttttgtaaataaagtttttggtttgtttccaaaaaaaaaaaaaaaaaaaaa

SEQ ID NO: 311 - protein, 1944 aa, Homo sapiens
MSNFYEERTTMIAARDLQEFVPFGRDHCKHHPNALNLQLRQLQPASELWSSDGAAGLVGSLQEVTIHEKQKESWQLRKGVSEIGEDVDYDEELYVAGNMVIWSKGSKSQALAVYKAFTVDSPVQQALWCDFIISQDKSEKAYSSNEVEKCICILQSSCINMHSIEGKDYIASLPFQVANVWPTKYGLLFERSASSHEVPPGSPREPLPTMFSMLHPLDEITPLVCKSGSLFGSSRVQYVVDHAMKIVFLNTDPSIVMTYDAVQNVHSVWTLRRVKSEEENVVLKFSEQGGTPQNVATSSSLTAHLRSLSKGDSPVTSPFQNYSSIHSQSRSTSSPSLHSRSPSISNMAALSRAHSPALGVHSFSGVQRFNISSHNQSPKRHSISHSPNSNSNGSFLAPETEPIVPELCIDHLWTETITNIREKNSQASKVFITSDLCGQKFLCFLVESQLQLRCVKFQESNDKTQLIFGSVTNIPAKDAAPVEKIDTMLVLEGSGNLVLYTGVVRVGKVFIPGLPAPSLTMSNTMPRPSTPLDGVSTPKPLSKLLGSLDEVVLLSPVPELRDSSKLHDSLYNEDCTFQQLGTYIHSIRDPVHNRVTLELSNGSMVRITIPEIATSELVQTCLQAIKFILPKEIAVQMLVKWYNVHSAPGGPSYHSEWNLFVTCLMNMMGYNTDRLAWTRNFDFEGSLSPVIAPKKARPSETGSDDDWEYLLNSDYHQNVESHLLNRSLCLSPSEASQMKDEDFSQNLSLDSSTLLFTHIPAIFFVLHLVYEELKLNTLMGEGICSLVELLVQLARDLKLGPYVDHYYRDYPTLVRTTGQVCTIDPGQTGFMHHPSFFTSEPPSIYQWVSSCLKGEGMPPYPYLPGICERSRLVVLSIALYILGDESLVSDESSQYLTRITIAPQKLQVEQEENRFSFRHSTSVSSLAERLVVWMTNVGFTLRDLETLPFGIALPIRDAIYHCREQPASDWPEAVCLLIGRQDLSKQACEGNLPKGKSVLSSDVPSGTETEEEDDGMNDMNHEVMSLIWSEDLRVQDVRRLLQSAHPVRVNVVQYPELSDHEFIEEKENRLLQLCQRTMALPVGRGMFTLFSYHPVPTEPLPIPKLNLTGRAPPRNTTVDLNSGNIDVPPNMTSWASFHNGVAAGLKIAPASQIDSAWIVYNKPKHAELANEYAGFLMALGLNGHLTKLATLNIHDYLTKGHEMTSIGLLLGVSAAKLGTMDMSITRLLSIHIPALLPPTSTELDVPHNVQVAAVVGIGLVYQGTAHRHTAEVLLAEIGRPPGPEMEYCTDRESYSLAAGLALGMVCLGHGSNLIGMSDLNVPEQLYQYMVGGHRRFQTGMHREKHKSPSYQIKEGDTINVDVTCPGATLALAMIYLKTNNRSIADWLRAPDTMYLLDFVKPEFLLLRTLARCLILWDDILPNSKWVDSNVPQIIRENSISLSEIELPCSEDLNLETLSQAHVYIIAGACLSLGFRFAGSENLSAFNCLHKFAKDFMTYLSAPNASVTGPHNLETCLSVVLLSLAMVMAGSGNLKVLQLCRFLHMKTGGEMNYGFHLAHHMALGLLFLGGGRYSLSTSNSSIAALLCALYPHFPAHSTDNRYHLQALRHLYVLAAEPRLLVPVDVDTNTPCYALLEVTYKGTQWYEQTKEELMAPTLLPELHLLKQIKVKGPRYWELLIDLSKGTQHLKSILSKDGVLYVKLRAGQLSYKEDPMGWQSLLAQTVANRNSEARAFKPETISAFTSDPALLSFAEYFCKPTVNMGQKQEILDLFSSVLYECVTQETPEMLPAYIAMDQAIRRLGRREMSETSELWQIKLVLEFFSSRSHQERLQNHPKRGLFMNSEFLPVVKCTIDNTLDQWLQVGGDMCVHAYLSGQPLEESQLSMLACFLVYHSVPAPQHLPPIGLEGSTSFAELLFKFKQLKMPVRALLRLAPLLLGNPQPMVM

SEQ ID NO: 312 - DNA, 5078 bp, Homo sapiens
taatactcctttattccctgttttaaaaatttttttaaatttgatacaataattatacataataatggagtaccatgtgagattcaatccacatatacattgtgaaatgatcaaattaggatagttagcatgcacatcacccccaaataattattacttttgtggtgagaacacttaaaattgtctcttttagaaatatacgttattattaaccatagtcacctcgctgtgcaatagaacaccagaacttattcctcctaaatgtaactttttacccattgaccactccctcctcacccccctctctcctccccacccctggtaaccactgttctgttatctcctatgatagcaactttttagcttctgcatgtgagattgtacggtagttgcctttctgtgcctggattatttcatttagcataatgtccttcgggtatatccctgttgctgcaaaagacaggatttctctctctttttctggttgaatagtattccattgtcagagaatgttgtaagactaggaaaggaacactgcaggctggagccctggggaaatggtctgaggcaggtggtgggactagagctggggtctggcaaacaggctgggtttgattgtcagcataatagagagcactcatgtgccagctgggtgggaggagcagccgagtgaagaaggggaagcctctcaggaagcatgtgcagggtttatggtaatgagcagaccagcaggtacgtagtgggagaggggtgtgatggggcagaggaacttacgttatgatagtacaagacagaggttgagcctcattttaataggcattgtggtgggtgttgaatagtgatggaatgtatgggtctggaatcaggctgcctggtcaagggctctgaaacatgagtgtgcatcagaatcacctcgaggcttgttaaaggataggctgtggaccacatctcctcagttgctgattcagtgggtgtgggtggggcctgagaattcacatttcccactggtgatgctgctgttactgattgggaccacatttggggaacactggtctagaattgagaggttggcaaaccttctctgttaagaggtagatagtaaatattttaggccttctgggctacaaagagtatctgttacatattttttattgcttttcatgacccattaagcatatatatatcattctctgccatatacaaacaggctgttgggggagtgaggatgatgtagggaaggtggggcatggtttaataacccctgggccatgcctagatgatcagtcctctgccacatagctggctgacctttgccaagttaatcaccttttacctttattttctcatgtttctaataaaacagagacgataatattcatacttcttaccatatagaacttctgaggattcagtgagcaaagccacaaaagatggtatgtcacaatatctgggatatagctagaatttataatttatttttactctgttgataggcaatgggaaaacagtaagaggcagaccaacagtgatccagggctctgaaagctaattgcttcaagatcctgctaccattttcttttgggccgcttgcaaagaagaatcctttgactgaagcatgtatgtacactctgaagtacagcctgggttagtctcttataagggatcggatcattgctcagctctcccttgagtggcacttagaaaatggcgctattcgtaagctgactggtattgggcccaggactctggctgaaggggtgggcatgctggtaaccatttgcaacctatgctcaggtcctacttgttgggaagccctgattgagaagagtggcctggtctgtgctggcattagataggatctggctgcattaatattgaaactactctgccttttaatgtctcattttgcctcatggtgggagtgaaagtgagaaccacagaaaatctgcctgccaggtgttccacatttcttgtgctacagcatgcaagtgagcagtgaggtgtaccttttcctcatgtagctgggaaagcaatacccctgcttgtacctctggcatatcttctctgtgctggtgcacctagagaggttgcctggtggccctgagagagccatctcatcactaaacactgatggtgaaaagctggccatgctcaaataagatgtagcaatctacctcttctttgtctagttacccccaagggggcatccactttcttgctcacctcaccagttgcatgttctagtccttgccagaagcacataataatgactttgtaagcttaagttacaggcacacaaaagggcctgatggtgatatgactccaccctccccgtttttgctgacattccgccaaatatccttctgtctcctccccaccttgcaaaacaaacttcctgttttgaatttggtccaggctggaacagccccaccacacctgttaacacacgcagacgcacacttcccccttcataattgcttagcttcttgttgcctagccagatttcccctcagcttacagttcctgaatcataagatattgaaccagcaaatttaagagttgacattttacttagaggtattcaagtgaaaacatggcttctggtttattttgctgtattgtgccatgaccacttggctaattcttctcctccttcacatcagaatggaagtgaggaaaggcaaccagctgacacaggagccagagtgagaccagcagactctcacactcaacctacaccatgaatttgtgtctatcttctacgcgttaagagccaaggacaggtgaagttgccagagagcaatggctctcttcactccgtggaagttgtcctctcagaagctgggctttttcctggtgacttttggcttcatttggggtatgatgcttctgcactttaccatccagcagcgaactcagcctgaaagcagctccatgctgcgcgagcagatcctggacctcagcaaaaggtacatcaaggcactggcagaagaaaacaggaatgtggtggatgggccatacgctggagtcatgacagcttatgatctgaagaaaacccttgctgtgttattagataacattttgcagcgcattggcaagttggagtcgaaggtggacaatcttgttgtcaatggcaccggaacaaactcaaccaactccactacagctgttcccagcttggttgcacttgagaaaattaatgtggcagatatcattaacggagctcaagaaaaatgtgtattgcctcctatggacggctaccctcactgtgagggaaagatcaagtggatgaaagacatgtggcgttcagatccctgctacgcagactatggagtggatggatccacctgctctttttttatttacctcagtgaggttgaaaattggtgtcctcatttaccttggagagcaaaaaatccctacgaagaagctgatcataattcattggcggaaattcgtacagattttaatattctctacagtatgatgaaaaagcatgaagaattccggtggatgagactacggatccggcgaatggctgacgcatggatccaagcaatcaagtccctggcagaaaagcagaaccttgaaaagagaaagcggaagaaagtcctcgttcacctgggactcctgaccaaggaatctggatttaagattgcagagacagctttcagtggtggccctcttggtgaattagttcaatggagtgatttaattacatctctgtacttactgggccatgacattaggatttcagcttcactggctgagctcaaggaaatcatgaagaaggttgtaggaaaccgatctggctgcccaactgtaggagacagaattgttgagctcatttacattgatattgtaggacttgctcaattcaagaaaactcttggaccatcctgggttcattaccagtgcatgctccgagtccttgattcatttggtactgaacccgaatttaatcatgcaaattatgcccaatcgaaaggccacaagaccccttggggaaaatggaatctgaaccctcagcagttttataccatgttccctcataccccagacaacagctttctggggtttgtggttgagcagcacctgaactccagtgatatccaccacattaatgaaatcaaaaggcagaaccagtcccttgtgtatggcaaagtggatagcttctggaagaataagaagatctacttggacattattcacacatacatggaagtgcatgcaactgtttatggctccagcacaaagaatattcccagttacgtgaaaaaccatggtatcctcagtggacgggacctgcagttccttcttcgagaaaccaagttgtttgttggacttgggttcccttacgagggcccagctcccctggaagctatcgcaaatggatgtgcttttctgaatcccaagttcaacccacccaaaagcagcaaaaacacagactttttcattggcaagccaactctgagagagctgacatcccagcatccttacgctgaagttttcatcgggcggccacatgtgtggactgttgacctcaacaatcaggaggaagtagaggatgcagtgaaagcaattttaaatcagaagattgagccatacatgccatatgaatttacgtgcgaggggatgctacagagaatcaatgctttcattgaaaaacaggacttctgccatgggcaagtgatgtggccacccctcagcgccctacaggtcaagcttgctgagcccgggcagtcctgcaagcaggtgtgccaggagagccagctcatctgcgagccttctttcttccagcacctcaacaaggacaaggacatgctgaagtacaaggtgacctgccaaagctcagagctggccaaggacatcctggtgccctcctttgaccctaagaataagcactgtgtgtttcaaggtgacctcctgctcttcagctgtgcaggcgcccaccccaggcaccagagggtctgcccctgccgggacttcatcaagggccaggtggctctctgcaaagactgcctatagcagctacctgctcagccctgcaccatgctgctggggaagacagtggcccc

SEQ ID NO: 313 - protein, 741 aa, Homo sapiens
MALFTPWKLSSQKLGFFLVTFGFIWGMMLLHFTIQQRTQPESSSMLREQILDLSKRYIKALAEENRNVVDGPYAGVMTAYDLKKTLAVLLDNILQRIGKLESKVDNLVVNGTGTNSTNSTTAVPSLVALEKINVADIINGAQEKCVLPPMDGYPHCEGKIKWMKDMWRSDPCYADYGVDGSTCSFFIYLSEVENWCPHLPWRAKNPYEEADHNSLAEIRTDFNILYSMMKKHEEFRWMRLRIRRMADAWIQAIKSLAEKQNLEKRKRKKVLVHLGLLTKESGFKIAETAFSGGPLGELVQWSDLITSLYLLGHDIRISASLAELKEIMKKVVGNRSGCPTVGDRIVELIYIDIVGLAQFKKTLGPSWVHYQCMLRVLDSFGTEPEFNHANYAQSKGHKTPWGKWNLNPQQFYTMFPHTPDNSFLGFVVEQHLNSSDIHHINEIKRQNQSLVYGKVDSFWKNKKIYLDIIHTYMEVHATVYGSSTKNIPSYVKNHGILSGRDLQFLLRETKLFVGLGFPYEGPAPLEAIANGCAFLNPKFNPPKSSKNTDFFIGKPTLRELTSQHPYAEVFIGRPHVWTVDLNNQEEVEDAVKAILNQKIEPYMPYEFTCEGMLQRINAFIEKQDFCHGQVMWPPLSALQVKLAEPGQSCKQVCQESQLICEPSFFQHLNKDKDMLKYKVTCQSSELAKDILVPSFDPKNKHCVFQGDLLLFSCAGAHPRHQRVCPCRDFIKGQVALCKDCL

SEQ ID NO: 314 - DNA, 9123 bp, Homo sapiens
agcgaagcggaggcataagcagagaggattctggaaaggtctctttgttttcttatccacagagaaagaaagaaaaaaaattgtaactaatttgtaaacctctgtggtcaaaaaaaaaaaaaaaaaaaaagctgaacagctgccagaggaagacacgttataccctaaccatcttggatgctgggctttgttatgctgtaattcataaggctctgttttatcagagattatggagcaagaaaactgaagccaagccacatcaaggtttgacagggatgagatacctgtcaaggattcatagtagagtggcttactgggaaaggagcaaagaatctcttctagggatattgtaagaataaatgagataattcacagaagggacctggagcttttccggaaaaaggtgctgtgactatctaaggtaattcgtatgcaagaagctacacgtaattaaatgtgcaggatgaaaagatggcacaggcactgttggtacccccaggacctgaaagcttccgcctttttactagagaatctcttgctgctatcgaaaaacgtgctgcagaagagaaagccaagaagcccaaaaaggaacaagataatgatgatgagaacaaaccaaagccaaatagtgacttggaagctggaaagaaccttccatttatttatggagacattcctccagagatggtgtcagagcccctggaggacctggatccctactatatcaataagaaaacttttatagtaatgaataaaggaaaggcaattttccgattcagtgccacctctgccttgtatattttaactccactaaaccctgttaggaaaattgctatcaagattttggtacattctttattcagcatgcttatcatgtgcactattttgaccaactgtgtatttatgaccttgagcaaccctcctgactggacaaagaatgtagagtacacattcactggaatctatacctttgagtcacttataaaaatcttggcaagagggttttgcttagaagattttacgtttcttcgtgatccatggaactggctggatttcagtgtcattgtgatggcatatgtgacagagtttgtggacctgggcaatgtctcagcgttgagaacattcagagttctccgagcactgaaaacaatttcagtcattccaggtttaaagaccattgtgggggccctgatccagtcggtaaagaagctttctgatgtgatgatcctgactgtgttctgtctgagcgtgtttgctctcattgggctgcagctgttcatgggcaatctgaggaataaatgtttgcagtggcccccaagcgattctgcttttgaaaccaacaccacttcctactttaatggcacaatggattcaaatgggacatttgttaatgtaacaatgagcacatttaactggaaggattacattggagatgacagtcacttttatgttttggatgggcaaaaagaccctttactctgtggaaatggctcagatgcaggccagtgtccagaaggatacatctgtgtgaaggctggtcgaaaccccaactatggctacacaagctttgacacctttagctgggctttcctgtctctatttcgactcatgactcaagactattgggaaaatctttaccagttgacattacgtgctgctgggaaaacatacatgatattttttgtcctggtcattttcttgggctcattttatttggtgaatttgatcctggctgtggtggccatggcctatgaggagcagaatcaggccaccttggaagaagcagaacaaaaagaggccgaatttcagcagatgctcgaacagcttaaaaagcaacaggaagaagctcaggcagttgcggcagcatcagctgcttcaagagatttcagtggagtaggtgggttaggagagctgttggaaagttcttcagaagcatcaaagttgagttccaaaggtgctaaagaatggaggaaccggaggaagaaaagaagacagagagagcaccttgaaggaaacaacaaaggagagagagacagctttcccaaatccgaatctgaagacagcgtcaaaagaagcagcttccttttctccatggatggaaacagactgaccagtgacaaaaaattctgctcccctcatcagtctctcttgagtatccgtggctccctgttttccccaagacgcaatagcaaaacaagcattttcagtttcagaggtcgggcaaaggatgttggatctgaaaatgactttgctgatgatgaacacagcacatttgaagacggcgaaagcaggagagactcactgtttgtgccgcacagacatggagagcgacgcaacagtaacgttagtcaggccagtatgtcatccaggatggtgccagggcttccagcaaatgggaagatgcacagcactgtggattgcaatggtgtggtttccttggtgggtggaccttcagctctaacgtcacctactggacaacttcccccagagggcaccaccactgaaacggaagtcagaaagagaaggttaagctcttaccagatttcaatggagatgctggaggattcctctggaaggcaaagagccgtgagcatagccagcattctgaccaacacaatggaagaacttgaagaatctagacagaaatgtccgccatgctggtatagatttgccaatgtgttcttgatctgggactgctgtgatgcatggttaaaagtaaaacatcttgtgaatttaattgttatggatccatttgttgatcttgccatcactatttgcattgtcttaaataccctctttatggccatggagcactaccccatgactgagcaattcagtagtgtgttgactgtaggaaacctggtctttactgggattttcacagcagaaatggttctcaagatcattgccatggatccttattactatttccaagaaggctggaatatctttgatggaattattgtcagcctcagtttaatggagcttggtctgtcaaatgtggagggattgtctgtactgcgatcattcagactgcttagagttttcaagttggcaaaatcctggcccacactaaatatgctaattaagatcattggcaattctgtgggggctctaggaaacctcaccttggtgttggccatcatcgtcttcatttttgctgtggtcggcatgcagctctttggtaagagctacaaagaatgtgtctgcaagatcaatgatgactgtacgctcccacggtggcacatgaacgacttcttccactccttcctgattgtgttccgcgtgctgtgtggagagtggatagagaccatgtgggactgtatggaggtcgctggccaaaccatgtgccttattgttttcatgttggtcatggtcattggaaaccttgtggttctgaacctctttctggccttattattgagttcatttagctcagacaaccttgctgctactgatgatgacaatgaaatgaataatctgcagattgcagtaggaagaatgcaaaagggaattgattatgtgaaaaataagatgcgggagtgtttccaaaaagccttttttagaaagccaaaagttatagaaatccatgaaggcaataagatagacagctgcatgtccaataatactggaattgaaataagcaaagagcttaattatcttagagatgggaatggaaccaccagtggtgtaggtactggaagcagtgttgaaaaatacgtaatcgatgaaaatgattatatgtcattcataaacaaccccagcctcaccgtcacagtgccaattgctgttggagagtctgactttgaaaacttaaatactgaagagttcagcagtgagtcagaactagaagaaagcaaagagaaattaaatgcaaccagctcatctgaaggaagcacagttgatgttgttctaccccgagaaggtgaacaagctgaaactgaacccgaagaagactttaaaccggaagcttgttttactgaagggtgtattaaaaagtttccattctgtcaagtaagtacagaagaaggcaaagggaagatctggtggaatcttcgaaaaacctgctacagtattgttgagcacaactggtttgagactttcattgtgttcatgatccttctcagtagtggtgcattggcctttgaagatatatacattgaacagcgaaagactatcaaaaccatgctagaatatgctgacaaagtctttacctatatattcattctggaaatgcttctcaaatgggttgcttatggatttcaaacatatttcactaatgcctggtgctggctagatttcttgatcgttgatgtttctttggttagcctggtagccaatgctcttggctactcagaactcggtgccatcaaatcattacggacattaagagctttaagacctctaagagccttatcccggtttgaaggcatgagggtggttgtgaatgctcttgttggagcaattccctctatcatgaatgtgctgttggtctgtctcatcttctggttgatctttagcatcatgggtgtgaatttgtttgctggcaagttctaccactgtgttaacatgacaacgggtaacatgtttgacattagtgatgttaacaatttgagtgactgtcaggctcttggcaagcaagctcggtggaaaaacgtgaaagtaaactttgataatgttggcgctggctatcttgcactgcttcaagtggccacatttaaaggctggatggatattatgtatgcagctgttgattcacgagatgttaaacttcagcctgtatatgaagaaaatctgtacatgtatttatactttgtcatctttatcatctttgggtcattcttcactctgaatctattcattggtgtcatcatagataacttcaaccagcagaaaaagaagtttggaggtcaagacatctttatgacagaggaacagaaaaaatattacaatgcaatgaagaaacttggatccaagaaacctcagaaacccatacctcgcccagcaaacaaattccaaggaatggtctttgattttgtaaccagacaagtctttgatatcagcatcatgatcctcatctgcctcaacatggtcaccatgatggtggaaacggatgaccagggcaaatacatgaccctagttttgtcccggatcaacctagtgttcattgttctgttcactggagaatttgtgctgaagctcgtttccctcagacactactacttcactataggctggaacatctttgactttgtggtggtgattctctccattgtaggtatgtttctggctgagatgatagaaaagtattctgtgtcccctaccttgttccgagtgatccgtcttgccaggattggccgaatcctacgtctgatcaaaggagcaaaggggatccgcacgctgctctttgctttgatgatgtcccttcctgcgttgtttaacatcggcctcctgctcttcctggtcatgtttatctatgccatctttgggatgtccaactttgcctatgttaaaaaggaagctggaattgatgacatgttcaactttgagacctttggcaacagcatgatctgcttgttccaaattacaacctctgctggctgggatggattgctagcacctattcttaatagtgcaccacccgactgtgaccctgacacaattcaccctggcagctcagttaagggagaccgtggggacccatctgttgggattttcttttttgtcagttacatcatcatatccttcctggttgtggtgaacatgtacatcgcggtcatcctggagaacttcagtgttgctactgaagaaagtgcagagcccctgagtgaggatgactttgagatgttctatgaggtttgggaaaagtttgatcccgatgcgacccagtttatagagttctctaaactctctgattttgcagctgccctggatcctcctcttctcatagcaaaacccaacaaagtccagcttattgccatggatctgcccatggtcagtggtgaccggatccactgtcttgatattttatttgcctttacaaagcgtgttttgtgtgagagtggagagatggatgcccttcgaatacagatggaagacaggtttatggcatcaaacccctccaaagtctcttatgagcctattacaaccactttgaaacgtaaacaagaggaggtgtctgccgctatcattcagcgtaatttcagatgttatcttttaaagcaaaggttaaaaaatatatcaagtaactataacaaagaggcaattaaagggaggattgacttacctataaaacaagacatgattattgacaaactaaatgggaactccactccagaaaaaacagatgggagttcctctaccacccctcctccttcctatgatagtgtaacaaaaccagacaaggaaaagtttgagaaagacaaaccagaaaaagaaagcaaaggaaaagaggtcagagaaaatcaaaagtaaaaagaaacaaagaattatctttgtgatcaattgtttacagcctatgaaggtaaagtatatgtgtcaactggacttcaagaggaggtccatgccaaactgactgttttaacaaatactcatagtcagtgcctatacaagacagtgaagtgacctctctgtcactgcaactctgtgaagcagggtatcaacgttgacaagaggttgctgtttttattaccagctgacactgctgaggagaaacccaatggctacctagactatagggatagttgtgcaaagtgaacattgtaactacaccaaacacctttagtacagtccttgcatccattctatttttaacttccatatctgccatatttttacaaaatttgttctagtgcatttccatggtccccaattcatagtttattcataatgctatgtcactatttttgtaaatgaggtttacgttgaagaaacagtatacaagaaccctgtctctcaaatgatcagacaaaggtgttttgccagagagataaaatttttgctcaaaaccagaaaaagaattgtaatggctacagtttcagttacttccattttctagatggctttaattttgaaagtattttagtctgttatgtttgtttctatctgaacagttatgtgcctgtaaagtctcctctaatatttaaaggattatttttatgcaaagtattctgtttcagcaagtgcaaattttattctaagtttcagagctctatatttaatttaggtcaaatgctttccaaaaagtaatctaataaatccattctagaaaaatatatctaaagtattgctttagaatagttgttccactttctgctgcagtattgctttgccatcttctgctctcagcaaagctgatagtctatgtcaattaaataccctatgttatgtaaatagttattttatcctgtggtgcatgtttgggcaaatatatatatagcctgataaacaacttctattaaatcaaatatgtaccacagtgtatgtgtcttttgcaagcttccaacagggatgtatcctgtatcattcattaaacatagtttaaaggctatcactaatgcatgttaatattgcctatgctgctctattttactcaatccattcttcacaagtcttggttaaagaatgtcacatattggtgatagaatgaattcaacctgctctgtccattatgtcaagcagaataatttgaagctatttacaaacacctttacttttgcacttttaattcaacatgagtatcatatggtatctctctggatttcaaggaaacacactggatactgcctactgacaaaacctattcttcatattttgctaaaaatatgtctaaaacttgtttaaatataaataatgtaaaaatataatcaactttatttgtcagcattttgtacataagaaaattattttcaggttgatgacatcacaatttattttactttatgcttttgcttttgatttttaatcacaattccaaacttttgaatccataagatttttcaatggataatttcctaaaataaaagttagataatgggttttatggatttctttgttataatatattttctaccattccaataggagatacattggtcaaacactcaaacctagatcattttctaccaactatggttgcctcaatataaccttttattcatagatgtttttttttattcaacttttgtagtatttacgtatgcagactagtcttatttttttaattcctgctgcactaaagctattacaaatataacatggactttgttctttttagccatgaacaaagtggcaaagttgtgcaattacctaacatgatataaatttttgttttttgcacaaaccaaaagtttaatgttaattctttttacaaaactatttactgtagtgtattgaagaactgcatgcagggaattgctattgctaaaaagaatggtgagctacgtcattattgagccaaaagaataaatttcattttttattgcatttcacttattgggctctggggttttttgtttttgttttttgctgttggcagtttaaaatatatataattaataaaacctgtgcttgatctgacatttgtatacataaaagtttacatgaattttacaacaaactagtgcatgattcaccaagcagtactacagaacaaaggcaaattaaaagcagctttgtgaacttttatgtgtgcaaaggatcaagttcacatgttccaactttcaggtttgataataatagtagtaaccacctacaatagctttcaatttcaattaactcccttggctataagcatctaaactcatcttctttcaatataattgatgctatctcctaattacttggtggctaataaatgttacattctttgttacttaaatgcattatataaactcctatgtatacataaggtattaatgatatagttattgagaatttatattaacttttttttcaagaacccttggatttatgtgaggtcaaaaccaaactcttattctcagtggaaaactccagttgtaatgcatatttttaaagacaatttggatctaaatatgtatttcataattctcccataataaattatataaggtggaaaaaaaaaaaaaaaaaaaaaaaaaaaaa

SEQ ID NO: 315 - protein, 2000 aa, Homo sapiens
MAQALLVPPGPESFRLFTRESLAAIEKRAAEEKAKKPKKEQDNDDENKPKPNSDLEAGKNLPFIYGDIPPEMVSEPLEDLDPYYINKKTFIVMNKGKAIFRFSATSALYILTPLNPVRKIAIKILVHSLFSMLIMCTILTNCVFMTLSNPPDWTKNVEYTFTGIYTFESLIKILARGFCLEDFTFLRDPWNWLDFSVIVMAYVTEFVDLGNVSALRTFRVLRALKTISVIPGLKTIVGALIQSVKKLSDVMILTVFCLSVFALIGLQLFMGNLRNKCLQWPPSDSAFETNTTSYFNGTMDSNGTFVNVTMSTFNWKDYIGDDSHFYVLDGQKDPLLCGNGSDAGQCPEGYICVKAGRNPNYGYTSFDTFSWAFLSLFRLMTQDYWENLYQLTLRAAGKTYMIFFVLVIFLGSFYLVNLILAVVAMAYEEQNQATLEEAEQKEAEFQQMLEQLKKQQEEAQAVAAASAASRDFSGVGGLGELLESSSEASKLSSKGAKEWRNRRKKRRQREHLEGNNKGERDSFPKSESEDSVKRSSFLFSMDGNRLTSDKKFCSPHQSLLSIRGSLFSPRRNSKTSIFSFRGRAKDVGSENDFADDEHSTFEDGESRRDSLFVPHRHGERRNSNVSQASMSSRMVPGLPANGKMHSTVDCNGVVSLVGGPSALTSPTGQLPPEGTTTETEVRKRRLSSYQISMEMLEDSSGRQRAVSIASILTNTMEELEESRQKCPPCWYRFANVFLIWDCCDAWLKVKHLVNLIVMDPFVDLAITICIVLNTLFMAMEHYPMTEQFSSVLTVGNLVFTGIFTAEMVLKIIAMDPYYYFQEGWNIFDGIIVSLSLMELGLSNVEGLSVLRSFRLLRVFKLAKSWPTLNMLIKIIGNSVGALGNLTLVLAIIVFIFAVVGMQLFGKSYKECVCKINDDCTLPRWHMNDFFHSFLIVFRVLCGEWIETMWDCMEVAGQTMCLIVFMLVMVIGNLVVLNLFLALLLSSFSSDNLAATDDDNEMNNLQIAVGRMQKGIDYVKNKMRECFQKAFFRKPKVIEIHEGNKIDSCMSNNTGIEISKELNYLRDGNGTTSGVGTGSSVEKYVIDENDYMSFINNPSLTVTVPIAVGESDFENLNTEEFSSESELEESKEKLNATSSSEGSTVDVVLPREGEQAETEPEEDFKPEACFTEGCIKKFPFCQVSTEEGKGKIWWNLRKTCYSIVEHNWFETFIVFMILLSSGALAFEDIYIEQRKTIKTMLEYADKVFTYIFILEMLLKWVAYGFQTYFTNAWCWLDFLIVDVSLVSLVANALGYSELGAIKSLRTLRALRPLRALSRFEGMRVVVNALVGAIPSIMNVLLVCLIFWLIFSIMGVNLFAGKFYHCVNMTTGNMFDISDVNNLSDCQALGKQARWKNVKVNFDNVGAGYLALLQVATFKGWMDIMYAAVDSRDVKLQPVYEENLYMYLYFVIFIIFGSFFTLNLFIGVIIDNFNQQKKKFGGQDIFMTEEQKKYYNAMKKLGSKKPQKPIPRPANKFQGMVFDFVTRQVFDISIMILICLNMVTMMVETDDQGKYMTLVLSRINLVFIVLFTGEFVLKLVSLRHYYFTIGWNIFDFVVVILSIVGMFLAEMIEKYSVSPTLFRVIRLARIGRILRLIKGAKGIRTLLFALMMSLPALFNIGLLLFLVMFIYAIFGMSNFAYVKKEAGIDDMFNFETFGNSMICLFQITTSAGWDGLLAPILNSAPPDCDPDTIHPGSSVKGDRGDPSVGIFFFVSYIIISFLVVVNMYIAVILENFSVATEESAEPLSEDDFEMFYEVWEKFDPDATQFIEFSKLSDFAAALDPPLLIAKPNKVQLIAMDLPMVSGDRIHCLDILFAFTKRVLCESGEMDALRIQMEDRFMASNPSKVSYEPITTTLKRKQEEVSAAIIQRNFRCYLLKQRLKNISSNYNKEAIKGRIDLPIKQDMIIDKLNGNSTPEKTDGSSSTTPPPSYDSVTKPDKEKFEKDKPEKESKGKEVRENQK

SEQ ID NO: 316 - DNA, 8810 bp, Homo sapiens
atgctgttttctaacagacattgggtaccatcgaatgactgtcagaacagaaagctaaggcaaaggagggaggatgctgtggtcatcctttcttgtttttttcttctttaatgaggatagagcacatgtgagattttactttctactccagtaaaaattctgaagaattgcattggagactgttatattcaacacatacgtggattctgtgttatgatttacatttttctttatttcagcactttcttatgcaaggagctaaacagtgattaaaggagcaggatgaaaagatggcacagtcagtgctggtaccgccaggacctgacagcttccgcttctttaccagggaatcccttgctgctattgaacaacgcattgcagaagagaaagctaagagacccaaacaggaacgcaaggatgaggatgatgaaaatggcccaaagccaaacagtgacttggaagcaggaaaatctcttccatttatttatggagacattcctccagagatggtgtcagtgcccctggaggatctggacccctactatatcaataagaaaacgtttatagtattgaataaagggaaagcaatctctcgattcagtgccacccctgccctttacattttaactcccttcaaccctattagaaaattagctattaagattttggtacattctttattcaatatgctcattatgtgcacgattcttaccaactgtgtatttatgaccatgagtaaccctccagactggacaaagaatgtggagtatacctttacaggaatttatacttttgaatcacttattaaaatacttgcaaggggcttttgtttagaagatttcacatttttacgggatccatggaattggttggatttcacagtcattacttttgcatatgtgacagagtttgtggacctgggcaatgtctcagcgttgagaacattcagagttctccgagcattgaaaacaatttcagtcattccaggcctgaagaccattgtgggggccctgatccagtcagtgaagaagctttctgatgtcatgatcttgactgtgttctgtctaagcgtgtttgcgctaataggattgcagttgttcatgggcaacctacgaaataaatgtttgcaatggcctccagataattcttcctttgaaataaatatcacttccttctttaacaattcattggatgggaatggtactactttcaataggacagtgagcatatttaactgggatgaatatattgaggataaaagtcacttttattttttagaggggcaaaatgatgctctgctttgtggcaacagctcagatgcaggccagtgtcctgaaggatacatctgtgtgaaggctggtagaaaccccaactatggctacacgagctttgacacctttagttgggcctttttgtccttatttcgtctcatgactcaagacttctgggaaaacctttatcaactgacactacgtgctgctgggaaaacgtacatgatattttttgtgctggtcattttcttgggctcattctatctaataaatttgatcttggctgtggtggccatggcctatgaggaacagaatcaggccacattggaagaggctgaacagaaggaagctgaatttcagcagatgctcgaacagttgaaaaagcaacaagaagaagctcaggcggcagctgcagccgcatctgctgaatcaagagacttcagtggtgctggtgggataggagttttttcagagagttcttcagtagcatctaagttgagctccaaaagtgaaaaagagctgaaaaacagaagaaagaaaaagaaacagaaagaacagtctggagaagaagagaaaaatgacagagtccgaaaatcggaatctgaagacagcataagaagaaaaggtttccgtttttccttggaaggaagtaggctgacatatgaaaagagattttcttctccacaccagtccttactgagcatccgtggctcccttttctctccaagacgcaacagtagggcgagccttttcagcttcagaggtcgagcaaaggacattggctctgagaatgactttgctgatgatgagcacagcacctttgaggacaatgacagccgaagagactctctgttcgtgccgcacagacatggagaacggcgccacagcaatgtcagccaggccagccgtgcctccagggtgctccccatcctgcccatgaatgggaagatgcatagcgctgtggactgcaatggtgtggtctccctggtcgggggcccttctaccctcacatctgctgggcagctcctaccagagggcacaactactgaaacagaaataagaaagagacggtccagttcttatcatgtttccatggatttattggaagatcctacatcaaggcaaagagcaatgagtatagccagtattttgaccaacaccatggaagaacttgaagaatccagacagaaatgcccaccatgctggtataaatttgctaatatgtgtttgatttgggactgttgtaaaccatggttaaaggtgaaacaccttgtcaacctggttgtaatggacccatttgttgacctggccatcaccatctgcattgtcttaaatacactcttcatggctatggagcactatcccatgacggagcagttcagcagtgtactgtctgttggaaacctggtcttcacagggatcttcacagcagaaatgtttctcaagataattgccatggatccatattattactttcaagaaggctggaatatttttgatggttttattgtgagccttagtttaatggaacttggtttggcaaatgtggaaggattgtcagttctccgatcattccggctgctccgagttttcaagttggcaaaatcttggccaactctaaatatgctaattaagatcattggcaattctgtgggggctctaggaaacctcaccttggtattggccatcatcgtcttcatttttgctgtggtcggcatgcagctctttggtaagagctacaaagaatgtgtctgcaagatttccaatgattgtgaactcccacgctggcacatgcatgactttttccactccttcctgatcgtgttccgcgtgctgtgtggagagtggatagagaccatgtgggactgtatggaggtcgctggccaaaccatgtgccttactgtcttcatgatggtcatggtgattggaaatctagtggttctgaacctcttcttggccttgcttttgagttccttcagttctgacaatcttgctgccactgatgatgataacgaaatgaataatctccagattgctgtgggaaggatgcagaaaggaatcgattttgttaaaagaaaaatacgtgaatttattcagaaagcctttgttaggaagcagaaagctttagatgaaattaaaccgcttgaagatctaaataataaaaaagacagctgtatttccaaccataccaccatagaaataggcaaagacctcaattatctcaaagacggaaatggaactactagtggcataggcagcagtgtagaaaaatatgtcgtggatgaaagtgattacatgtcatttataaacaaccctagcctcactgtgacagtaccaattgctgttggagaatctgactttgaaaatttaaatactgaagaattcagcagcgagtcagatatggaggaaagcaaagagaagctaaatgcaactagttcatctgaaggcagcacggttgatattggagctcccgccgagggagaacagcctgaggttgaacctgaggaatcccttgaacctgaagcctgttttacagaagactgtgtacggaagttcaagtgttgtcagataagcatagaagaaggcaaagggaaactctggtggaatttgaggaaaacatgctataagatagtggagcacaattggttcgaaaccttcattgtcttcatgattctgctgagcagtggggctctggcctttgaagatatatacattgagcagcgaaaaaccattaagaccatgttagaatatgctgacaaggttttcacttacatattcattctggaaatgctgctaaagtgggttgcatatggttttcaagtgtattttaccaatgcctggtgctggctagacttcctgattgttgatgtctcactggttagcttaactgcaaatgccttgggttactcagaacttggtgccatcaaatccctcagaacactaagagctctgaggccactgagagctttgtcccggtttgaaggaatgagggttgttgtaaatgctcttttaggagccattccatctatcatgaatgtacttctggtttgtctgatcttttggctaatattcagtatcatgggagtgaatctctttgctggcaagttttaccattgtattaattacaccactggagagatgtttgatgtaagcgtggtcaacaactacagtgagtgcaaagctctcattgagagcaatcaaactgccaggtggaaaaatgtgaaagtaaactttgataacgtaggacttggatatctgtctctacttcaagtagccacgtttaagggatggatggatattatgtatgcagctgttgattcacgaaatgtagaattacaacccaagtatgaagacaacctgtacatgtatctttattttgtcatctttattatttttggttcattctttaccttgaatcttttcattggtgtcatcatagataacttcaaccaacagaaaaagaagtttggaggtcaagacatttttatgacagaagaacagaagaaatactacaatgcaatgaaaaaactgggttcaaagaaaccacaaaaacccatacctcgacctgctaacaaattccaaggaatggtctttgattttgtaaccaaacaagtctttgatatcagcatcatgatcctcatctgccttaacatggtcaccatgatggtggaaaccgatgaccagagtcaagaaatgacaaacattctgtactggattaatctggtgtttattgttctgttcactggagaatgtgtgctgaaactgatctctcttcgttactactatttcactattggatggaatatttttgattttgtggtggtcattctctccattgtaggaatgtttctggctgaactgatagaaaagtattttgtgtcccctaccctgttccgagtgatccgtcttgccaggattggccgaatcctacgtctgatcaaaggagcaaaggggatccgcacgctgctctttgctttgatgatgtcccttcctgcgttgtttaacatcggcctccttcttttcctggtcatgttcatctacgccatctttgggatgtccaattttgcctatgttaagagggaagttgggatcgatgacatgttcaactttgagacctttggcaacagcatgatctgcctgttccaaattacaacctctgctggctgggatggattgctagcacctattcttaatagtggacctccagactgtgaccctgacaaagatcaccctggaagctcagttaaaggagactgtgggaacccatctgttgggattttcttttttgtcagttacatcatcatatccttcctggttgtggtgaacatgtacatcgcggtcatcctggagaacttcagtgttgctactgaagaaagtgcagagcctctgagtgaggatgactttgagatgttctatgaggtttgggagaagtttgatcccgatgcgacccagtttatagagtttgccaaactttctgattttgcagatgccctggatcctcctcttctcatagcaaaacccaacaaagtccagctcattgccatggatctgcccatggtgagtggtgaccggatccactgtcttgacatcttatttgcttttacaaagcgtgttttgggtgagagtggagagatggatgcccttcgaatacagatggaagagcgattcatggcatcaaacccctccaaagtctcttatgagcccattacgaccacgttgaaacgcaaacaagaggaggtgtctgctattattatccagagggcttacagacgctacctcttgaagcaaaaagttaaaaaggtatcaagtatatacaagaaagacaaaggcaaagaatgtgatggaacacccatcaaagaagatactctcattgataaactgaatgagaattcaactccagagaaaaccgatatgacgccttccaccacgtctccaccctcgtatgatagtgtgaccaaaccagaaaaagaaaaatttgaaaaagacaaatcagaaaaggaagacaaagggaaagatatcagggaaagtaaaaagtaaaaagaaaccaagaattttccattttgtgatcaattgtttacagcccgtgatggtgatgtgtttgtgtcaacaggactcccacaggaggtctatgccaaactgactgtttttacaaatgtatacttaaggtcagtgcctataacaagacagagacctctggtcagcaaactggaactcagtaaactggagaaatagtatcgatgggaggtttctattttcacaaccagctgacactgctgaagagcagaggcgtaatggctactcagacgataggaaccaatttaaaggggggagggaagttaaatttttatgtaaattcaacatgtgacacttgataatagtaattgtcaccagtgtttatgttttaactgccacacctgccatatttttacaaaacgtgtgctgtgaatttatcacttttctttttaattcacaggttgtttactattatatgtgactatttttgtaaatgggtttgtgtttggggagagggattaaagggagggaattctacatttctctattgtattgtataactggatatattttaaatggaggcatgctgcaattctcattcacacataaaaaaatcacatcacaaaagggaagagtttacttcttgtttcaggatgtttttagatttttgaggtgcttaaatagctattcgtatttttaaggtgtctcatccagaaaaaatttaatgtgcctgtaaatgttccatagaatcacaagcattaaagagttgttttatttttacataacccattaaatgtacatgtatatatgtatatatgtatatgtgcgtgtatatacatatatatgtatacacacatgcacacacagagatatacacataccattacattgtcattcacagtcccagcagcatgactatcacatttttgataagtgtcctttggcataaaataaaaatatcctatcagtcctttctaagaagcctgaattgaccaaaaaacatccccaccaccactttataaagttgattctgctttatcctgcagtattgtttagccatcttctgctcttggtaaggttgacatagtatatgtcaatttaaaaaataaaagtctgctttgtaaatagtaattttacccagtggtgcatgtttgagcaaacaaaaatgatgatttaagcacactacttattgcatcaaatatgtaccacagtaagtatagtttgcaagctttcaacaggtaatatgatgtaattggttccattatagtttgaagctgtcactgctgcatgtttatcttgcctatgctgctgtatcttattccttccactgttcagaagtctaatatgggaagccatatatcagtggtaaagtgaagcaaattgttctaccaagacctcattcttcatgtcattaagcaataggttgcagcaaacaaggaagagcttcttgctttttattcttccaaccttaattgaacactcaatgatgaaaagcccgactgtacaaacatgttgcaagctgcttaaatctgtttaaaatatatggttagagttttctaagaaaatataaatactgtaaaaagttcattttattttatttttcagccttttgtacgtaaaatgagaaattaaaagtatcttcaggtggatgtcacagtcactattgttagtttctgttcctagcacttttaaattgaagcacttcacaaaataagaagcaaggactaggatgcagtgtaggtttctgcttttttattagtactgtaaacttgcacacatttcaatgtgaaacaaatctcaaactgagttcaatgtttatttgctttcaatagtaatgccttatcattgaaagaggcttaaagaaaaaaaaaatcagctgatactcttggcattgcttgaatccaatgtttccacctagtctttttattcagtaatcatcagtcttttccaatgtttgtttacacagatagatcttattgacccatatggcactagaactgtatcagatataatatgggatcccagctttttttcctctcccacaaaaccaggtagtgaagttatattaccagttacagcaaaatactttgtgtttcacaagcaacaataaatgtagattctttatactgaagctattgacttgtagtgtgttggtgaaatgcatgcaggaaaatgctgttaccataaagaacggtaaaccacattacaatcaagccaaaagaataaaggtttcgcttttgtttttgtatttaattgttgtctttgtttctatctttgaaatgccatttaaaggtagatttctatcatgtaaaaataatctatctgaaaaacaaatgtaaagaacacacattaattactataattcatctttcaattttttcatggaatggaagttaattaagaagagtgtattggataactactttaatattggccaaaaagctagatatggcatcaggtagactagtggaaagttacaaaaattaataaaaaattgactaacattttaaaaaaaaaaaaaaaaaa

SEQ ID NO: 317 - protein, 2005 aa, Homo sapiens
MAQSVLVPPGPDSFRFFTRESLAAIEQRIAEEKAKRPKQERKDEDDENGPKPNSDLEAGKSLPFIYGDIPPEMVSVPLEDLDPYYINKKTFIVLNKGKAISRFSATPALYILTPFNPIRKLAIKILVHSLFNMLIMCTILTNCVFMTMSNPPDWTKNVEYTFTGIYTFESLIKILARGFCLEDFTFLRDPWNWLDFTVITFAYVTEFVDLGNVSALRTFRVLRALKTISVIPGLKTIVGALIQSVKKLSDVMILTVFCLSVFALIGLQLFMGNLRNKCLQWPPDNSSFEINITSFFNNSLDGNGTTFNRTVSIFNWDEYIEDKSHFYFLEGQNDALLCGNSSDAGQCPEGYICVKAGRNPNYGYTSFDTFSWAFLSLFRLMTQDFWENLYQLTLRAAGKTYMIFFVLVIFLGSFYLINLILAVVAMAYEEQNQATLEEAEQKEAEFQQMLEQLKKQQEEAQAAAAAASAESRDFSGAGGIGVFSESSSVASKLSSKSEKELKNRRKKKKQKEQSGEEEKNDRVRKSESEDSIRRKGFRFSLEGSRLTYEKRFSSPHQSLLSIRGSLFSPRRNSRASLFSFRGRAKDIGSENDFADDEHSTFEDNDSRRDSLFVPHRHGERRHSNVSQASRASRVLPILPMNGKMHSAVDCNGVVSLVGGPSTLTSAGQLLPEGTTTETEIRKRRSSSYHVSMDLLEDPTSRQRAMSIASILTNTMEELEESRQKCPPCWYKFANMCLIWDCCKPWLKVKHLVNLVVMDPFVDLAITICIVLNTLFMAMEHYPMTEQFSSVLSVGNLVFTGIFTAEMFLKIIAMDPYYYFQEGWNIFDGFIVSLSLMELGLANVEGLSVLRSFRLLRVFKLAKSWPTLNMLIKIIGNSVGALGNLTLVLAIIVFIFAVVGMQLFGKSYKECVCKISNDCELPRWHMHDFFHSFLIVFRVLCGEWIETMWDCMEVAGQTMCLTVFMMVMVIGNLVVLNLFLALLLSSFSSDNLAATDDDNEMNNLQIAVGRMQKGIDFVKRKIREFIQKAFVRKQKALDEIKPLEDLNNKKDSCISNHTTIEIGKDLNYLKDGNGTTSGIGSSVEKYVVDESDYMSFINNPSLTVTVPIAVGESDFENLNTEEFSSESDMEESKEKLNATSSSEGSTVDIGAPAEGEQPEVEPEESLEPEACFTEDCVRKFKCCQISIEEGKGKLWWNLRKTCYKIVEHNWFETFIVFMILLSSGALAFEDIYIEQRKTIKTMLEYADKVFTYIFILEMLLKWVAYGFQVYFTNAWCWLDFLIVDVSLVSLTANALGYSELGAIKSLRTLRALRPLRALSRFEGMRVVVNALLGAIPSIMNVLLVCLIFWLIFSIMGVNLFAGKFYHCINYTTGEMFDVSVVNNYSECKALIESNQTARWKNVKVNFDNVGLGYLSLLQVATFKGWMDIMYAAVDSRNVELQPKYEDNLYMYLYFVIFIIFGSFFTLNLFIGVIIDNFNQQKKKFGGQDIFMTEEQKKYYNAMKKLGSKKPQKPIPRPANKFQGMVFDFVTKQVFDISIMILICLNMVTMMVETDDQSQEMTNILYWINLVFIVLFTGECVLKLISLRYYYFTIGWNIFDFVVVILSIVGMFLAELIEKYFVSPTLFRVIRLARIGRILRLIKGAKGIRTLLFALMMSLPALFNIGLLLFLVMFIYAIFGMSNFAYVKREVGIDDMFNFETFGNSMICLFQITTSAGWDGLLAPILNSGPPDCDPDKDHPGSSVKGDCGNPSVGIFFFVSYIIISFLVVVNMYIAVILENFSVATEESAEPLSEDDFEMFYEVWEKFDPDATQFIEFAKLSDFADALDPPLLIAKPNKVQLIAMDLPMVSGDRIHCLDILFAFTKRVLGESGEMDALRIQMEERFMASNPSKVSYEPITTTLKRKQEEVSAIIIQRAYRRYLLKQKVKKVSSIYKKDKGKECDGTPIKEDTLIDKLNENSTPEKTDMTPSTTSPPSYDSVTKPEKEKFEKDKSEKEDKGKDIRESKK

SEQ ID NO: 318 - DNA, 8571 bp, Homo sapiens
cactttcttatgcaaggagctaaacagtgattaaaggagcaggatgaaaagatggcacagtcagtgctggtaccgccaggacctgacagcttccgcttctttaccagggaatcccttgctgctattgaacaacgcattgcagaagagaaagctaagagacccaaacaggaacgcaaggatgaggatgatgaaaatggcccaaagccaaacagtgacttggaagcaggaaaatctcttccatttatttatggagacattcctccagagatggtgtcagtgcccctggaggatctggacccctactatatcaataagaaaacgtttatagtattgaataaagggaaagcaatctctcgattcagtgccacccctgccctttacattttaactcccttcaaccctattagaaaattagctattaagattttggtacattctttattcaatatgctcattatgtgcacgattcttaccaactgtgtatttatgaccatgagtaaccctccagactggacaaagaatgtggagtatacctttacaggaatttatacttttgaatcacttattaaaatacttgcaaggggcttttgtttagaagatttcacatttttacgggatccatggaattggttggatttcacagtcattacttttgcgtatgtaacagaatttgtaaacctaggcaatgtttcagctcttcgaactttcagagtcttgagagctttgaaaactatttctgtaattccaggcctgaagaccattgtgggggccctgatccagtcagtgaagaagctttctgatgtcatgatcttgactgtgttctgtctaagcgtgtttgcgctaataggattgcagttgttcatgggcaacctacgaaataaatgtttgcaatggcctccagataattcttcctttgaaataaatatcacttccttctttaacaattcattggatgggaatggtactactttcaataggacagtgagcatatttaactgggatgaatatattgaggataaaagtcacttttattttttagaggggcaaaatgatgctctgctttgtggcaacagctcagatgcaggccagtgtcctgaaggatacatctgtgtgaaggctggtagaaaccccaactatggctacacgagctttgacacctttagttgggcctttttgtccttatttcgtctcatgactcaagacttctgggaaaacctttatcaactgacactacgtgctgctgggaaaacgtacatgatattttttgtgctggtcattttcttgggctcattctatctaataaatttgatcttggctgtggtggccatggcctatgaggaacagaatcaggccacattggaagaggctgaacagaaggaagctgaatttcagcagatgctcgaacagttgaaaaagcaacaagaagaagctcaggcggcagctgcagccgcatctgctgaatcaagagacttcagtggtgctggtgggataggagttttttcagagagttcttcagtagcatctaagttgagctccaaaagtgaaaaagagctgaaaaacagaagaaagaaaaagaaacagaaagaacagtctggagaagaagagaaaaatgacagagtccgaaaatcggaatctgaagacagcataagaagaaaaggtttccgtttttccttggaaggaagtaggctgacatatgaaaagagattttcttctccacaccagtccttactgagcatccgtggctcccttttctctccaagacgcaacagtagggcgagccttttcagcttcagaggtcgagcaaaggacattggctctgagaatgactttgctgatgatgagcacagcacctttgaggacaatgacagccgaagagactctctgttcgtgccgcacagacatggagaacggcgccacagcaatgtcagccaggccagccgtgcctccagggtgctccccatcctgcccatgaatgggaagatgcatagcgctgtggactgcaatggtgtggtctccctggtcgggggcccttctaccctcacatctgctgggcagctcctaccagagggcacaactactgaaacagaaataagaaagagacggtccagttcttatcatgtttccatggatttattggaagatcctacatcaaggcaaagagcaatgagtatagccagtattttgaccaacaccatggaagaacttgaagaatccagacagaaatgcccaccatgctggtataaatttgctaatatgtgtttgatttgggactgttgtaaaccatggttaaaggtgaaacaccttgtcaacctggttgtaatggacccatttgttgacctggccatcaccatctgcattgtcttaaatacactcttcatggctatggagcactatcccatgacggagcagttcagcagtgtactgtctgttggaaacctggtcttcacagggatcttcacagcagaaatgtttctcaagataattgccatggatccatattattactttcaagaaggctggaatatttttgatggttttattgtgagccttagtttaatggaacttggtttggcaaatgtggaaggattgtcagttctccgatcattccggctgctccgagttttcaagttggcaaaatcttggccaactctaaatatgctaattaagatcattggcaattctgtgggggctctaggaaacctcaccttggtattggccatcatcgtcttcatttttgctgtggtcggcatgcagctctttggtaagagctacaaagaatgtgtctgcaagatttccaatgattgtgaactcccacgctggcacatgcatgactttttccactccttcctgatcgtgttccgcgtgctgtgtggagagtggatagagaccatgtgggactgtatggaggtcgctggccaaaccatgtgccttactgtcttcatgatggtcatggtgattggaaatctagtggttctgaacctcttcttggccttgcttttgagttccttcagttctgacaatcttgctgccactgatgatgataacgaaatgaataatctccagattgctgtgggaaggatgcagaaaggaatcgattttgttaaaagaaaaatacgtgaatttattcagaaagcctttgttaggaagcagaaagctttagatgaaattaaaccgcttgaagatctaaataataaaaaagacagctgtatttccaaccataccaccatagaaataggcaaagacctcaattatctcaaagacggaaatggaactactagtggcataggcagcagtgtagaaaaatatgtcgtggatgaaagtgattacatgtcatttataaacaaccctagcctcactgtgacagtaccaattgctgttggagaatctgactttgaaaatttaaatactgaagaattcagcagcgagtcagatatggaggaaagcaaagagaagctaaatgcaactagttcatctgaaggcagcacggttgatattggagctcccgccgagggagaacagcctgaggttgaacctgaggaatcccttgaacctgaagcctgttttacagaagactgtgtacggaagttcaagtgttgtcagataagcatagaagaaggcaaagggaaactctggtggaatttgaggaaaacatgctataagatagtggagcacaattggttcgaaaccttcattgtcttcatgattctgctgagcagtggggctctggcctttgaagatatatacattgagcagcgaaaaaccattaagaccatgttagaatatgctgacaaggttttcacttacatattcattctggaaatgctgctaaagtgggttgcatatggttttcaagtgtattttaccaatgcctggtgctggctagacttcctgattgttgatgtctcactggttagcttaactgcaaatgccttgggttactcagaacttggtgccatcaaatccctcagaacactaagagctctgaggccactgagagctttgtcccggtttgaaggaatgagggttgttgtaaatgctcttttaggagccattccatctatcatgaatgtacttctggtttgtctgatcttttggctaatattcagtatcatgggagtgaatctctttgctggcaagttttaccattgtattaattacaccactggagagatgtttgatgtaagcgtggtcaacaactacagtgagtgcaaagctctcattgagagcaatcaaactgccaggtggaaaaatgtgaaagtaaactttgataacgtaggacttggatatctgtctctacttcaagtagccacgtttaagggatggatggatattatgtatgcagctgttgattcacgaaatgtagaattacaacccaagtatgaagacaacctgtacatgtatctttattttgtcatctttattatttttggttcattctttaccttgaatcttttcattggtgtcatcatagataacttcaaccaacagaaaaagaagtttggaggtcaagacatttttatgacagaagaacagaagaaatactacaatgcaatgaaaaaactgggttcaaagaaaccacaaaaacccatacctcgacctgctaacaaattccaaggaatggtctttgattttgtaaccaaacaagtctttgatatcagcatcatgatcctcatctgccttaacatggtcaccatgatggtggaaaccgatgaccagagtcaagaaatgacaaacattctgtactggattaatctggtgtttattgttctgttcactggagaatgtgtgctgaaactgatctctcttcgttactactatttcactattggatggaatatttttgattttgtggtggtcattctctccattgtaggaatgtttctggctgaactgatagaaaagtattttgtgtcccctaccctgttccgagtgatccgtcttgccaggattggccgaatcctacgtctgatcaaaggagcaaaggggatccgcacgctgctctttgctttgatgatgtcccttcctgcgttgtttaacatcggcctccttcttttcctggtcatgttcatctacgccatctttgggatgtccaattttgcctatgttaagagggaagttgggatcgatgacatgttcaactttgagacctttggcaacagcatgatctgcctgttccaaattacaacctctgctggctgggatggattgctagcacctattcttaatagtggacctccagactgtgaccctgacaaagatcaccctggaagctcagttaaaggagactgtgggaacccatctgttgggattttcttttttgtcagttacatcatcatatccttcctggttgtggtgaacatgtacatcgcggtcatcctggagaacttcagtgttgctactgaagaaagtgcagagcctctgagtgaggatgactttgagatgttctatgaggtttgggagaagtttgatcccgatgcgacccagtttatagagtttgccaaactttctgattttgcagatgccctggatcctcctcttctcatagcaaaacccaacaaagtccagctcattgccatggatctgcccatggtgagtggtgaccggatccactgtcttgacatcttatttgcttttacaaagcgtgttttgggtgagagtggagagatggatgcccttcgaatacagatggaagagcgattcatggcatcaaacccctccaaagtctcttatgagcccattacgaccacgttgaaacgcaaacaagaggaggtgtctgctattattatccagagggcttacagacgctacctcttgaagcaaaaagttaaaaaggtatcaagtatatacaagaaagacaaaggcaaagaatgtgatggaacacccatcaaagaagatactctcattgataaactgaatgagaattcaactccagagaaaaccgatatgacgccttccaccacgtctccaccctcgtatgatagtgtgaccaaaccagaaaaagaaaaatttgaaaaagacaaatcagaaaaggaagacaaagggaaagatatcagggaaagtaaaaagtaaaaagaaaccaagaattttccattttgtgatcaattgtttacagcccgtgatggtgatgtgtttgtgtcaacaggactcccacaggaggtctatgccaaactgactgtttttacaaatgtatacttaaggtcagtgcctataacaagacagagacctctggtcagcaaactggaactcagtaaactggagaaatagtatcgatgggaggtttctattttcacaaccagctgacactgctgaagagcagaggcgtaatggctactcagacgataggaaccaatttaaaggggggagggaagttaaatttttatgtaaattcaacatgtgacacttgataatagtaattgtcaccagtgtttatgttttaactgccacacctgccatatttttacaaaacgtgtgctgtgaatttatcacttttctttttaattcacaggttgtttactattatatgtgactatttttgtaaatgggtttgtgtttggggagagggattaaagggagggaattctacatttctctattgtattgtataactggatatattttaaatggaggcatgctgcaattctcattcacacataaaaaaatcacatcacaaaagggaagagtttacttcttgtttcaggatgtttttagatttttgaggtgcttaaatagctattcgtatttttaaggtgtctcatccagaaaaaatttaatgtgcctgtaaatgttccatagaatcacaagcattaaagagttgttttatttttacataacccattaaatgtacatgtatatatgtatatatgtatatgtgcgtgtatatacatatatatgtatacacacatgcacacacagagatatacacataccattacattgtcattcacagtcccagcagcatgactatcacatttttgataagtgtcctttggcataaaataaaaatatcctatcagtcctttctaagaagcctgaattgaccaaaaaacatccccaccaccactttataaagttgattctgctttatcctgcagtattgtttagccatcttctgctcttggtaaggttgacatagtatatgtcaatttaaaaaataaaagtctgctttgtaaatagtaattttacccagtggtgcatgtttgagcaaacaaaaatgatgatttaagcacactacttattgcatcaaatatgtaccacagtaagtatagtttgcaagctttcaacaggtaatatgatgtaattggttccattatagtttgaagctgtcactgctgcatgtttatcttgcctatgctgctgtatcttattccttccactgttcagaagtctaatatgggaagccatatatcagtggtaaagtgaagcaaattgttctaccaagacctcattcttcatgtcattaagcaataggttgcagcaaacaaggaagagcttcttgctttttattcttccaaccttaattgaacactcaatgatgaaaagcccgactgtacaaacatgttgcaagctgcttaaatctgtttaaaatatatggttagagttttctaagaaaatataaatactgtaaaaagttcattttattttatttttcagccttttgtacgtaaaatgagaaattaaaagtatcttcaggtggatgtcacagtcactattgttagtttctgttcctagcacttttaaattgaagcacttcacaaaataagaagcaaggactaggatgcagtgtaggtttctgcttttttattagtactgtaaacttgcacacatttcaatgtgaaacaaatctcaaactgagttcaatgtttatttgctttcaatagtaatgccttatcattgaaagaggcttaaagaaaaaaaaaatcagctgatactcttggcattgcttgaatccaatgtttccacctagtctttttattcagtaatcatcagtcttttccaatgtttgtttacacagatagatcttattgacccatatggcactagaactgtatcagatataatatgggatcccagctttttttcctctcccacaaaaccaggtagtgaagttatattaccagttacagcaaaatactttgtgtttcacaagcaacaataaatgtagattctttatactgaagctattgacttgtagtgtgttggtgaaatgcatgcaggaaaatgctgttaccataaagaacggtaaaccacattacaatcaagccaaaagaataaaggtttcgcttttgtttttgtatttaattgttgtctttgtttctatctttgaaatgccatttaaaggtagatttctatcatgtaaaaataatctatctgaaaaacaaatgtaaagaacacacattaattactataattcatctttcaattttttcatggaatggaagttaattaagaagagtgtattggataactactttaatattggccaaaaagctagatatggcatcaggtagactagtggaaagttacaaaaattaataaaaaattgactaacattttaaaaaaaaaaaaaaaaaa

SEQ ID NO: 319 - protein, 2005 aa, Homo sapiens
MAQSVLVPPGPDSFRFFTRESLAAIEQRIAEEKAKRPKQERKDEDDENGPKPNSDLEAGKSLPFIYGDIPPEMVSVPLEDLDPYYINKKTFIVLNKGKAISRFSATPALYILTPFNPIRKLAIKILVHSLFNMLIMCTILTNCVFMTMSNPPDWTKNVEYTFTGIYTFESLIKILARGFCLEDFTFLRDPWNWLDFTVITFAYVTEFVNLGNVSALRTFRVLRALKTISVIPGLKTIVGALIQSVKKLSDVMILTVFCLSVFALIGLQLFMGNLRNKCLQWPPDNSSFEINITSFFNNSLDGNGTTFNRTVSIFNWDEYIEDKSHFYFLEGQNDALLCGNSSDAGQCPEGYICVKAGRNPNYGYTSFDTFSWAFLSLFRLMTQDFWENLYQLTLRAAGKTYMIFFVLVIFLGSFYLINLILAVVAMAYEEQNQATLEEAEQKEAEFQQMLEQLKKQQEEAQAAAAAASAESRDFSGAGGIGVFSESSSVASKLSSKSEKELKNRRKKKKQKEQSGEEEKNDRVRKSESEDSIRRKGFRFSLEGSRLTYEKRFSSPHQSLLSIRGSLFSPRRNSRASLFSFRGRAKDIGSENDFADDEHSTFEDNDSRRDSLFVPHRHGERRHSNVSQASRASRVLPILPMNGKMHSAVDCNGVVSLVGGPSTLTSAGQLLPEGTTTETEIRKRRSSSYHVSMDLLEDPTSRQRAMSIASILTNTMEELEESRQKCPPCWYKFANMCLIWDCCKPWLKVKHLVNLVVMDPFVDLAITICIVLNTLFMAMEHYPMTEQFSSVLSVGNLVFTGIFTAEMFLKIIAMDPYYYFQEGWNIFDGFIVSLSLMELGLANVEGLSVLRSFRLLRVFKLAKSWPTLNMLIKIIGNSVGALGNLTLVLAIIVFIFAVVGMQLFGKSYKECVCKISNDCELPRWHMHDFFHSFLIVFRVLCGEWIETMWDCMEVAGQTMCLTVFMMVMVIGNLVVLNLFLALLLSSFSSDNLAATDDDNEMNNLQIAVGRMQKGIDFVKRKIREFIQKAFVRKQKALDEIKPLEDLNNKKDSCISNHTTIEIGKDLNYLKDGNGTTSGIGSSVEKYVVDESDYMSFINNPSLTVTVPIAVGESDFENLNTEEFSSESDMEESKEKLNATSSSEGSTVDIGAPAEGEQPEVEPEESLEPEACFTEDCVRKFKCCQISIEEGKGKLWWNLRKTCYKIVEHNWFETFIVFMILLSSGALAFEDIYIEQRKTIKTMLEYADKVFTYIFILEMLLKWVAYGFQVYFTNAWCWLDFLIVDVSLVSLTANALGYSELGAIKSLRTLRALRPLRALSRFEGMRVVVNALLGAIPSIMNVLLVCLIFWLIFSIMGVNLFAGKFYHCINYTTGEMFDVSVVNNYSECKALIESNQTARWKNVKVNFDNVGLGYLSLLQVATFKGWMDIMYAAVDSRNVELQPKYEDNLYMYLYFVIFIIFGSFFTLNLFIGVIIDNFNQQKKKFGGQDIFMTEEQKKYYNAMKKLGSKKPQKPIPRPANKFQGMVFDFVTKQVFDISIMILICLNMVTMMVETDDQSQEMTNILYWINLVFIVLFTGECVLKLISLRYYYFTIGWNIFDFVVVILSIVGMFLAELIEKYFVSPTLFRVIRLARIGRILRLIKGAKGIRTLLFALMMSLPALFNIGLLLFLVMFIYAIFGMSNFAYVKREVGIDDMFNFETFGNSMICLFQITTSAGWDGLLAPILNSGPPDCDPDKDHPGSSVKGDCGNPSVGIFFFVSYIIISFLVVVNMYIAVILENFSVATEESAEPLSEDDFEMFYEVWEKFDPDATQFIEFAKLSDFADALDPPLLIAKPNKVQLIAMDLPMVSGDRIHCLDILFAFTKRVLGESGEMDALRIQMEERFMASNPSKVSYEPITTTLKRKQEEVSAIIIQRAYRRYLLKQKVKKVSSIYKKDKGKECDGTPIKEDTLIDKLNENSTPEKTDMTPSTTSPPSYDSVTKPEKEKFEKDKSEKEDKGKDIRESKK

SEQ ID NO: 320 - DNA, 8876 bp, Homo sapiens
ggctgcttcagacatatgtctgtgtgtacgctgtgaaggtgtttctcttcacagttccccgccctctagtggtagttacaataatgccattttgtagtccctgtacaggaaatgcctcttcttacttcagttaccagaatccttttacaggaagttaggtgtggtctttgaaggagaattaaaaaaaaaaaaaaaaaaaaaaaaaaaagatttttttttttttaaagcatgatggaattttagctgcagtcttcttggtgccagcttatcaatcccaaactctgggtgtaaaagattctacagggcactttcttatgcaaggagctaaacagtgattaaaggagcaggatgaaaagatggcacagtcagtgctggtaccgccaggacctgacagcttccgcttctttaccagggaatcccttgctgctattgaacaacgcattgcagaagagaaagctaagagacccaaacaggaacgcaaggatgaggatgatgaaaatggcccaaagccaaacagtgacttggaagcaggaaaatctcttccatttatttatggagacattcctccagagatggtgtcagtgcccctggaggatctggacccctactatatcaataagaaaacgtttatagtattgaataaagggaaagcaatctctcgattcagtgccacccctgccctttacattttaactcccttcaaccctattagaaaattagctattaagattttggtacattctttattcaatatgctcattatgtgcacgattcttaccaactgtgtatttatgaccatgagtaaccctccagactggacaaagaatgtggagtatacctttacaggaatttatacttttgaatcacttattaaaatacttgcaaggggcttttgtttagaagatttcacatttttacgggatccatggaattggttggatttcacagtcattacttttgcatatgtgacagagtttgtggacctgggcaatgtctcagcgttgagaacattcagagttctccgagcattgaaaacaatttcagtcattccaggcctgaagaccattgtgggggccctgatccagtcagtgaagaagctttctgatgtcatgatcttgactgtgttctgtctaagcgtgtttgcgctaataggattgcagttgttcatgggcaacctacgaaataaatgtttgcaatggcctccagataattcttcctttgaaataaatatcacttccttctttaacaattcattggatgggaatggtactactttcaataggacagtgagcatatttaactgggatgaatatattgaggataaaagtcacttttattttttagaggggcaaaatgatgctctgctttgtggcaacagctcagatgcaggccagtgtcctgaaggatacatctgtgtgaaggctggtagaaaccccaactatggctacacgagctttgacacctttagttgggcctttttgtccttatttcgtctcatgactcaagacttctgggaaaacctttatcaactgacactacgtgctgctgggaaaacgtacatgatattttttgtgctggtcattttcttgggctcattctatctaataaatttgatcttggctgtggtggccatggcctatgaggaacagaatcaggccacattggaagaggctgaacagaaggaagctgaatttcagcagatgctcgaacagttgaaaaagcaacaagaagaagctcaggcggcagctgcagccgcatctgctgaatcaagagacttcagtggtgctggtgggataggagttttttcagagagttcttcagtagcatctaagttgagctccaaaagtgaaaaagagctgaaaaacagaagaaagaaaaagaaacagaaagaacagtctggagaagaagagaaaaatgacagagtccgaaaatcggaatctgaagacagcataagaagaaaaggtttccgtttttccttggaaggaagtaggctgacatatgaaaagagattttcttctccacaccagtccttactgagcatccgtggctcccttttctctccaagacgcaacagtagggcgagccttttcagcttcagaggtcgagcaaaggacattggctctgagaatgactttgctgatgatgagcacagcacctttgaggacaatgacagccgaagagactctctgttcgtgccgcacagacatggagaacggcgccacagcaatgtcagccaggccagccgtgcctccagggtgctccccatcctgcccatgaatgggaagatgcatagcgctgtggactgcaatggtgtggtctccctggtcgggggcccttctaccctcacatctgctgggcagctcctaccagagggcacaactactgaaacagaaataagaaagagacggtccagttcttatcatgtttccatggatttattggaagatcctacatcaaggcaaagagcaatgagtatagccagtattttgaccaacaccatggaagaacttgaagaatccagacagaaatgcccaccatgctggtataaatttgctaatatgtgtttgatttgggactgttgtaaaccatggttaaaggtgaaacaccttgtcaacctggttgtaatggacccatttgttgacctggccatcaccatctgcattgtcttaaatacactcttcatggctatggagcactatcccatgacggagcagttcagcagtgtactgtctgttggaaacctggtcttcacagggatcttcacagcagaaatgtttctcaagataattgccatggatccatattattactttcaagaaggctggaatatttttgatggttttattgtgagccttagtttaatggaacttggtttggcaaatgtggaaggattgtcagttctccgatcattccggctgctccgagttttcaagttggcaaaatcttggccaactctaaatatgctaattaagatcattggcaattctgtgggggctctaggaaacctcaccttggtattggccatcatcgtcttcatttttgctgtggtcggcatgcagctctttggtaagagctacaaagaatgtgtctgcaagatttccaatgattgtgaactcccacgctggcacatgcatgactttttccactccttcctgatcgtgttccgcgtgctgtgtggagagtggatagagaccatgtgggactgtatggaggtcgctggccaaaccatgtgccttactgtcttcatgatggtcatggtgattggaaatctagtggttctgaacctcttcttggccttgcttttgagttccttcagttctgacaatcttgctgccactgatgatgataacgaaatgaataatctccagattgctgtgggaaggatgcagaaaggaatcgattttgttaaaagaaaaatacgtgaatttattcagaaagcctttgttaggaagcagaaagctttagatgaaattaaaccgcttgaagatctaaataataaaaaagacagctgtatttccaaccataccaccatagaaataggcaaagacctcaattatctcaaagacggaaatggaactactagtggcataggcagcagtgtagaaaaatatgtcgtggatgaaagtgattacatgtcatttataaacaaccctagcctcactgtgacagtaccaattgctgttggagaatctgactttgaaaatttaaatactgaagaattcagcagcgagtcagatatggaggaaagcaaagagaagctaaatgcaactagttcatctgaaggcagcacggttgatattggagctcccgccgagggagaacagcctgaggttgaacctgaggaatcccttgaacctgaagcctgttttacagaagactgtgtacggaagttcaagtgttgtcagataagcatagaagaaggcaaagggaaactctggtggaatttgaggaaaacatgctataagatagtggagcacaattggttcgaaaccttcattgtcttcatgattctgctgagcagtggggctctggcctttgaagatatatacattgagcagcgaaaaaccattaagaccatgttagaatatgctgacaaggttttcacttacatattcattctggaaatgctgctaaagtgggttgcatatggttttcaagtgtattttaccaatgcctggtgctggctagacttcctgattgttgatgtctcactggttagcttaactgcaaatgccttgggttactcagaacttggtgccatcaaatccctcagaacactaagagctctgaggccactgagagctttgtcccggtttgaaggaatgagggttgttgtaaatgctcttttaggagccattccatctatcatgaatgtacttctggtttgtctgatcttttggctaatattcagtatcatgggagtgaatctctttgctggcaagttttaccattgtattaattacaccactggagagatgtttgatgtaagcgtggtcaacaactacagtgagtgcaaagctctcattgagagcaatcaaactgccaggtggaaaaatgtgaaagtaaactttgataacgtaggacttggatatctgtctctacttcaagtagccacgtttaagggatggatggatattatgtatgcagctgttgattcacgaaatgtagaattacaacccaagtatgaagacaacctgtacatgtatctttattttgtcatctttattatttttggttcattctttaccttgaatcttttcattggtgtcatcatagataacttcaaccaacagaaaaagaagtttggaggtcaagacatttttatgacagaagaacagaagaaatactacaatgcaatgaaaaaactgggttcaaagaaaccacaaaaacccatacctcgacctgctaacaaattccaaggaatggtctttgattttgtaaccaaacaagtctttgatatcagcatcatgatcctcatctgccttaacatggtcaccatgatggtggaaaccgatgaccagagtcaagaaatgacaaacattctgtactggattaatctggtgtttattgttctgttcactggagaatgtgtgctgaaactgatctctcttcgttactactatttcactattggatggaatatttttgattttgtggtggtcattctctccattgtaggaatgtttctggctgaactgatagaaaagtattttgtgtcccctaccctgttccgagtgatccgtcttgccaggattggccgaatcctacgtctgatcaaaggagcaaaggggatccgcacgctgctctttgctttgatgatgtcccttcctgcgttgtttaacatcggcctccttcttttcctggtcatgttcatctacgccatctttgggatgtccaattttgcctatgttaagagggaagttgggatcgatgacatgttcaactttgagacctttggcaacagcatgatctgcctgttccaaattacaacctctgctggctgggatggattgctagcacctattcttaatagtggacctccagactgtgaccctgacaaagatcaccctggaagctcagttaaaggagactgtgggaacccatctgttgggattttcttttttgtcagttacatcatcatatccttcctggttgtggtgaacatgtacatcgcggtcatcctggagaacttcagtgttgctactgaagaaagtgcagagcctctgagtgaggatgactttgagatgttctatgaggtttgggagaagtttgatcccgatgcgacccagtttatagagtttgccaaactttctgattttgcagatgccctggatcctcctcttctcatagcaaaacccaacaaagtccagctcattgccatggatctgcccatggtgagtggtgaccggatccactgtcttgacatcttatttgcttttacaaagcgtgttttgggtgagagtggagagatggatgcccttcgaatacagatggaagagcgattcatggcatcaaacccctccaaagtctcttatgagcccattacgaccacgttgaaacgcaaacaagaggaggtgtctgctattattatccagagggcttacagacgctacctcttgaagcaaaaagttaaaaaggtatcaagtatatacaagaaagacaaaggcaaagaatgtgatggaacacccatcaaagaagatactctcattgataaactgaatgagaattcaactccagagaaaaccgatatgacgccttccaccacgtctccaccctcgtatgatagtgtgaccaaaccagaaaaagaaaaatttgaaaaagacaaatcagaaaaggaagacaaagggaaagatatcagggaaagtaaaaagtaaaaagaaaccaagaattttccattttgtgatcaattgtttacagcccgtgatggtgatgtgtttgtgtcaacaggactcccacaggaggtctatgccaaactgactgtttttacaaatgtatacttaaggtcagtgcctataacaagacagagacctctggtcagcaaactggaactcagtaaactggagaaatagtatcgatgggaggtttctattttcacaaccagctgacactgctgaagagcagaggcgtaatggctactcagacgataggaaccaatttaaaggggggagggaagttaaatttttatgtaaattcaacatgtgacacttgataatagtaattgtcaccagtgtttatgttttaactgccacacctgccatatttttacaaaacgtgtgctgtgaatttatcacttttctttttaattcacaggttgtttactattatatgtgactatttttgtaaatgggtttgtgtttggggagagggattaaagggagggaattctacatttctctattgtattgtataactggatatattttaaatggaggcatgctgcaattctcattcacacataaaaaaatcacatcacaaaagggaagagtttacttcttgtttcaggatgtttttagatttttgaggtgcttaaatagctattcgtatttttaaggtgtctcatccagaaaaaatttaatgtgcctgtaaatgttccatagaatcacaagcattaaagagttgttttatttttacataacccattaaatgtacatgtatatatgtatatatgtatatgtgcgtgtatatacatatatatgtatacacacatgcacacacagagatatacacataccattacattgtcattcacagtcccagcagcatgactatcacatttttgataagtgtcctttggcataaaataaaaatatcctatcagtcctttctaagaagcctgaattgaccaaaaaacatccccaccaccactttataaagttgattctgctttatcctgcagtattgtttagccatcttctgctcttggtaaggttgacatagtatatgtcaatttaaaaaataaaagtctgctttgtaaatagtaattttacccagtggtgcatgtttgagcaaacaaaaatgatgatttaagcacactacttattgcatcaaatatgtaccacagtaagtatagtttgcaagctttcaacaggtaatatgatgtaattggttccattatagtttgaagctgtcactgctgcatgtttatcttgcctatgctgctgtatcttattccttccactgttcagaagtctaatatgggaagccatatatcagtggtaaagtgaagcaaattgttctaccaagacctcattcttcatgtcattaagcaataggttgcagcaaacaaggaagagcttcttgctttttattcttccaaccttaattgaacactcaatgatgaaaagcccgactgtacaaacatgttgcaagctgcttaaatctgtttaaaatatatggttagagttttctaagaaaatataaatactgtaaaaagttcattttattttatttttcagccttttgtacgtaaaatgagaaattaaaagtatcttcaggtggatgtcacagtcactattgttagtttctgttcctagcacttttaaattgaagcacttcacaaaataagaagcaaggactaggatgcagtgtaggtttctgcttttttattagtactgtaaacttgcacacatttcaatgtgaaacaaatctcaaactgagttcaatgtttatttgctttcaatagtaatgccttatcattgaaagaggcttaaagaaaaaaaaaatcagctgatactcttggcattgcttgaatccaatgtttccacctagtctttttattcagtaatcatcagtcttttccaatgtttgtttacacagatagatcttattgacccatatggcactagaactgtatcagatataatatgggatcccagctttttttcctctcccacaaaaccaggtagtgaagttatattaccagttacagcaaaatactttgtgtttcacaagcaacaataaatgtagattctttatactgaagctattgacttgtagtgtgttggtgaaatgcatgcaggaaaatgctgttaccataaagaacggtaaaccacattacaatcaagccaaaagaataaaggtttcgcttttgtttttgtatttaattgttgtctttgtttctatctttgaaatgccatttaaaggtagatttctatcatgtaaaaataatctatctgaaaaacaaatgtaaagaacacacattaattactataattcatctttcaattttttcatggaatggaagttaattaagaagagtgtattggataactactttaatattggccaaaaagctagatatggcatcaggtagactagtggaaagttacaaaaattaataaaaaattgactaacattttaaaaaaaaaaaaaaaaaa

SEQ ID NO: 321 - protein, 2005 aa, Homo sapiens; identical to SEQ ID NO: 317

SEQ ID NO: 322 - DNA, 1965 bp, Homo sapiens
gtgccagtgagaagcacaggccaccactctgccctggtccacacaagctccggtagcccatggagccctggcctctcctcctgctctttagcctttgctcagctggcctcgtcctgggctccgaacatgagacccgtctggtggcaaagctatttaaagactacagcagcgtggtgcggccagtggaagaccaccgccaggtcgtggaggtcaccgtgggcctgcagctgatacagctcatcaatgtggatgaagtaaatcagatcgtgacaaccaatgtgcgtctgaaacagcaatgggtggattacaacctaaaatggaatccagatgactatggcggtgtgaaaaaaattcacattccttcagaaaagatctggcgcccagaccttgttctctataacaatgcagatggtgactttgctattgtcaagttcaccaaagtgctcctgcagtacactggccacatcacgtggacacctccagccatctttaaaagctactgtgagatcatcgtcacccactttccctttgatgaacagaactgcagcatgaagctgggcacctggacctacgacggctctgtcgtggccatcaacccggaaagcgaccagccagacctgagcaacttcatggagagcggggagtgggtgatcaaggagtcccggggctggaagcactccgtgacctattcctgctgccccgacaccccctacctggacatcacctaccacttcgtcatgcagcgcctgcccctctacttcatcgtcaacgtcatcatcccctgcctgctcttctccttcttaactggcctggtattctacctgcccacagactcaggggagaagatgactctgagcatctctgtcttactgtctttgactgtgttccttctggtcatcgtggagctgatcccctccacgtccagtgctgtgcccttgattggaaaatacatgctgttcaccatggtgttcgtcattgcctccatcatcatcactgtcatcgtcatcaacacacaccaccgctcacccagcacccatgtcatgcccaactgggtgcggaaggtttttatcgacactatcccaaatatcatgtttttctccacaatgaaaagaccatccagagaaaagcaagacaaaaagatttttacagaagacattgatatctctgacatttctggaaagccagggcctccacccatgggcttccactctcccctgatcaaacaccccgaggtgaaaagtgccatcgagggcatcaagtacatcgcagagaccatgaagtcagaccaggagtctaacaatgcggcggcagagtggaagtacgttgcaatggtgatggaccacatactcctcggagtcttcatgcttgtttgcatcatcggaaccctagccgtgtttgcaggtcgactcattgaattaaatcagcaaggatgagcagaaaatgagctgagcttagctctgccctggaacctaccagagcagagaagggcaggagaggaagatttgtctacttgctccactcgcacttatcaaacgtgttatattccatacttattattgatgataagatttacctttatgtaagtttatggccttgaagtgttttcatattgcttctccctttagttctgctgtctccctgaagagtgaaccctctttagtaaatgaaactaatcactaaaaaaagtgttcatttccagtgtctggaagagtttttgccaggataaccgaggttttctgttgcattgtcattgctgttatatttatatatttacttattttgtctaaccacgagaccactagggagttgctgatgttctaaatgaagtgtattctttgcttaagagtcagttttgtacctactaagaaaaccccatctaccagtcctaaagagataaggcatttgatttggagagagaggaagcagtagaaatgaaataaactaaaatgcaaactgcatcaaaaa

SEQ ID NO: 323 - protein, 457 aa, Homo sapiens
MEPWPLLLLFSLCSAGLVLGSEHETRLVAKLFKDYSSVVRPVEDHRQVVEVTVGLQLIQLINVDEVNQIVTTNVRLKQQWVDYNLKWNPDDYGGVKKIHIPSEKIWRPDLVLYNNADGDFAIVKFTKVLLQYTGHITWTPPAIFKSYCEIIVTHFPFDEQNCSMKLGTWTYDGSVVAINPESDQPDLSNFMESGEWVIKESRGWKHSVTYSCCPDTPYLDITYHFVMQRLPLYFIVNVIIPCLLFSFLTGLVFYLPTDSGEKMTLSISVLLSLTVFLLVIVELIPSTSSAVPLIGKYMLFTMVFVIASIIITVIVINTHHRSPSTHVMPNWVRKVFIDTIPNIMFFSTMKRPSREKQDKKIFTEDIDISDISGKPGPPPMGFHSPLIKHPEVKSAIEGIKYIAETMKSDQESNNAAAEWKYVAMVMDHILLGVFMLVCIIGTLAVFAGRLIELNQQG

SEQ ID NO: 324 - DNA, 2040 bp, Homo sapiens
gtgccagtgagaagcacaggccaccactctgccctggtccacacaagctccggtagcccatggagccctggcctctcctcctgctctttagcctttgctcagctggcctcgtcctgggctccgaacatgagacccgtctggtggcaaagctatttaaagactacagcagcgtggtgcggccagtggaagaccaccgccaggtcgtggaggtcaccgtgggcctgcagctgatacagctcatcaatgtggatgaagtaaatcagatcgtgacaaccaatgtgcgtctgaaacagggtgacatggtagatctgccacgccccagctgcgtgactttgggagttcctttgttttctcatctgcagaatgagcaatgggtggattacaacctaaaatggaatccagatgactatggcggtgtgaaaaaaattcacattccttcagaaaagatctggcgcccagaccttgttctctataacaatgcagatggtgactttgctattgtcaagttcaccaaagtgctcctgcagtacactggccacatcacgtggacacctccagccatctttaaaagctactgtgagatcatcgtcacccactttccctttgatgaacagaactgcagcatgaagctgggcacctggacctacgacggctctgtcgtggccatcaacccggaaagcgaccagccagacctgagcaacttcatggagagcggggagtgggtgatcaaggagtcccggggctggaagcactccgtgacctattcctgctgccccgacaccccctacctggacatcacctaccacttcgtcatgcagcgcctgcccctctacttcatcgtcaacgtcatcatcccctgcctgctcttctccttcttaactggcctggtattctacctgcccacagactcaggggagaagatgactctgagcatctctgtcttactgtctttgactgtgttccttctggtcatcgtggagctgatcccctccacgtccagtgctgtgcccttgattggaaaatacatgctgttcaccatggtgttcgtcattgcctccatcatcatcactgtcatcgtcatcaacacacaccaccgctcacccagcacccatgtcatgcccaactgggtgcggaaggtttttatcgacactatcccaaatatcatgtttttctccacaatgaaaagaccatccagagaaaagcaagacaaaaagatttttacagaagacattgatatctctgacatttctggaaagccagggcctccacccatgggcttccactctcccctgatcaaacaccccgaggtgaaaagtgccatcgagggcatcaagtacatcgcagagaccatgaagtcagaccaggagtctaacaatgcggcggcagagtggaagtacgttgcaatggtgatggaccacatactcctcggagtcttcatgcttgtttgcatcatcggaaccctagccgtgtttgcaggtcgactcattgaattaaatcagcaaggatgagcagaaaatgagctgagcttagctctgccctggaacctaccagagcagagaagggcaggagaggaagatttgtctacttgctccactcgcacttatcaaacgtgttatattccatacttattattgatgataagatttacctttatgtaagtttatggccttgaagtgttttcatattgcttctccctttagttctgctgtctccctgaagagtgaaccctctttagtaaatgaaactaatcactaaaaaaagtgttcatttccagtgtctggaagagtttttgccaggataaccgaggttttctgttgcattgtcattgctgttatatttatatatttacttattttgtctaaccacgagaccactagggagttgctgatgttctaaatgaagtgtattctttgcttaagagtcagttttgtacctactaagaaaaccccatctaccagtcctaaagagataaggcatttgatttggagagagaggaagcagtagaaatgaaataaactaaaatgcaaactgcatcaaaaa

SEQ ID NO: 325 - protein, 482 aa, Homo sapiens
MEPWPLLLLFSLCSAGLVLGSEHETRLVAKLFKDYSSVVRPVEDHRQVVEVTVGLQLIQLINVDEVNQIVTTNVRLKQGDMVDLPRPSCVTLGVPLFSHLQNEQWVDYNLKWNPDDYGGVKKIHIPSEKIWRPDLVLYNNADGDFAIVKFTKVLLQYTGHITWTPPAIFKSYCEIIVTHFPFDEQNCSMKLGTWTYDGSVVAINPESDQPDLSNFMESGEWVIKESRGWKHSVTYSCCPDTPYLDITYHFVMQRLPLYFIVNVIIPCLLFSFLTGLVFYLPTDSGEKMTLSISVLLSLTVFLLVIVELIPSTSSAVPLIGKYMLFTMVFVIASIIITVIVINTHHRSPSTHVMPNWVRKVFIDTIPNIMFFSTMKRPSREKQDKKIFTEDIDISDISGKPGPPPMGFHSPLIKHPEVKSAIEGIKYIAETMKSDQESNNAAAEWKYVAMVMDHILLGVFMLVCIIGTLAVFAGRLIELNQQG

SEQ ID NO: 326 - DNA, 581 bp, Homo sapiens
atgataaaaaaatatttggcctacaagcattggctgaactttggggacgacattcccagcgctcttcgaatcgcgaagcagcgctgaaacagcatcgaggaagggcgcatccaccaggagagcgagctgcactcctacctctcgaggctcattgcggcagagcgtgagagggagctcgaagagtgccaacggaaccataagggtgatgaagacgacagccaggtccgggcccagcaggcctgcaatgaggccaagcacgtgagggtgccccccgcccacatgacaaatacatggcggacatggatgagctcttctctcaggtggacgagaagaggaagaagtacgacatccccaaatacctgtgctgtaagatcagttttgagctgatgcgggagctatgcatcacgcccactggcatctcctatgaccgcaaggacatcgaggagcacctgcagcgcgtggatcattttgaccctgtgacctggagccccctaacccagaaacagttcatccccaacctggccatgaaggaggtcattgacgcattcatctctgagaacggctgggttgaggactactga

SEQ ID NO: 327 - DNA, 642 bp, Homo sapiens
atgggaaatgtggcccctgcagttcacagagctcttatagggtccctctttgaacatctgtatcagctgccgaaaacatgcgatgacctgcggcatacaacgactgagatctccgagatgaaccggaacatcagctggctccaggctgagattgagggtctcaaaggccagaaggcttccctggaggccgccgtcgcagatgctgagcagcgtggggagctggccattaaggatgccaacgccaagctgtccgagctggaggcggccctgcagcgggccaagcaagacatggcatggcagttgcatgagtaccaggagctgatgaacatcaagctggccctggatatggagatcgccacctacaggaagctgctggagggcaaggacagccggctggagtctgggatgcagaacatgagtatccatacgaagaccaccagcagctatgcaggtggtctgagctcggcctatgggggcctcacaagccccagcctcagctacggcctgggctccagctttggctctggcgtgggctccagctccttcagccacagcagctccaccagggccgtggttgtgaagaagatacagacccgcaatgggaagctggtgtccgagtcttctgacgtcctgcgcaagtga

SEQ ID NO: 328 - protein, 213 aa, Homo sapiens
MGNVAPAVHRALIGSLFEHLYQLPKTCDDLRHTTTEISEMNRNISWLQAEIEGLKGQKASLEAAVADAEQRGELAIKDANAKLSELEAALQRAKQDMAWQLHEYQELMNIKLALDMEIATYRKLLEGKDSRLESGMQNMSIHTKTTSSYAGGLSSAYGGLTSPSLSYGLGSSFGSGVGSSSFSHSSSTRAVVVKKIQTRNGKLVSESSDVLRK

SEQ ID NO: 329 - DNA, 5808 bp, Homo sapiens
aacagactggcggcgcgcggaaaacgcgtcacgtgacgactggccccgcctcttcctctcggtcccatattgaactcgagttggaagaggcgagtccggtctcaaaatggaggtaaaaccgccgcccggtcgcccccagcccgactccggccgtcgccgtcgccgccggggggaggagggccatgatccaaaggaaccagagcagttgagaaaactgtttattggtggtctgagctttgaaactacagatgatagtttacgagaacattttgagaaatggggcacactcacagattgtgtggtaatgagagacccccaaacaaaacgttccaggggctttggttttgtgacttattcttgtgttgaagaggtggatgcagcaatgtgtgctcgaccacacaaggttgatgggcgtgtagtggaaccaaagagagctgtttctagagaggattctgtaaagcctggtgcccatctaacagtgaagaaaatttttgttggtggtattaaagaagatacagaagaatataatttgagagactactttgaaaagtatggcaagattgaaaccatagaagttatggaagacaggcagagtggaaaaaagagaggatttgcttttgtaacttttgatgatcatgatacagttgataaaattgttgttcagaaataccacactattaatgggcataattgtgaagtgaaaaaggccctttctaaacaagagatgcagtctgctggatcacagagaggtcgtggaggtggatctggcaattttatgggtcgcggagggaactttggaggtggtggaggtaattttggccgtggtggaaactttggtggaagaggaggctatggtggtggaggtggtggcagcagaggtagttatggaggaggtgatggtggatataatggatttggaggtgatggtggcaactatggcggtggtcctggttatagtagtagagggggctatggtggtggtggaccaggatatggaaaccaaggtggtggatatggtggaggtggaggatatgatggttacaatgaaggaggaaattttggcggtggtaactatggtggtggtgggaactataatgattttggaaattatagtggacaacagcaatcaaattatggacccatgaaagggggcagttttggtggaagaagctcgggcagtccctatggtggtggttatggatctggtggtggaagtggtggatatggtagcagaaggttctaaaaacagcagaaaagggctacagttcttagcaggagagagagcgaggagttgtcaggaaagctgcaggttactttgagacagtcgtcccaaatgcattagaggaactgtaaaaatctgccacagaaggaacgatgatccatagtcagaaaagttactgcagcttaaacaggaaacccttcttgttcaggactgtcatagccacagtttgcaaaaagtgcagctattgattaatgcaatgtagtgtcaattagatgtacattcctgaggtcttttatctgttgtagctttgtctttttctttttcttttcattacatcaggtatattgccctgtaaattgtggtagtggtaccaggaataaaaaattaaggaatttttaacttttcaatatttgtgtagttcagtttttctacattttagtacagaaactttaacaaaatgcagtttcgaaggtgtttccttgtgagttaacaagtaaagaagatcattgttaattactattttgtatgaattttgctaaagttaactgtaaagaaacacctgctgacttgcagtttaaggggaatctattctccccatttccaaaccatgatatgaatgggcgctgacatgtggagagaatagataatttgtgtgtttgcaatgtgtgttttagataaataggattgggtatttaaattagcatttgtgaatttaatagcattaagattaccttcaaatgaaaaaaaatctcaaaatttctatttggtttttgtgcattttcttttaaaatgtaatcatatgattttagtgtgttagacttgctgagtcctagctgtgtttagaacatctctattctacatttaccttggtcaaatttgaactgctgccataggttttgggtgtaaagaatgtttactgccctccatttaaattctgaaaagggatggtggatgttttccctctcctacgttagaaaccattcttaaaaacttttgaaaatatagaaccattaagcctgctatatctgagcaaattagtgggtaccttttttttcttatttaaagcacaagaggcccataaatcttgagttactttaaattcttttttttgatacaagttttcagagcaagagaataaaaatcatgtgttattaaacccctaactggctggcatgctttcctgtttgtattctatacattttgctggatgaaaccaaggatagttcaggtataattgtccaaaataacctaactgcagcagaaatgtagcacagttgcttagtacaggcttctcacttcctacagacctgaattcaaatttggatagtctgagttcttaaattcccaaagaacacactgttatttcttgtgtatatttcaacataaatcatgttgttaccaatttgtttggaaggccctggttgagaagagttttagttaataaggtcatatatacatatattaatataaaccaatgtctactgttttgctccagctagtgcttacagtttcattcgagccctgagtatgtgccctgctgttactctctttggtagttgaacgttgaattcaagtcttttgttttaagaagtactaagcaaacaagcaataaaaaggggaatggggtgtgctagtgtttgaatatgctctcttgttgctctaattctgtgcctctgtgcattaatatttggatgcatgcaatgccagcatggaaattggtcttcacacatactgcagttttccagaaacattcacaaaccaataaatgtaacagacattccatttgttaatgggcatatatgtgaaaagcagtgtagaaaataggctaatattagaaaatggttaagtcctaaataacttcaagtgtggttatataatggacactgtcaatgttcataacttaaacctgggtacctggtcaaaataatgcttgggaaacattaaaattgagctaaattgtctcaagttcttttattcatataaataaagtttaaaggaatgggggagattaacatttcctgttttatgtttgtgaaattgtttgacacaaccttgacagtatcctttaatggcatgaggttaattgtactgttaaccaactttctatgttctggaactagtattatagtgaaaacatttacagtaagttgatgtttacaacctataagcaggtgaaatctgtgtatgtgacctgtttataagttgtattagcttagctcttgtgaacagtgtggaaaagtaagccatgaggagagcgatttaaccacctttaaaggacctaagatgtgctttttaagcacagtgtggatcacagaaactcactaagacaggacttcagcagccttttgtgtttggacaagtcagcataaataaagaatgacaaggcagcagcaagagcttcaactacagagaagtgaaggcataagatactatgatgatagtgagcaactttccaaaagctagttaaatctgcttattacaactgaaatatcgaagaaagtctagcaggaaggagctcttcgccttttggaacatcaatgagagatagttgccacagtcactaggtctagcatttagacctgcaaggaagggcaataagcattaggtaaggcttgaatttgaattttttcactaattaaagagtaattttttgtaaagcaaggtaagagtaatctttttgatttgcaggttgaatgagaaccctacttgcctaaatgaggaatgtctttcctaccatctaaaatacgaaggtttctggctgggtaaggtttgtagttgacagtaaaacctgatgacaccatttgtttccctgcaagtctacattacatatttcacaactttgtccctctctagtaggcacattggaaaaattcttcaactgaaaactaccttggtaccatgtcctacacgttttaaaccttagttttaaaaattcccctgcgaaatagccataagtattcatatcaagtcagttgtgactccttgtgtatacaattcattttttgtgtcttcagggtaaactcaatttttggtaaagtggtttcagcttttgtgaaaaccgttttggtgtgtaagcatgacacacaacagactcagtaagctgcccatcctcatactaggaaaacaccttcaaaggaacattaaaagttaccagggccaggcacagtggctcacgcctgtaatcccagcactttgggaggctgaggcagatggatcccaagtccaggaatttgagacgagcctgggcaacatagtgagagcctgtcaacaaaaaatagaaaaattagttgggcttggtgatacacatctgtagtcccagctatttgggaggctgccttgatatcaggcagtcgaggctgcagtgagctgactgccccactgtattccagcctgggtgaccccatctcaaagaagaaaagttaccagatgtcatgggtaaaggttggtcttcaagtggcctcataagttgtcttgcatttaaattcagggaattcattggaccaataggttacattttcgttccttttttgttttggttcatctgttaagcagtgggggcctaattactgctcctttgtaaaaacacattttcccaaagaacactgaattaccgttcaaactggttgttgatgggtaataagggctgtttttgctgccccaaaagggcttaacaatttagtcggatagtttacttaaaaaaaaaaatcctttggagacatactgaaaatgcaaactagtttctaaattatcaattccctacatgaagaagcagtttgccagagtttagtctcagaaaatgactggttggctctatttaaatcagaacccaatttctacgcgtgttgaataaggtaacagcctttgatgaatttccttcacaacatggttttagtgaagcaaacattttttttttaagggcattgttctttctagtttatttctttttatgaaataaaattattttatttaaacagttccattgtcgtttctgaaaactacagtattctcagaagttgtagcagcagtaaaaaaaaaaaagttgttatataagtgattggggcagatttaactgattttgttaaaccaatttgtaagttactgcttctaatattacacttctaaaaagctgaatttatactcatgtcctaaaggagaatatgtggtaataaagtatatttgttaagtaactaattgaaataggcttggttttaagagttccagtatataataatcacaaattgaaacctgacagtatcttgggagttccagtaatgtcacaaattagtgaataagcatgccagtgtgcaagggtaatgtaaggattgttagcctatctaaatattcaaaattactttaaaacttaagtatgttttctgatttttaagaattcagaagtgttctgtaatggattcagatgtttcatttgtagtataatgaaatgtttacagaaagataactttttcattaaaatatttttagaaatgtgtgtgttgttttgtcacttcacaatgttcatgtgacttaaacactataggtgaatattttgacttattttaccagtaagtaataaaacaacaggaaacttg

SEQ ID NO: 330 - protein, 378 aa, Homo sapiens
MEVKPPPGRPQPDSGRRRRRRGEEGHDPKEPEQLRKLFIGGLSFETTDDSLREHFEKWGTLTDCVVMRDPQTKRSRGFGFVTYSCVEEVDAAMCARPHKVDGRVVEPKRAVSREDSVKPGAHLTVKKIFVGGIKEDTEEYNLRDYFEKYGKIETIEVMEDRQSGKKRGFAFVTFDDHDTVDKIVVQKYHTINGHNCEVKKALSKQEMQSAGSQRGRGGGSGNFMGRGGNFGGGGGNFGRGGNFGGRGGYGGGGGGSRGSYGGGDGGYNGFGGDGGNYGGGPGYSSRGGYGGGGPGYGNQGGGYGGGGGYDGYNEGGNFGGGNYGGGGNYNDFGNYSGQQQSNYGPMKGGSFGGRSSGSPYGGGYGSGGGSGGYGSRRF

SEQ ID NO: 331 - DNA, 2439 bp, Homo sapiens
gcagccgccaccgccgccgccgccgccaccagagccgccctgtccgcgccgcgcctcggcagccggaacagggccgccgtcggggagccccaacacacggtccacagctcatcatgatggacttggagctgccgccgccgggactcccgtcccagcaggacatggatttgattgacatactttggaggcaagatatagatcttggagtaagtcgagaagtatttgacttcagtcagcgacggaaagagtatgagctggaaaaacagaaaaaacttgaaaaggaaagacaagaacaactccaaaaggagcaagagaaagcctttttcgctcagttacaactagatgaagagacaggtgaatttctcccaattcagccagcccagcacatccagtcagaaaccagtggatctgccaactactcccaggttgcccacattcccaaatcagatgctttgtactttgatgactgcatgcagcttttggcgcagacattcccgtttgtagatgacaatgaggtttcttcggctacgtttcagtcacttgttcctgatattcccggtcacatcgagagcccagtcttcattgctactaatcaggctcagtcacctgaaacttctgttgctcaggtagcccctgttgatttagacggtatgcaacaggacattgagcaagtttgggaggagctattatccattcctgagttacagtgtcttaatattgaaaatgacaagctggttgagactaccatggttccaagtccagaagccaaactgacagaagttgacaattatcatttttactcatctataccctcaatggaaaaagaagtaggtaactgtagtccacattttcttaatgcttttgaggattccttcagcagcatcctctccacagaagaccccaaccagttgacagtgaactcattaaattcagatgccacagtcaacacagattttggtgatgaattttattctgctttcatagctgagcccagtatcagcaacagcatgccctcacctgctactttaagccattcactctctgaacttctaaatgggcccattgatgtttctgatctatcactttgcaaagctttcaaccaaaaccaccctgaaagcacagcagaattcaatgattctgactccggcatttcactaaacacaagtcccagtgtggcatcaccagaacactcagtggaatcttccagctatggagacacactacttggcctcagtgattctgaagtggaagagctagatagtgcccctggaagtgtcaaacagaatggtcctaaaacaccagtacattcttctggggatatggtacaacccttgtcaccatctcaggggcagagcactcacgtgcatgatgcccaatgtgagaacacaccagagaaagaattgcctgtaagtcctggtcatcggaaaaccccattcacaaaagacaaacattcaagccgcttggaggctcatctcacaagagatgaacttagggcaaaagctctccatatcccattccctgtagaaaaaatcattaacctccctgttgttgacttcaacgaaatgatgtccaaagagcagttcaatgaagctcaacttgcattaattcgggatatacgtaggaggggtaagaataaagtggctgctcagaattgcagaaaaagaaaactggaaaatatagtagaactagagcaagatttagatcatttgaaagatgaaaaagaaaaattgctcaaagaaaaaggagaaaatgacaaaagccttcacctactgaaaaaacaactcagcaccttatatctcgaagttttcagcatgctacgtgatgaagatggaaaaccttattctcctagtgaatactccctgcagcaaacaagagatggcaatgttttccttgttcccaaaagtaagaagccagatgttaagaaaaactagatttaggaggatttgaccttttctgagctagtttttttgtactattatactaaaagctcctactgtgatgtgaaatgctcatactttataagtaattctatgcaaaatcatagccaaaactagtatagaaaataatacgaaactttaaaaagcattggagtgtcagtatgttgaatcagtagtttcactttaactgtaaacaatttcttaggacaccatttgggctagtttctgtgtaagtgtaaatactacaaaaacttatttatactgttcttatgtcatttgttatattcatagatttatatgatgatatgacatctggctaaaaagaaattattgcaaaactaaccactatgtacttttttataaatactgtatggacaaaaaatggcattttttatattaaattgtttagctctggcaaaaaaaaaaaattttaagagctggtactaataaaggattattatgactgttaaaaaaaaaaaaaaaaaaaaaaaaaaaaaaaaaa

SEQ ID NO: 332 - protein, 605 aa, Homo sapiens
MMDLELPPPGLPSQQDMDLIDILWRQDIDLGVSREVFDFSQRRKEYELEKQKKLEKERQEQLQKEQEKAFFAQLQLDEETGEFLPIQPAQHIQSETSGSANYSQVAHIPKSDALYFDDCMQLLAQTFPFVDDNEVSSATFQSLVPDIPGHIESPVFIATNQAQSPETSVAQVAPVDLDGMQQDIEQVWEELLSIPELQCLNIENDKLVETTMVPSPEAKLTEVDNYHFYSSIPSMEKEVGNCSPHFLNAFEDSFSSILSTEDPNQLTVNSLNSDATVNTDFGDEFYSAFIAEPSISNSMPSPATLSHSLSELLNGPIDVSDLSLCKAFNQNHPESTAEFNDSDSGISLNTSPSVASPEHSVESSSYGDTLLGLSDSEVEELDSAPGSVKQNGPKTPVHSSGDMVQPLSPSQGQSTHVHDAQCENTPEKELPVSPGHRKTPFTKDKHSSRLEAHLTRDELRAKALHIPFPVEKIINLPVVDFNEMMSKEQFNEAQLALIRDIRRRGKNKVAAQNCRKRKLENIVELEQDLDHLKDEKEKLLKEKGENDKSLHLLKKQLSTLYLEVFSMLRDEDGKPYSPSEYSLQQTRDGNVFLVPKSKKPDVKKN

SEQ ID NO: 333 - DNA, 3154 bp, Homo sapiens
ggcgcgggcaagagttggacagttcaggggccgcgccgggccgagctgtcgcccgcgccacctccaccgccgccgctgctaccgccaccgccaccgcctgggctgcagcagatcgcgggagaacgtctgcgcgaagccccggtgcagccctggcgggaccgcagcaaccaccggagcgtgagcaacagcttcccggctggaggagccactgccccacgcgcccgcggcccgcgcgccgagatgttctacatttcaactccatcaaatattaaattgatgtttatgggctaacctggaaaccgaaaaacagtttgtttcactacaagaataagaaaatatgtccaaattcctgtcagctgacttataaagggacttttagaacacaacccaatgcatgaggtactccttaagccctgacaaccatcttgaagatggaatcatgaatatggcaaattttctacggggctttgaagaaaaggggataaagaacgacaggcctgaggaccagttgagcaaagagaaaaagaaaattcttttctccttctgtgaggtgtgcaacatccagctgaactctgcagcccaggctcaggtgcattccaacggcaaatcccaccgcaaacgagtgaagcagctgagtgatgggcagcccccaccacccgcccaggccagccccagcagcaacagcagcacaggcagtacatgccacactactacccttcctgctcttgtgcgcacacctaccctgatgatgcagccttcactggatatcaaaccatttatgtcttttccagtggacagtagttctgctgttgggctctttccaaattttaacacaatggatcctgtgcaaaaagcggttattaaccatacatttggagtatccattcccccaaagaagaaacaagttatttcttgtaatgtctgtcagcttcgctttaactcagatagccaggccgaggcccactacaaaggaagtaaacatgccaagaaggtcaaagcactagacgcaacgaaaaataaacccaaaatggttccttccaaggacagcgcaaaggctaatcccagctgctccatcactccaatcacaggcaacaactctgacaaatcagaagataaagggaagttaaaagccagcagttccagtcagccatcaagctctgaaagtggctcatttctcctcaaatctggcacaacacccctgccacctggagcagccacttctccctccaagagcacaaatggagctcccggtactgttgttgaatcagaagaagaaaaagccaaaaaattactttattgttcactatgcaaagtggctgtgaactccctgtcacagctagaggcacacaacacaggatctaaacacaagaccatggttgaagctcgtaatggggctggtccaattaaatcctatcctagacctggatcaagattaaagatgcagaatggcagtaaggggtcaggactacagaacaagacatttcattgtgaaatctgtgatgttcatgttaattcagaaattcaactcaaacagcacatttctagccgaaggcataaagatcgagttgcagggaaaccactgaagccaaaatacagcccttacaacaaactccagcggagcccgagtattctagcagcaaaacttgcattccagaaagatatgatgaagcctttggccccagccttcctgtcctcacctctcgcagcggcggcagccgtgtcctcagcgctgtcactcccaccccggccctctgcctcgctcttccaggctccagccattcctccagctcttctgaggcctgggcatgggcccatccgcgccactcctgcctccatcctctttgctccgtactaacgtctgcaaaccccaagacgtttgaggccagtaggaagttgagaaagaaagccacaaggattcagcaatttaagcagtttgtgttgcagtacccccattcacccacaaaatgcagcccaccacccagtcccccaattccagagagaaacacatcactagattgacgagggcttttagagactgctcctataattgaggaatcagcagcataggctttatctccctacttcctcccccaccctaccgcgttcaatttgtgtatctcagatatttgatttcttgagcatgtattggtcagaaagaaaaagaaagaaaaccattctctatttttccatgggtatgatctggcttaaaacaatatggaatattttcctgacagacttgaaaactaggatcttcctcagatgtctgtaaataactctggtatccaactgggtgtattctagtgtggaacaaaaaacagtgaacacaagtgcttacttgtggatactatcttaccaacggatcacaaagttctctttttggtgtactgttgttgacagggattgtgtactgtttcgacccaagtactgctgtatcctgtgtagtactagatctgtatctcttgtctgaattaaacatttttagttgctgtgtaaatgttaggaagcaaagtagctttgaattttctctgtaagagaataaaagataaaataatgtattttctttatttcacattttatttggagatatttaaatgaaatagaaagccatataacatagctataattactacctgtttgctatttttgtttaacttattttgtagcttcctcactggtttgtgttgctaagcaaacgtatacaaacagaaaaagagcttcctaaattgcacatttttgcacctcttgtgcattctgcaagaagacaatgaatccatgtatttctatataagtatcttcttcatttttaacctgttttcatttgtaatgatgctacataattttgtggctccctaatgcaataatgtacagaagataaaaaaatttataattgaacaatttgtctttctgttcgctgaatatattgcaggtcatgctcccatgcccccctttctaagccgatatcaacaagactggaatgtttgtgatatcaggggcaagagttatcatagaacaacaaaatagagtggactcttttagagcatctatatctgcaacctgtaaatggtaaaatgtctgtgtatttttttaaatgtaccttttcaataaaagtacaaaaaataaaaaaaaaaaaaaaaaaaaaaaaaaaaaaaaaaaa

SEQ ID NO: 334 - protein, 471 aa, Homo sapiens
MNMANFLRGFEEKGIKNDRPEDQLSKEKKKILFSFCEVCNIQLNSAAQAQVHSNGKSHRKRVKQLSDGQPPPPAQASPSSNSSTGSTCHTTTLPALVRTPTLMMQPSLDIKPFMSFPVDSSSAVGLFPNFNTMDPVQKAVINHTFGVSIPPKKKQVISCNVCQLRFNSDSQAEAHYKGSKHAKKVKALDATKNKPKMVPSKDSAKANPSCSITPITGNNSDKSEDKGKLKASSSSQPSSSESGSFLLKSGTTPLPPGAATSPSKSTNGAPGTVVESEEEKAKKLLYCSLCKVAVNSLSQLEAHNTGSKHKTMVEARNGAGPIKSYPRPGSRLKMQNGSKGSGLQNKTFHCEICDVHVNSEIQLKQHISSRRHKDRVAGKPLKPKYSPYNKLQRSPSILAAKLAFQKDMMKPLAPAFLSSPLAAAAAVSSALSLPPRPSASLFQAPAIPPALLRPGHGPIRATPASILFAPY

SEQ ID NO: 335 - DNA, 3460 bp, Homo sapiens
agcgggacgcccgggcggccctgaaggggacggggcggccccagtcggaggtcgcagggagctccgcccccgactcggtataagagctgggcccggcccacggcggcggcggcggcggcggagagagctggctcagggcgtccgctaggctcggacgacctgctgagcctcccaaaccgcttccataaggctttgcctttccaacttcagctacagtgttagctaagtttggaaagaaggaaaaaagaaaatccctgggccccttttcttttgttctttgccaaagtcgtcgttgtagtctttttgcccaaggctgttgtgtttttagaggtcctatctccagttccttgcactcctgttaacaagcacctcagcgagagcagcagcagcgatagcagccgcagaagagccagcggggtcgcgtagtgtcatgaccagggcgggagatcacaaccgccagagaggatgctgtggatccttggccgactacctgacctctgcaaaattccttctctaccttggtcattctctctctacttggggagatcggatgtggcactttgcggtgtctgtgtttctggtagagctctatggaaacagcctccttttgacagcagtctacgggctggtggtggcagggtctgttctggtcctgggagccatcatcggtgactgggtggacaagaatgctagacttaaagtggcccagacctcgctggtggtacagaatgtttcagtcatcctgtgtggaatcatcctgatgatggttttcttacataaacatgagcttctgaccatgtaccatggatgggttctcacttcctgctatatcctgatcatcactattgcaaatattgcaaatttggccagtactgctactgcaatcacaatccaaagggattggattgttgttgttgcaggagaagacagaagcaaactagcaaatatgaatgccacaatacgaaggattgaccagttaaccaacatcttagcccccatggctgttggccagattatgacatttggctccccagtcatcggctgtggctttatttcgggatggaacttggtatccatgtgcgtggagtacgttctgctctggaaggtttaccagaaaaccccagctctagctgtgaaagctggtcttaaagaagaggaaactgaattgaaacagctgaatttacacaaagatactgagccaaaacccctggagggaactcatctaatgggtgtgaaagactctaacatccatgagcttgaacatgagcaagagcctacttgtgcctcccagatggctgagcccttccgtaccttccgagatggatgggtctcctactacaaccagcctgtgtttctggctggcatgggtcttgctttcctttatatgactgtcctgggctttgactgcatcaccacagggtacgcctacactcagggactgagtggttccatcctcagtattttgatgggagcatcagctataactggaataatgggaactgtagcttttacttggctacgtcgaaaatgtggtttggttcggacaggtctgatctcaggattggcacagctttcctgtttgatcttgtgtgtgatctctgtattcatgcctggaagccccctggacttgtccgtttctccttttgaagatatccgatcaaggttcattcaaggagagtcaattacacctaccaagatacctgaaattacaactgaaatatacatgtctaatgggtctaattctgctaatattgtcccggagacaagtcctgaatctgtgcccataatctctgtcagtctgctgtttgcaggcgtcattgctgctagaatcggtctttggtcctttgatttaactgtgacacagttgctgcaagaaaatgtaattgaatctgaaagaggcattataaatggtgtacagaactccatgaactatcttcttgatcttctgcatttcatcatggtcatcctggctccaaatcctgaagcttttggcttgctcgtattgatttcagtctcctttgtggcaatgggccacattatgtatttccgatttgcccaaaatactctgggaaacaagctctttgcttgcggtcctgatgcaaaagaagttaggaaggaaaatcaagcaaatacatctgttgtttgagacagtttaactgttgctatcctgttactagattatatagagcacatgtgcttattttgtactgcagaattccaataaatggctgggtgttttgctctgtttttaccacagctgtgccttgagaactaaaagctgtttaggaaacctaagtcagcagaaattaactgattaatttcccttatgttgaggcatggaaaaaaaattggaaaagaaaaactcagtttaaatacggagactataatgataacactgaattcccctatttctcatgagtagatacaatcttacgtaaaagagtggttagtcacgtgaattcagttatcatttgacagattcttatctgtactagaattcagatatgtcagttttctgcaaaactcactcttgttcaagactagctaatttatttttttgcatcttagttatttttaaaaacaaattcttcaagtatgaagactaaattttgataactaatattatccttattgatcctattgatcttaaggtatttacatgtatgtggaaaaacaaaacacttaactagaattctctaataaggtttatggtttagcttaaagagcacctttgtatttttattatcagatggggcaacatattgtatgaagcatatgtagcacttcacagcatggttatcatgtaagctgcaggtagaagcaaagctgtaaagtagatttatcacacaatgactgcatacagacttcaaatatgtcaatagtttggtcatagaacctagaagccaaaagccacacagaagggcaagaatcccaatttaactcatgttatcatcattagtgatctgtgttgtagaacatgagggtgtaagccttcagcctggcaagttacatgtagaaagcccacacttgtgaaggttttgttttacaaatcacttgatttaacacactcaggtagaatatttttatttttactgttttatacccagaagttatttctacattgttctacagcaagaatattcataaaagtatccctttcaaatgcctttgagaagaatagaagaaaaaaagtttgtatatattttaaaaaattgttttaaaagtcagtttgcaacatgtctgtaccaagatggtactttgccttaaccgtttatatgcactttcatggagactgcaatacgttgctatgagcactttctttatccttggagtttaatcctttgcttcatctttctacagtatgacataatgatttgctatgttgtaaaatctttgtaaaaaatttctatataaaaatattttgaaaatcttaaaaaaaaaaaaaaaaaaaaaaaaaaaa

SEQ ID NO: 336 - protein, 571 aa, Homo sapiens
MTRAGDHNRQRGCCGSLADYLTSAKFLLYLGHSLSTWGDRMWHFAVSVFLVELYGNSLLLTAVYGLVVAGSVLVLGAIIGDWVDKNARLKVAQTSLVVQNVSVILCGIILMMVFLHKHELLTMYHGWVLTSCYILIITIANIANLASTATAITIQRDWIVVVAGEDRSKLANMNATIRRIDQLTNILAPMAVGQIMTFGSPVIGCGFISGWNLVSMCVEYVLLWKVYQKTPALAVKAGLKEEETELKQLNLHKDTEPKPLEGTHLMGVKDSNIHELEHEQEPTCASQMAEPFRTFRDGWVSYYNQPVFLAGMGLAFLYMTVLGFDCITTGYAYTQGLSGSILSILMGASAITGIMGTVAFTWLRRKCGLVRTGLISGLAQLSCLILCVISVFMPGSPLDLSVSPFEDIRSRFIQGESITPTKIPEITTEIYMSNGSNSANIVPETSPESVPIISVSLLFAGVIAARIGLWSFDLTVTQLLQENVIESERGIINGVQNSMNYLLDLLHFIMVILAPNPEAFGLLVLISVSFVAMGHIMYFRFAQNTLGNKLFACGPDAKEVRKENQANTSVV

SEQ ID NO: 337 - DNA, 501 bp, Homo sapiens
atgagctgctgggtacacctcccagacggggtggcggccgggcagaggggcccccccacctcccagacagggcggccgggcagaggcgccccccacctcccggacggggcggctgccgggcgggggctgccccccacctccctcccggacggggcggctgaccgggcgggggctgccccccacctccctcccggacggggtggctggctgggcgggggctgccccccacctctctcccggacagggcggctggccgggcgggggctgtcccccacctcttggacggggcggctgcctggcggagatgctcctctcttcccagacggggcagctgccgggtggaggggctcctcacatcccagatggggcagcggggcagaggcgctccccacatctcagacgatgggcagcggggcagaggcgctggggagcgcctctcagacgatgggcctctcatctcagaggatgggcggccgggcagagacgctcctcacttcctag

SEQ ID NO: 338 - protein, 166 aa, Homo sapiens
MSCWVHLPDGVAAGQRGPPTSQTGRPGRGAPHLPDGAAAGRGLPPTSLPDGAADRAGAAPHLPPGRGGWLGGGCPPPLSRTGRLAGRGLSPTSWTGRLPGGDAPLFPDGAAAGWRGSSHPRWGSGAEALPTSQTMGSGAEALGSASQTMGLSSQRMGGRAETLLTS

SEQ ID NO: 339 - DNA, 2448 bp, Homo sapiens
aaaagaaagggtgagcgcggctggaagcgcgcatgcgctgtggctaatgccgtaggctccttcagggctgagccatcccgcgtgtcttgcgctcggtggaaatgcccagccgagggacgcgaccagaggacagctctgtgctgatccccaccgacaattcgaccccacacaaggaggatctaagcagcaagattaaagaacaaaaaattgtggtggatgaactttctaaccttaagaagaataggaaagtatataggcaacaacagaacagcaatatattctttcttgcagaccgaacagaaatgctgtctgagagcaagaatatattggatgaactgaaaaaagaataccaagaaatagaaaacttagacaagaccaaaatcaagaaatagtcaacctgatttcacataacaatgtgtggcatttgttgttctgtaaacttttctgctgagcatttcagtcaagatttaaaagaggacttactatataatcttaaacagcggggacccaatagtagtaaacaattgttaaagtctgatgttaactaccagtgtttattttctgctcacgtcctacacttgaggggtgttttgactacccagcctgtggaagatgaaagaggcaatgtgtttctatggaatggagaaatttttagtggaataaaggttgaagctgaagagaatgacactcaaattttgtttaattatctttcctcctgtaagaatgaatctgagattttgtcactcttctcagaagtacaaggtccctggtcatttatatattatcaagcatctagtcattatttatggtttggtagggatttttttggtcgccgtagcttgctttggcattttagtaatttgggcaagagtttctgcctctcttcagttggcacccaaacatctggattggcaaatcagtggcaagaagttccagcatctggacttttcagaattgatcttaagtctactgtcatttccagatgcattattttacaactgtatccttggaaatatatttctagggagaatattattgaagaaaatgttaatagcctgagtcaaatttcagcagacttaccagcatttgtatcagtggtagcaaatgaagccaaactgtatcttgaaaaacctgttgttcctttaaatatgatgttgccacaagctgcattggagactcattgcagtaatatttccaatgtgccacctacaagagagatacttcaagtctttcttactgatgtacacatgaaggaagtaattcagcagttcattgatgtcctgagtgtagcagtcaagaaacgtgtcttgtgtttacctagggatgaaaacctgacagcaaatgaagttttgaaaacgtgtgataggaaagcaaatgttgcaatcctgttttctgggggcattgattccatggttattgcaacccttgctgaccgtcatattcctttagatgaaccaattgatcttcttaatgtagctttcatagctgaagaaaagaccatgccaactacctttaacagagaagggaataaacagaaaaataaatgtgaaataccttcagaagaattctctaaagatgttgctgctgctgctgctgacagtcctaataaacatgtcagtgtaccagatcgaatcacaggaagggcgggactaaaggaactacaagctgttagcccttcccgaatttggaattttgttgaaattaatgtttctatggaagaactgcagaaattaagaagaactcgaatatgtcacttaattcggccattggatacagttttggatgatagcattggctgtgcagtctggtttgcttctagaggaattggttggttagtggcccaggaaggagtgaaatcctatcagagcaatgcaaaggtagttctcactggaattggtgcagatgagcaacttgcaggttattctcgtcatcgtgtccgctttcagtcgcatgggctggaaggattgaataaggaaataatgatggaactgggtcgaatttcttctagaaatcttggtcgtgatgacagagttattggtgatcatggaaaagaagcaagatttcctttcctggatgaaaatgttgtctcctttctaaattctctgccgatttgggaaaaagcaaacttgactttaccccgaggaattggtgaaaaattacttttacgccttgcagctgtggaacttggtcttacagcctctgctcttctgcccaaacgggccatgcagtttggatcaagaattgcaaaaatggaaaaaattaatgaaaaggcatctgataaatgtggacggctccaaatcatgtccttagaaaatctttctattgaaaaggagactaaattgtaatgtgattcacaatgtaacaatataaaaataagtttttatataattatataaaagtaaggtactctgctgctttactattgtataatatagtagttttaaagtt

SEQ ID NO: 340 - protein, 643 aa, Homo sapiens
MCGICCSVNFSAEHFSQDLKEDLLYNLKQRGPNSSKQLLKSDVNYQCLFSAHVLHLRGVLTTQPVEDERGNVFLWNGEIFSGIKVEAEENDTQILFNYLSSCKNESEILSLFSEVQGPWSFIYYQASSHYLWFGRDFFGRRSLLWHFSNLGKSFCLSSVGTQTSGLANQWQEVPASGLFRIDLKSTVISRCIILQLYPWKYISRENIIEENVNSLSQISADLPAFVSVVANEAKLYLEKPVVPLNMMLPQAALETHCSNISNVPPTREILQVFLTDVHMKEVIQQFIDVLSVAVKKRVLCLPRDENLTANEVLKTCDRKANVAILFSGGIDSMVIATLADRHIPLDEPIDLLNVAFIAEEKTMPTTFNREGNKQKNKCEIPSEEFSKDVAAAAADSPNKHVSVPDRITGRAGLKELQAVSPSRIWNFVEINVSMEELQKLRRTRICHLIRPLDTVLDDSIGCAVWFASRGIGWLVAQEGVKSYQSNAKVVLTGIGADEQLAGYSRHRVRFQSHGLEGLNKEIMMELGRISSRNLGRDDRVIGDHGKEARFPFLDENVVSFLNSLPIWEKANLTLPRGIGEKLLLRLAAVELGLTASALLPKRAMQFGSRIAKMEKINEKASDKCGRLQIMSLENLSIEKETKL

SEQ ID NO: 341 - DNA, 4109 bp, Homo sapiens
atgagtcaaatgaataacgtaggcttctccactgcaatcctactgactcccgtggaccctactgccctcttagactatagagaggtccatcaaatgataagagagttggctattggaatttattgcctaaatcaaatcccttccatcagtttagaagctaattatgatcagagttcttcttgtcaattacctccagcttattatgataccagaattgggcaaattctgatcaatattgactacatgctgaaagcactatggcatggaatatatatgcccaaagaaaaacgagctagattctctgaattgtggcgtgccatcatggacattgatcctgatggaaaacctcaaacaaataaagacattttttcagagtttagttcagcaggtttgactgatattacaaaggatccagactttaatgaaatctatgatgaagacgtgaatgaagatccaacatatgatcccaacagccctgaagaaacagctgtatttatgaaatatgctgaaaatattatgctaaagttaacattcagtaccacacaaattcaacagtatgaaaatgtctttatatttgaaacaggctattggcttactaatgctataaaatataatcaggattatcttgatatctgtacctaccagagactacagcaaagattatatcttcaaaaaaagattattcaaaaacactttgagaagaaaaaagatatcagaagagggataggatacctaaagttaatatgttttctgattccatttctactgagtttaaagaagaaaatgaaagttccatatttaagtagtctgcttcagcctttttcagatgacaaggtcaagacagagcgagaattgcctccatttatttatggaagagattttaaatgccagaattttcactacaaagagaatcaatattttcatgttcatggaggaattgaatttgatatcagcaccccttcaattgagaatgccttggaagattttcagaaaaatttagaaaaaatacgagattgtgctgctaatacatttatagaagattcaggatataaagaatattactcaataccagtcatggaatttcatggaaaaagctactatgtgatctattttgaactagaaactttctatcagcaactatataagacacagtggtggggagccataaatgaaatagtgaacaatctgagactgaaaagacttccactgacagatgctcaattacatgaacaatttaagaaaaagcttggtttcaaaagagctatgaaatgcaagagtattccatttggtatgaagtccgctgttgaaagagggttgtctgcagttttccacacatttagccgtaaaacctcaagctcaacaatcaatgtttcagatgaagcaggttatactatttttcatcatgctgccctgcacaacagagtttctattatatgtcaactgtgcaatgctaacttcaaggtcaaccagaggcgctttgttacgttcagccaaggtccaacacctctacaccttgctgcacaggcttgctcattagaaacaacagtttgtctactgtgttccaaagctgattacacgctttctgaaaaaagaggctggatgccgattcactttgccgctttctatgacaacgtttgcatcattattgctctctgtaggaaggatcctagtttgctagaagctgaggcaacagctgagaatcagtgcactccactgttacttgctgccacttcaggagcactggacactattcaatacctgttttctatcggtgctaactggagaaaaacagatattaaaggaaataatataatccatttatcagtgttaacctttcatacagaggttctcaaatatataataaaattaaatattcctgaactcccagtgtggaaaactttggtagaaatgttacagtgtgaaagctataaacgaaggatgatggccgtcatgtccttggaagtaatttgcttagcaaatgatcaatactggagatgtattttggatgcaggcaccattcctgccttaatcaatctattaaaaagttccaaaataaaactgcagtgcaaaactgttgggttattgagtaatatctcaacccacaaaagtgcagtgcatgctttggtagaagcgggaggcattccatctctaatcaacctactggtttgtgatgagcctgaagtacactctcgctgtgctgtcattctatatgatattgctcaatgtgaaaacaaggatgttattgccaaatataatggaatcccaagcctgataaatctattgaacttaaacatagaaaatgtgctagtaaatgtaatgaactgtatacgggtattgtgtataggaaatgaaaacaatcaaagagctgtgagagaacataaaggcctcccatatcttatcagatttctgagttctgattcagatgtgttgaaggctgtatcttctgctgcaattgctgaggttgggcgtgacaataaggaaattcaggatgctatagctatggagggagcgattcctcctctggtggctctttttaaagggaaacaaattagtgtccaaatgaaaggtgcaatggctgtggaatcactggcaagtcacaacgctcttatacagaaagcatttctggaaaaatcgttaactaaatatcttttaaaactcctaaaggcatttcaaatagatgttaaggaacaaggagctgttgcactttgggccttggcaggacaaacactaaaacaacaaaaatatatggcagaacaaattggatacagctttataataaatatgcttttgtcaccatcagctaaaatgcagtatgttggaggtgaagctgtcatagctctaagtaaggacagcaggatgcatcaaaatcaaatatgtgaagggaatggaattgcaccattggttcgcttactaagaattagtacgattgctgaaggcacacttctcagtgtcatcagagcagtgggatccatttgtattggtgtagcccatacaagcaatcctgtcagtcaacaatttgttgtagatgaaaatgcctttccagtacttatccaactactaagaaatcacccttctcctaacattaaggttgaagtggcattttccttggcatgcattgtcctagggaatgatgtgttacagaaagacttacatgaaaatgaaggatttgaatatgctgatgtcctttatcttcttcactcaacagaaaaggatatttgcttaagagcaggctatgcattaacactttttgccttcaataatcgctttcaacaatacttaatattggaaagtggaataatgaccatatctatttttgaacgttttcttgaatcaacagttgaaactgagaaggcaatggcagcatttcagattgttgtactggctaaagtcattagagatatggaccatattactttgtctgcaagaggtgttactattttagttgatagtctgtattcagttcagacttctactattgtcttgacagggaatttaatagcaagcctggctcattctagagctggtatcccagaagcatttaccacattaggaacaatccaacggctctgctatcatttgtactcgggaatagaagaggttcgtgcagcttgttcctctgctcttggctacttaacatacaatgcaaatgctttccgcatcctattaaaagaatgcaggaataaacctaatcagttcattcgtataaaaaataatatcagcagagatgcaagtattaacccagcatttttaaaggaatttcaaatgcaacaaacactggtgggacttccttccttaagtctggagaagaatggaggaccatccataattcctatctttaaaagagggaaggagcaccgaagaaaattaaaacctaaaattcaaccaaaagattctttgactttattacctcctgtaactaacttcatgggactcttcaaagcaacaaaaaagaccaaggattcccataatattttttctttttcatctacaattacatcagatatcacaaatgtatcaagaccaagaatagtgtgtttgaaccaacttgggaaacatgtccagaaagccaacccagagcctgcagaaggctaataaaacattttagaatg

SEQ ID NO: 342 - protein, 1363 aa, Homo sapiens
MSQMNNVGFSTAILLTPVDPTALLDYREVHQMIRELAIGIYCLNQIPSISLEANYDQSSSCQLPPAYYDTRIGQILINIDYMLKALWHGIYMPKEKRARFSELWRAIMDIDPDGKPQTNKDIFSEFSSAGLTDITKDPDFNEIYDEDVNEDPTYDPNSPEETAVFMKYAENIMLKLTFSTTQIQQYENVFIFETGYWLTNAIKYNQDYLDICTYQRLQQRLYLQKKIIQKHFEKKKDIRRGIGYLKLICFLIPFLLSLKKKMKVPYLSSLLQPFSDDKVKTERELPPFIYGRDFKCQNFHYKENQYFHVHGGIEFDISTPSIENALEDFQKNLEKIRDCAANTFIEDSGYKEYYSIPVMEFHGKSYYVIYFELETFYQQLYKTQWWGAINEIVNNLRLKRLPLTDAQLHEQFKKKLGFKRAMKCKSIPFGMKSAVERGLSAVFHTFSRKTSSSTINVSDEAGYTIFHHAALHNRVSIICQLCNANFKVNQRRFVTFSQGPTPLHLAAQACSLETTVCLLCSKADYTLSEKRGWMPIHFAAFYDNVCIIIALCRKDPSLLEAEATAENQCTPLLLAATSGALDTIQYLFSIGANWRKTDIKGNNIIHLSVLTFHTEVLKYIIKLNIPELPVWKTLVEMLQCESYKRRMMAVMSLEVICLANDQYWRCILDAGTIPALINLLKSSKIKLQCKTVGLLSNISTHKSAVHALVEAGGIPSLINLLVCDEPEVHSRCAVILYDIAQCENKDVIAKYNGIPSLINLLNLNIENVLVNVMNCIRVLCIGNENNQRAVREHKGLPYLIRFLSSDSDVLKAVSSAAIAEVGRDNKEIQDAIAMEGAIPPLVALFKGKQISVQMKGAMAVESLASHNALIQKAFLEKSLTKYLLKLLKAFQIDVKEQGAVALWALAGQTLKQQKYMAEQIGYSFIINMLLSPSAKMQYVGGEAVIALSKDSRMHQNQICEGNGIAPLVRLLRISTIAEGTLLSVIRAVGSICIGVAHTSNPVSQQFVVDENAFPVLIQLLRNHPSPNIKVEVAFSLACIVLGNDVLQKDLHENEGFEYADVLYLLHSTEKDICLRAGYALTLFAFNNRFQQYLILESGIMTISIFERFLESTVETEKAMAAFQIVVLAKVIRDMDHITLSARGVTILVDSLYSVQTSTIVLTGNLIASLAHSRAGIPEAFTTLGTIQRLCYHLYSGIEEVRAACSSALGYLTYNANAFRILLKECRNKPNQFIRIKNNISRDASINPAFLKEFQMQQTLVGLPSLSLEKNGGPSIIPIFKRGKEHRRKLKPKIQPKDSLTLLPPVTNFMGLFKATKKTKDSHNIFSFSSTITSDITNVSRPRIVCLNQLGKHVQKANPEPAEG

SEQ ID NO: 343 - DNA, 2339 bp, Homo sapiens
agattccatcctatttctccgatgaaagtatcaggtacctcacccctaagtttagatttgatgatagttcccttaaaaatgaatgacgaataatctaccccatccttttctcacagtagcaaccaaattccagccaagggcaaaaaaaaaatttctttttaatgtagcttagtgtttggaacttgatgttgtgtagtcagacaaacctgtattcggcctccgctggatcagtcactagctgtgtaattttacagaactctcatcacctgcaaatctgggggaaatgcaggtgcgcacagagagcgttttgggcaaagacggcctttaagcttttcttcactaagcatgccgctcgctagcggaacagcagccagctctggacgggaccttgcacagttccgatgacatcacttccgggcgccaggttcgggctttctcctgcagcgataagggcagtcgacagtctttagtagggaaaggagacaagtgctagctactgccgcccaagtggaaggaattatctatagagtaagtatgctaatcttgactaagactgcaggagttttttttaaaccatcaaaaaggaaagtttatgaatttttaagaagttttaattttcatcctggaacactatttcttcataaaatagtattgggaattgaaactagttgtgatgatacagcagctgctgtggtggatgaaactggaaatgtgttgggagaagcaatacattcccaaactgaagttcatttaaaaacaggtgggattgttcctccagcagctcaacagcttcacagagaaaatattcaacgaatagtacaagaagctctttctgccagtggagtctctccaagtgacctctcagcaattgcaactaccataaaaccaggacttgctttaagcctgggagtgggcttatcatttagcttacagctggtaggacagttaaaaaagccattcattcccattcatcatatggaggctcatgcacttactattaggttgaccaataaagtagaatttccttttttagttcttttgatttctggaggtcactgtctgttggcattagttcaaggagtttcagattttctgcttcttggaaagtctttggacatagcaccaggtgacatgcttgacaaggtggcaagaagactttctttaataaaacatccagagtgctccaccatgagtggtgggaaagccatagaacatttggccaaacaaggaaatagatttcattttgacatcaaacctcccttgcatcatgctaaaaattgtgatttttcttttactggacttcaacacgttactgataaaataataatgaaaaaggaaaaagaggaaggtattgagaaggggcaaatcctgtcttcagcagcagacattgctgccacagtacagcacacaatggcatgtcatcttgtgaaaagaacacatcgggctattctgttttgtaagcagagagacttgttacctcaaaataatgcagtactggttgcatctggtggtgtcgcaagtaacttctatatccgcagagctctggaaattttaacaaatgcaacacagtgcactttgttgtgtcctcctcccagactatgcactgataatggcattatgattgcatggaatggtattgaaagactacgtgctggcttgggcattttacatgacatagaaggcatccgctatgaaccaaaatgtcctcttggagtagacatatcaaaagaagttggagaagcttccataaaagtaccacaattaaaaatggagatatgatttctgctgttcaaaaaagtccctaaagagacaggctcttgccatgttgcccgggctggtcctgaactgctgaattcaagtgatcctcccaccttggcctccagaagtgctgggattatgggtgtgagccaccatgcctagccaaaatgtttcttaaggtatacattttgggtcttagaagacttatacatttgtaatatttattactaaatatctcaaagtattacaataaatgttaccatgtgagctactttgaatcaggcttcttgcacaccaatttaaaaatgttaactcttgatatatacactagttataccactcatgtcagtcaataaattttaaggtttaagtgcaggcctttgtttacagaaatcctaattttttgaaaccataactctgacctgacactaaattcctgtagacatgctaaggaaaatctgcttagtatcgagatcaagaactttcattcaaaaagattattcagttatgttatttgcatattaccattattaaaaataaaaaaatttttaaaagatgaaaaaaaaaaaaaaaaaaaaaaa

SEQ ID NO: 344 - protein, 414 aa, Homo sapiens
MLILTKTAGVFFKPSKRKVYEFLRSFNFHPGTLFLHKIVLGIETSCDDTAAAVVDETGNVLGEAIHSQTEVHLKTGGIVPPAAQQLHRENIQRIVQEALSASGVSPSDLSAIATTIKPGLALSLGVGLSFSLQLVGQLKKPFIPIHHMEAHALTIRLTNKVEFPFLVLLISGGHCLLALVQGVSDFLLLGKSLDIAPGDMLDKVARRLSLIKHPECSTMSGGKAIEHLAKQGNRFHFDIKPPLHHAKNCDFSFTGLQHVTDKIIMKKEKEEGIEKGQILSSAADIAATVQHTMACHLVKRTHRAILFCKQRDLLPQNNAVLVASGGVASNFYIRRALEILTNATQCTLLCPPPRLCTDNGIMIAWNGIERLRAGLGILHDIEGIRYEPKCPLGVDISKEVGEASIKVPQLKMEI

SEQ ID NO: 345 - DNA, 2018 bp, Homo sapiens
taggaaaaaataatcctcgcaacacaggtaccttgtcatgtcagaattgggggtgttaggttgccagttgtatcagtgttgattcatctcattacttcctacagagcaaacatgaacgttggagttgcccacagtgaagtgaatccaaatacccgtgtcatgaacagccggggtatgtggctgacatatgcattgggagttggcttgcttcatattgtcttactcagcattcccttcttcagtgttcctgttgcttggactttaacaaatattatacataatctggggatgtacgtatttttgcatgcagtgaaaggaacacctttcgaaactcctgaccagggtaaagcaaggctcctaactcattgggaacaactggactatggagtacagtttacatcttcacggaagtttttcacaatttctccaataattctatattttctggcaagtttctatacgaagtatgatccaactcacttcatcctaaacacagcttctctcctgagtgtactaattcccaaaatgccacaactacatggtgttcggatctttggaattaataagtattgaaatgttttgaaactgaaaaaaaattttacagctactgaatttcttataaggaaggagtggttagtaaactgcactgtttctctgataatgtgaaatgagaagtatttacattggagggccaatggctggtccttcaagtgctgttttgaagtgcagatttccattaaatgatgcctctgtttaatacacctggtacatttctgaagaggggctttataagcaggctgggcaggcccagcttataagttaaagggcatcacagtgagggtgtagtagataaattcaaggaaataagagatttgtaagaaactaggaccagcttaacttataatgaatgggcattgtgttaagaaaagaacatttccagtcattcagctgtggttatttaaagcagacttacatgtaaaccggaatcctctctatacaagtttattaaagattatttttattaccgtacatatttctcttgttttatgtaagcggatgtatatcctcttgttttatacaagccagttcccacttatgagggtacttttttggttttgctggcttaatattgtgtattggtcaatgaggccatttttacatttattacgttacagagttcatggaggttcacctttgtgactgattggtgataaaagatagccaagtgtcttacaagcagcctctgagtcaagtgttctaattttggaacaaagcaggttttactgcttttccagacacaaggctgctaaaccaattaagaaaataattaatttctttcaagcaactaaaaaatatatggtaatttaaaggtgtctgcttatttggttgaacaatttaattgggaaagtttgtcatcatttgaaaaaggaaatataaaaggaacaaccatatagccaacctgtggtctggcagaaacaacgtctctagcaatagtaccaaagtaagtaatggagtcttttttttggcaggtctgcagtaaaagataacattttcttttcttagtcctcctgctctcaacccccatattttgcctttgaatacgtgggttttagtatatatagcccaaaatggtaactgtctccagaacagcaaccacattgaattcttgtgacttaggaaagcttcttatagttgctgacattaattgcaagaaataactatatactactttgagaagtaaacatgtcaaaaaaaacaaagttcagatatgggacaaaatttaaaaattcagtaacatttataaacagaattgaatgaaaagagttacagaccaacttaaacatcaattcgtgtcagtaaactgacttttgggggtaatgatcattgttttgtatctcaaaagtattgagtttagaaatcagttatatgatactacctttgtatgtctgtcttttcccgtgtatttttaaataactggtgatctataatttaataaaatttttcgttggtgtaatatt

SEQ ID NO: 346 - protein, 153 aa, Homo sapiens
MNVGVAHSEVNPNTRVMNSRGMWLTYALGVGLLHIVLLSIPFFSVPVAWTLTNIIHNLGMYVFLHAVKGTPFETPDQGKARLLTHWEQLDYGVQFTSSRKFFTISPIILYFLASFYTKYDPTHFILNTASLLSVLIPKMPQLHGVRIFGINKY

SEQ ID NO: 347 - DNA, 3239 bp, Homo sapiens
ctcgctgccagcggattggctgcgagcagcgccaatctcacgttgcccccgggcgaggcgggactcagtgccgcgctctctgcacccgctctgccgcgcgcgtgcgtgctgggtgcgggtgcgggtgcggggttgggcctgcgcatcgggtgagacgctggctgcttgcggctagtggatggtaattgcctgcctcgcgctagcaggaagctgctctgttaaaagcgaaaatgaaacaattgcctgcggcaacagttcgactcctttcaagttctcagatcatcacttcggtggtcagtgttgtaaaagagcttattgaaaactccttggatgctggtgccacaagcgtagatgttaaactggagaactatggatttgataaaattgaggtgcgagataacggggagggtatcaaggctgttgatgcacctgtaatggcaatgaagtactacacctcaaaaataaatagtcatgaagatcttgaaaatttgacaacttacggttttcgtggagaagccttggggtcaatttgttgtatagctgaggttttaattacaacaagaacggctgctgataattttagcacccagtatgttttagatggcagtggccacatactttctcagaaaccttcacatcttggtcaaggtacaactgtaactgctttaagattatttaagaatctacctgtaagaaagcagttttactcaactgcaaaaaaatgtaaagatgaaataaaaaagatccaagatctcctcatgagctttggtatccttaaacctgacttaaggattgtctttgtacataacaaggcagttatttggcagaaaagcagagtatcagatcacaagatggctctcatgtcagttctggggactgctgttatgaacaatatggaatcctttcagtaccactctgaagaatctcagatttatctcagtggatttcttccaaagtgtgatgcagaccactctttcactagtctttcaacaccagaaagaagtttcatcttcataaacagtcgaccagtacatcaaaaagatatcttaaagttaatccgacatcattacaatctgaaatgcctaaaggaatctactcgtttgtatcctgttttctttctgaaaatcgatgttcctacagctgatgttgatgtaaatttaacaccagataaaagccaagtattattacaaaataaggaatctgttttaattgctcttgaaaatctgatgacgacttgttatggaccattacctagtacaaattcttatgaaaataataaaacagatgtttccgcagctgacatcgttcttagtaaaacagcagaaacagatgtgctttttaataaagtggaatcatctggaaagaattattcaaatgttgatacttcagtcattccattccaaaatgatatgcataatgatgaatctggaaaaaacactgatgattgtttaaatcaccagataagtattggtgactttggttatggtcattgtagtagtgaaatttctaacattgataaaaacactaagaatgcatttcaggacatttcaatgagtaatgtatcatgggagaactctcagacggaatatagtaaaacttgttttataagttccgttaagcacacccagtcagaaaatggcaataaagaccatatagatgagagtggggaaaatgaggaagaagcaggtcttgaaaactcttcggaaatttctgcagatgagtggagcaggggaaatatacttaaaaattcagtgggagagaatattgaacctgtgaaaattttagtgcctgaaaaaagtttaccatgtaaagtaagtaataataattatccaatccctgaacaaatgaatcttaatgaagattcatgtaacaaaaaatcaaatgtaatagataataaatctggaaaagttacagcttatgatttacttagcaatcgagtaatcaagaaacccatgtcagcaagtgctctttttgttcaagatcatcgtcctcagtttctcatagaaaatcctaagactagtttagaggatgcaacactacaaattgaagaactgtggaagacattgagtgaagaggaaaaactgaaatatgaagagaaggctactaaagacttggaacgatacaatagtcaaatgaagagagccattgaacaggagtcacaaatgtcactaaaagatggcagaaaaaagataaaacccaccagcgcatggaatttggcccagaagcacaagttaaaaacctcattatctaatcaaccaaaacttgatgaactccttcagtcccaaattgaaaaaagaaggagtcaaaatattaaaatggtacagatccccttttctatgaaaaacttaaaaataaattttaagaaacaaaacaaagttgacttagaagagaaggatgaaccttgcttgatccacaatctcaggtttcctgatgcatggctaatgacatccaaaacagaggtaatgttattaaatccatatagagtagaagaagccctgctatttaaaagacttcttgagaatcataaacttcctgcagagccactggaaaagccaattatgttaacagagagtctttttaatggatctcattatttagacgttttatataaaatgacagcagatgaccaaagatacagtggatcaacttacctgtctgatcctcgtcttacagcgaatggtttcaagataaaattgataccaggagtttcaattactgaaaattacttggaaatagaaggaatggctaattgtctcccattctatggagtagcagatttaaaagaaattcttaatgctatattaaacagaaatgcaaaggaagtttatgaatgtagacctcgcaaagtgataagttatttagagggagaagcagtgcgtctatccagacaattacccatgtacttatcaaaagaggacatccaagacattatctacagaatgaagcaccagtttggaaatgaaattaaagagtgtgttcatggtcgcccattttttcatcatttaacctatcttccagaaactacatgattaaatatgtttaagaagattagttaccattgaaattggttctgtcataaaacagcatgagtctggttttaaattatctttgtattatgtgtcacatggttattttttaaatgaggattcactgacttgtttttatattgaaaaaagttccacgtattgtagaaaacgtaaataaactaatatagactattcaaaaaaaaaaaaaaaaaa

SEQ ID NO: 348 - protein, 932 aa, Homo sapiens
MKQLPAATVRLLSSSQIITSVVSVVKELIENSLDAGATSVDVKLENYGFDKIEVRDNGEGIKAVDAPVMAMKYYTSKINSHEDLENLTTYGFRGEALGSICCIAEVLITTRTAADNFSTQYVLDGSGHILSQKPSHLGQGTTVTALRLFKNLPVRKQFYSTAKKCKDEIKKIQDLLMSFGILKPDLRIVFVHNKAVIWQKSRVSDHKMALMSVLGTAVMNNMESFQYHSEESQIYLSGFLPKCDADHSFTSLSTPERSFIFINSRPVHQKDILKLIRHHYNLKCLKESTRLYPVFFLKIDVPTADVDVNLTPDKSQVLLQNKESVLIALENLMTTCYGPLPSTNSYENNKTDVSAADIVLSKTAETDVLFNKVESSGKNYSNVDTSVIPFQNDMHNDESGKNTDDCLNHQISIGDFGYGHCSSEISNIDKNTKNAFQDISMSNVSWENSQTEYSKTCFISSVKHTQSENGNKDHIDESGENEEEAGLENSSEISADEWSRGNILKNSVGENIEPVKILVPEKSLPCKVSNNNYPIPEQMNLNEDSCNKKSNVIDNKSGKVTAYDLLSNRVIKKPMSASALFVQDHRPQFLIENPKTSLEDATLQIEELWKTLSEEEKLKYEEKATKDLERYNSQMKRAIEQESQMSLKDGRKKIKPTSAWNLAQKHKLKTSLSNQPKLDELLQSQIEKRRSQNIKMVQIPFSMKNLKINFKKQNKVDLEEKDEPCLIHNLRFPDAWLMTSKTEVMLLNPYRVEEALLFKRLLENHKLPAEPLEKPIMLTESLFNGSHYLDVLYKMTADDQRYSGSTYLSDPRLTANGFKIKLIPGVSITENYLEIEGMANCLPFYGVADLKEILNAILNRNAKEVYECRPRKVISYLEGEAVRLSRQLPMYLSKEDIQDIIYRMKHQFGNEIKECVHGRPFFHHLTYLPETT

SEQ ID NO: 349 - DNA, 1748 bp, Homo sapiens
ggccattttgtgaagagacgaagactgagcggttgcggccgcgttgccgacctccagcagcagtcggcttctctacgcagaacccgggagtaggagactcagaatcgaatctcttctccctccccttcttgttttcggctttgtgagaaaccttaccatcaaacacaatggccagcaacgttaccaacaagacagatcctcgttccatgaactcccgtgtattcattgggaatctcaacactcttgtggtcaagaaatctgatgtggaggcaatcttttcgaagtatggcaaaattgtgggctgctctgttcataagggctttgccttctttcagtatgttaatgagagaaatgcccgggctgctgtagcaggagaggatggcagaatgattgctggccaggttttagatattaacctggctgcagagccaaaagtgaaccgaggaaaagcaggtgtgaaacgatctgcagcggagatgtacggctcctcttttgacttggattgtgactttcaacgggactattatgataggatgtacagttacccagcacgtgtacctcctcctcctcctattgctcgggctgtagtgccctcgaaacgtcagcgtgtatcaggaaacacttcacaaaggggcataagtggcttcaattctaagagtggacagcggggatcttccaagtctggaaagttgaaaggagatgaccttcaggccattaagagggagctgacccagataaaacaaaaagtggattctttcctggaaaacctggaaaaaattgaaaaggaacagagcaaacaagcagtagagatgaacaatgttaagtcagaagaggagcagagcagcagctccgtgaagaaagatgagactaatgtgaagatggagtctgaggggggtgcagatgactctgctgaggagggggacctactggatgatgatgataatgaagatggggggatgaccagctggagttgatcaaggatgatgaaaaagaggctgaggaaggagaggatgacagagacagcgccaatggcgaggatgactcttaagcacatagtggggtttagaaatcttatcccattatttctttacctaggcgcttgtctaagatcaaatttttcaccagatcctctcccctagtatcttcagcacatgctcactgttttccccatccttgtccttcccatgttcattaattaattcatattgccccgcgcctagtcccattttcacttcctttgacgctcctagtagttttgttaagtcttaccctgtaatttttgcttttaattttgatacctctttatgacttaacaataaaaatgatgtatggtttttatcaactgtctccaaaataatctcttgttatgcagggagtacagttcttttcattcatacataagttcagtagttgcttccctaactgcaaaggcaatctcatttagttgagtagctcttgaaagcagctttgagttagaagtatgtgtgttacacccccacattagtgtgctgtgtggggcagttcaacacaaatgtaacaatgtatttttgtgaatgagagttggcatgtcaaatgcatcctctagaaaaataattagtgttatagtcttaagatttgttttctaaagttgatactgtgggttatttttgtgaacagcctgatgtttgggaccttttttcctcaaaataaacaagtccttattaaaccaggggaaaaaataaataaataaataaataaataaaaataag

SEQ ID NO: 350 - DNA, 2823 bp, Homo sapiens
agattcactggtgtggcaagttgtctctcagactgtacatgcattaaaattttgcttggcattactcaaaagcaaaagaaaagtaaaaggaagaaacaagaacaagaaaaaagattatattgattttaaaatcatgcaaaaactgcaactctgtgtttatatttacctgtttatgctgattgttgctggtccagtggatctaaatgagaacagtgagcaaaaagaaaatgtggaaaaagaggggctgtgtaatgcatgtacttggagacaaaacactaaatcttcaagaatagaagccattaagatacaaatcctcagtaaacttcgtctggaaacagctcctaacatcagcaaagatgttataagacaacttttacccaaagctcctccactccgggaactgattgatcagtatgatgtccagagggatgacagcagcgatggctctttggaagatgacgattatcacgctacaacggaaacaatcattaccatgcctacagagtctgattttctaatgcaagtggatggaaaacccaaatgttgcttctttaaatttagctctaaaatacaatacaataaagtagtaaaggcccaactatggatatatttgagacccgtcgagactcctacaacagtgtttgtgcaaatcctgagactcatcaaacctatgaaagacggtacaaggtatactggaatccgatctctgaaacttgacatgaacccaggcactggtatttggcagagcattgatgtgaagacagtgttgcaaaattggctcaaacaacctgaatccaacttaggcattgaaataaaagctttagatgagaatggtcatgatcttgctgtaaccttcccaggaccaggagaagatgggctgaatccgtttttagaggtcaaggtaacagacacaccaaaaagatccagaagggattttggtcttgactgtgatgagcactcaacagaatcacgatgctgtcgttaccctctaactgtggattttgaagcttttggatgggattggattatcgctcctaaaagatataaggccaattactgctctggagagtgtgaatttgtatttttacaaaaatatcctcatactcatctggtacaccaagcaaaccccagaggttcagcaggcccttgctgtactcccacaaagatgtctccaattaatatgctatattttaatggcaaagaacaaataatatatgggaaaattccagcgatggtagtagaccgctgtgggtgctcatgagatttatattaagcgttcataacttcctaaaacatggaaggttttcccctcaacaattttgaagctgtgaaattaagtaccacaggctataggcctagagtatgctacagtcacttaagcataagctacagtatgtaaactaaaagggggaatatatgcaatggttggcatttaaccatccaaacaaatcatacaagaaagttttatgatttccagagtttttgagctagaaggagatcaaattacatttatgttcctatatattacaacatcggcgaggaaatgaaagcgattctccttgagttctgatgaattaaaggagtatgctttaaagtctatttctttaaagttttgtttaatatttacagaaaaatccacatacagtattggtaaaatgcaggattgttatataccatcattcgaatcatccttaaacacttgaatttatattgtatggtagtatacttggtaagataaaattccacaaaaatagggatggtgcagcatatgcaatttccattcctattataattgacacagtacattaacaatccatgccaacggtgctaatacgataggctgaatgtctgaggctaccaggtttatcacataaaaaacattcagtaaaatagtaagtttctcttttcttcaggggcattttcctacacctccaaatgaggaatggattttctttaatgtaagaagaatcatttttctagaggttggctttcaattctgtagcatacttggagaaactgcattatcttaaaaggcagtcaaatggtgtttgtttttatcaaaatgtcaaaataacatacttggagaagtatgtaattttgtctttggaaaattacaacactgcctttgcaacactgcagtttttatggtaaaataatagaaatgatcgactctatcaatattgtataaaaagactgaaacaatgcatttatataatatgtatacaatattgttttgtaaataagtgtctccttttttatttactttggtatatttttacactaaggacatttcaaattaagtactaaggcacaaagacatgtcatgcatcacagaaaagcaactacttatatttcagagcaaattagcagattaaatagtggtcttaaaactccatatgttaatgattagatggttatattacaatcattttatatttttttacatgattaacattcacttatggattcatgatggctgtataaagtgaatttgaaatttcaatggtttactgtcattgtgtttaaatctcaacgttccattattttaatacttgcaaaaacattactaagtataccaaaataattgactctattatctgaaatgaagaataaactgatgctatctcaacaataactgttacttttattttataatttgataatgaatatatttctgcatttatttacttctgttttgtaaattgggattttgttaatcaaatttattgtactatgactaaatgaaattatttcttacatctaatttgtagaaacagtataagttatattaaagtgttttcacatttttttgaaagacaaaaa

SEQ ID NO: 351 - protein, 375 aa, Homo sapiens
MQKLQLCVYIYLFMLIVAGPVDLNENSEQKENVEKEGLCNACTWRQNTKSSRIEAIKIQILSKLRLETAPNISKDVIRQLLPKAPPLRELIDQYDVQRDDSSDGSLEDDDYHATTETIITMPTESDFLMQVDGKPKCCFFKFSSKIQYNKVVKAQLWIYLRPVETPTTVFVQILRLIKPMKDGTRYTGIRSLKLDMNPGTGIWQSIDVKTVLQNWLKQPESNLGIEIKALDENGHDLAVTFPGPGEDGLNPFLEVKVTDTPKRSRRDFGLDCDEHSTESRCCRYPLTVDFEAFGWDWIIAPKRYKANYCSGECEFVFLQKYPHTHLVHQANPRGSAGPCCTPTKMSPINMLYFNGKEQIIYGKIPAMVVDRCGCS

SEQ ID NO: 352 - DNA, 810 bp, Homo sapiens
atgcaagtctacgattcctcccgatcactcgctgcaaagcttggtctgcagaatcgacaaatgtggctgcaaaactctggggccggcgcgcacaacccacatcgcacacccccagagcgccgtgtgacgcccccagccccgttagcaaaacggactcggcaccccaacctttctcggagggaaaatgcacgagtcagggccgcgctccccgccgccctggcacacagaatgtctccgggaatcgcccacacgagcccggggccgccctctccttccggcggcggccgcgcggagcccgcttcccccggacaccgcccccaaagtgcccgcgtggccccgcgactcagccgccccaagttcgcccgtggccgctcagccgcgaaagtgtcccgcacttggcggaccgggagtggcgaccgtccgctccggtacgtactcagccagcggctgcagcggtcttggcgcgctctccccgaggactgctcagccccaactccgaagcgacggcccccggctctccctcctctggcggctgcaggagccgggacgcccccgctcccatcgaggggggaagggaaggtggtgggcgcgctctctctgctcccccccacctcgggcccgccgcttcttcccgcccacccgccccgacggcgctcgcttggccgcggcggcggcggcgctgggaggaaccaagtgggcgccgggagtgggcggctcccgcgagtcccgctccgggcgcggggaggggacgacaaagagggagacgggtggggaacgccgcctccggcctgctctccagctgcggagtga

SEQ ID NO: 353 - protein, 269 aa, Homo sapiens
MQVYDSSRSLAAKLGLQNRQMWLQNSGAGAHNPHRTPPERRVTPPAPLAKRTRHPNLSRRENARVRAALPAALAHRMSPGIAHTSPGPPSPSGGGRAEPASPGHRPQSARVAPRLSRPKFARGRSAAKVSRTWRTGSGDRPLRYVLSQRLQRSWRALPEDCSAPTPKRRPPALPPLAAAGAGTPPLPSRGEGKVVGALSLLPPTSGPPLLPAHPPRRRSLGRGGGGAGRNQVGAGSGRLPRVPLRARGGDDKEGDGWGTPPPACSPAAE

SEQ ID NO: 354 - DNA, 4499 bp, Homo sapiens
gccgccgccgcggccaagcgagcgccgtcggggcgggtgggcgggaagaagcggcgggcccgaggtgggggggagcagagagagcgcgcccaccaccttcccttcccccctcgatgggagcgggggcgtcccggctcctgcagccgccagaggagggagagccgggggccgtcgcttcggagttggggctgagcagtcctcggggagagcgcgccaagaccgctgcagccgctggctgacggaaggagagttttacatggaagtggcttacagaaacttggcgctgaggtgcagggaagccagaaactctttgtgtctctaaggccgatgaggaatttggaaacacatgtgggacatacaagcgttggatatagaggactgagcagggggaggaacatttaagctgatggaagtggaagtggaagttgctgtacattggcagcaaggcctccgagttagcttttgaatgcagttaactggtttctcttaactgtggaattcattgaaaagtcagactccgagtggtcgttccaggatatcttgaaaagcccaggttaaacccatccagagtaatggctgcggccttacccaggaccctgggggagttgcagctgtatagaatattacaaaaagccaatctactttcttattttgatgcctttatccaacaaggtggtgatgatgtccagcaactctgtgaagcaggagaagaggagtttttggaaatcatggcactcgtgggcatggctagcaagccccttcatgttagaaggctgcagaaggctttgagagactgggtcacaaaccctgggcttttcaatcagccactgacttcccttcctgtcagtagcatacccatctataaattaccagagggatcaccaacatggctgggaatatcctgcagtagttatgaaaggagtagcaatgcccgggaacctcatttaaaaatccccaaatgtgctgccaccacctgtgtgcagagcttgggacaggggaagtcagatgtggttgggagcctagcactgcagagtgttggtgagtccagactctggcaaggccaccatgccactgagagcgagcacagcctctccccagcagacctgggctcccccgcgtccccaaaggagagcagtgaggcgctggatgctgctgctgcgctctctgtggctgagtgtgtggagcggatggcccccacactgccaaaaagtgacttgaatgaagtgaaagagctgctaaaaaccaacaagaagttggccaaaatgattggtcacatctttgagatgaacgatgatgatccacacaaagaggaggaaattcggaaatacagtgcaatatatggcagatttgactcaaagaggaaggatgggaaacatctcacacttcatgagctcactgttaatgaagcggctgctcaactctgtgtgaaggataatgccctgctgacaagaagagatgagctttttgccttggctcgacagatttctcgagaagtcacctataaatatacttacagaaccaccaagtcaaaatgtggagaaagagatgaattatccccaaagagaattaaagtggaggatgggtttccagatttccaggattctgtgcaaacactcttccagcaggctagagctaagagtgaagaacttgcagctcttagttcacagcagcctgaaaaggtgatggcaaagcagatggagttcctttgcaaccaagctggctatgagagactgcagcatgccgagaggaggttgtctgcagggctttacaggcagagctcagaagagcacagtcctaacggcttgacttccgataactcagatggacaaggagaaagacctttgaatctccgaatgcctaatttacagaacagacaaccccatcattttgtggtggatggggagctgagcagactttaccccagtgaggcaaagtcccactcatcagagagccttgggattttaaaagactaccctcattcagcttttaccttagaaaagaaagtcatcaaaacagagcctgaagattcaagatagctgtgatttctctcaccgttctctggaaatggcatcagatttaaggataatactccatcatagaaataagccttaataaccagtgttgcctcattcagctcaaacagatttcatagccaaagcaaaaggactggtacggtagtctgtggaaaccaggaagataaaacaacagccacaaaagagaaaatcaagagtgttgcaatctataacagtaatattgattcattcacattcctgtgttaagtcattttatatggaaaggcttacaaatcaatattgtaagcattcattatttaagaatgtacaatgtatttgtgtaatttatagaagtaaaatctagatgttgagacctgtttggtctaatagatgtggatacagtttattttacttgaaattttgttgtctactttgtgtgtttaacgtaaatatatgtcagagtttagaatctgcctgcagttgtgaaaaagaaagcttaagtgatgcagttattggcaagattgcaatgattatggaaaaatagaaagcgaatactcagtttaagccaaggaaaatattgtggatttaatatttgataaaactgattttgtttaacaggaaatttttagcattcagtcatataacatctggttatcaatgcacgtttacacaataaatacttgagtggaggaaagttaaaaagatgagcaatagagtagaaaatatatcttaaactagttgacctagattgtattaatagctacttaagatgtttcaaagataggaagctattgcttggacagagaacttgaaataagtggacccatgtataaaagctttgacttaaacattgatatttcagaatgtgttaaatagattaagacacagtaagttaaccctacatgttataaagatggcgactgttaacaaaggctgtaacagattaagtactattttatatccagaaagtcttctctatgtagagaagtcagagagactagatgctttcactagggaatgtcttcccacccagccatcacaaatgtggacaatcactgcatccacatctgtaggcatatttctatggaagtttaattgacagctatattcattatttattttacaatttcatttttctacacctttgagatttatgaatgcagttttttcttaaaatttattttaacttgacagtatgtttttagttcccccaatttaattaatggaccatgtgcatatatatgggagtgtgcttacatgttaataatttacttgcatacttatgagaatttcacattggaattcataatggtaaaacaacatacatctgccaatatacgttttttctgttggtttaagagaagataactgacagctttacctacttcctacagatgcatctaaacccagatattactgagaagagtgtattgactctgagtgtaagagagtatgtgtttttttgtttttagttctgctctagatcataattgtaaaaaatattaagtcataatctgttacactaaaatttgtcagccaaatgttagatgaaatgtctgcactgtagtctcagatcactgtcacgtatataaattgcttcttcattttaatttgtagaagtactttacagtaggaaacgccagtaaacaacttttatactgttaaaaggcttttttccccttcctaaatgttttaattgtaccatagtgttttgctcactgaagaagcttcttatggaccttgcaactttgttgctagcttgaggttgattattgtggttgtattgttcactgtgtgtagaaatagtatgagtacgatttcaatagactgttcagtttttaatattagccatagcactggttagtatatctcagtagtttcatgaaacgtttcctgtattctaatctattttgaaacattttgtttttttttaattgtgtcttacagtcaagtttgtagattttcataagccacaattttaaaagatgcagtaatcttccaacttccaatatttatccattcgttgtggacccacagattgcatctttaaattcataataagtttccttaactatcttatgtttctagtctttcaagcttagtgataaggtggaagcacaagaaaaatttcagtagaatacagtttttattttgtaaacactaatgtattaaacttgctatacattaaagcaaataatatatatttttatttgaattgtatatgtgaattggaagttataattagttgattttttcattttgttagaggtattttcactgaacaaggtcaattggttacctcagtattacagccaatatagtccaagggaccatttctccccgagtctcttacactttattgtgcgatgtccacgtttttgtgactcttcaagctgttggtgaggtgggacgaatgcacttgcttcctgtggcaataaagattttctgtgcctcacaaaaaaaaaaaaaaaaaaaaaaaaaaaaaaa

SEQ ID NO: 355 - protein, 487 aa, Homo sapiens
MAAALPRTLGELQLYRILQKANLLSYFDAFIQQGGDDVQQLCEAGEEEFLEIMALVGMASKPLHVRRLQKALRDWVTNPGLFNQPLTSLPVSSIPIYKLPEGSPTWLGISCSSYERSSNAREPHLKIPKCAATTCVQSLGQGKSDVVGSLALQSVGESRLWQGHHATESEHSLSPADLGSPASPKESSEALDAAAALSVAECVERMAPTLPKSDLNEVKELLKTNKKLAKMIGHIFEMNDDDPHKEEEIRKYSAIYGRFDSKRKDGKHLTLHELTVNEAAAQLCVKDNALLTRRDELFALARQISREVTYKYTYRTTKSKCGERDELSPKRIKVEDGFPDFQDSVQTLFQQARAKSEELAALSSQQPEKVMAKQMEFLCNQAGYERLQHAERRLSAGLYRQSSEEHSPNGLTSDNSDGQGERPLNLRMPNLQNRQPHHFVVDGELSRLYPSEAKSHSSESLGILKDYPHSAFTLEKKVIKTEPEDSR

SEQ ID NO: 356 - DNA, 4949 bp, Homo sapiens
cgccccactcggcgggtcggtgccgccgggtcccaggtgcccgctacttcccagaacctccgcctcccgctccgggccctcgaaccagcgcggacaccacaatggaccgggcgtccgagctgctcttctacgtgaacggccgcaaggtgatagaaaaaaatgtcgatcctgaaacaatgctgttgccttatttgaggaagaagcttcgactcacaggaactaagtatggctgtggaggaggaggctgtggtgcttgtacagtgatgatatcacgatacaaccccatcaccaagaggataaggcatcacccagccaatgcctgtctgattcccatctgttctctgtatggtgctgccgtcaccacagtagaaggcataggaagcacccacaccagaattcatcctgttcaggagaggattgccaagtgtcatggcacccagtgtggcttctgcacacctgggatggtgatgtccatctacacgctgctcaggaaccacccagagcccactctggatcagttaactgatgcccttggtggtaacctgtgccgttgcactggatacaggcccataattgatgcatgcaagactttctgtaaaacttcgggctgctgtcaaagtaaagaaaatggggtttgctgtttggatcaaggaatcaatggattgccagaatttgaggaaggaagtaagacaagtccaaaactcttcgcagaagaggagtttctgccattggatccaacccaggaactgatatttcctcctgagctaatgataatggctgagaaacagtcgcaaaggaccagggtgtttggcagtgagagaatgatgtggttttcccccgtgaccctgaaggaactgctggaatttaaattcaagtatccccaggctcctgttatcatgggaaacacctctgtggggcctgaagtgaaatttaaaggcgtctttcacccagttataatttctcctgatagaattgaagaactgagtgttgtaaaccatgcatataatggactcacccttggtgctggtctcagcctagcccaggtgaaggacattttggctgatgtagtccagaagcttccagaggagaagacacagatgtaccatgctctcctgaagcatttgggaactctggctgggtcccagatcaggaacatggcttctttagggggacacatcattagcaggcatccagattcagatctgaatcccatcctggctgtgggtaactgtaccctcaacttgctatcaaaagaaggaaaacgacagattcctttaaatgagcaattcctcagcaagtgccctaatgcagatcttaagcctcaagaaatcttggtctcagtgaacatcccctactcaaggaagtgggaatttgtgtcagccttccgacaagcccagcgacaggagaatgcgctagcgatagtcaattcaggaatgagagtcttttttggagaaggggatggcattattagagagttatgcatctcatatggaggcgttggtccagccaccatctgtgccaagaattcctgccagaaactcattggaaggcactggaacgaacagatgctggatatagcctgcaggcttattctgaatgaagtctcccttttgggctcggcgccaggtgggaaagtggagttcaagaggactctcatcatcagcttcctcttcaagttctacctggaagtgtcacagattttgaaaaagatggatccagttcactatcctagccttgcagacaagtatgaaagtgctttagaagatcttcattccaaacatcactgcagtacattaaagtaccagaatataggcccaaagcagcatcctgaagacccaattggccaccccatcatgcatctgtctggtgtgaagcatgccacgggggaggccatctactgtgatgacatgcctctggtggaccaggaacttttcttgacttttgtgactagttcaagagctcatgctaagattgtgtctattgatctgtcagaagctctcagcatgcccggtgtggtggacatcatgacagcagaacatcttagtgacgtcaactccttctgcttttttactgaagctgagaaatttctggcgacagataaggtgttctgtgtgggtcagcttgtctgtgctgtgcttgccgattctgaggttcaggcaaagcgagctgctaagcgagtgaagattgtctatcaagacttggagccgctgatactaacaattgaggaaagtatacaacacaactcctccttcaagccagaaaggaaactggaatatggaaatgttgacgaagcatttaaagtggttgatcaaattcttgaaggtgaaatacatatgggaggtcaagaacatttttatatggaaacccaaagcatgcttgtcgttcccaagggagaggatcaagaaatggatgtctacgtgtccacacagtttcccaaatatatacaggacattgttgcctcaaccttgaagctcccagctaacaaggtcatgtgccatgtaaggcgtgttggtggagcgtttggagggaaggtgttaaaaaccggaatcattgcagccgtcactgcatttgccgcaaacaaacatggccgtgcagttcgctgtgttctggaacgaggagaagacatgttaataactggaggccgccatccttaccttggaaagtacaaagctggattcatgaacgatggcagaatcttggccctggacatggagcattacagcaatgcaggcgcctccttggatgaatcattattcgtgatagaaatgggacttctgaaaatggacaatgcttacaagtttcccaatctccgctgccggggttgggcatgcagaaccaaccttccatccaacacagcttttcgtgggtttggctttcctcaggcagcgctgatcaccgaatcttgtatcacggaagttgcagccaaatgtggactatcccctgagaaggtgcgaatcataaacatgtacaaggaaattgatcaaacaccctacaaacaagagatcaatgccaagaacctaatccagtgttggagagaatgtatggccatgtcttcctactccttgaggaaagttgctgtggaaaagttcaatgcagagaattattggaagaagaaaggactggccatggtccccctgaagtttcctgttggccttggctcacgtgctgctggtcaggctgctgccttggttcacatttatcttgatggctctgtgctggtcactcacggtggaattgaaatggggcagggggtccacactaaaatgattcaggtggtcagccgtgaattaagaatgccaatgtcgaatgtccacctgcgtggaacaagcacagaaactgtccctaatgcaaatatctctggaggttctgtggtggcagatctcaacggtttggcagtaaaggatgcctgtcaaactcttctaaaacgcctcgaacccatcatcagcaagaatcctaaaggaacttggaaagactgggcacagactgcttttgatgaaagcattaacctttcagctgttggatacttcagaggttatgagtcagacatgaactgggagaaaggcgaaggccagcccttcgaatactttgtttatggagctgcctgttccgaggttgaaatagactgcctgacgggggatcataagaacatcagaacagacattgtcatggatgttggctgcagtataaatccagccattgacataggccagattgaaggtgcatttattcaaggcatgggactttatacaatagaggaactgaattattctccccagggcattctgcacactcgtggtccagaccaatataaaatccctgccatctgtgacatgcccacggagttgcacattgctttgttgcctccttctcaaaactcaaatactctttattcatctaagggtctgggagagtcgggggtgttcctggggtgttccgtgtttttcgctatccatgacgcagtgagtgcagcacgacaggagagaggcctgcatggacccttgacccttaatagtccactgaccccggagaagattaggatggcctgtgaagacaagttcacaaaaatgattccgagagatgaacctggatcctacgttccttggaatgtacccatctgaatcaaatgcaaacttctggagaaaacagagtgcctcttcccagatggcaatctgtcctatctctgtgctggaagatgctagatctgaaagacagagtttccacagttcagaaatcatcccacagtgttgcttttctatggagctgatttaaagtattccatttagatttgatagatatgcttaagcaatctataaatcattttcaatgttataaacactaattggtttcctctagggtgatattcgtcattactctgtctcttcaatccatccagctaaatggaataggtgatgacttgcatgtgactcctacttggcttctatccaccaacagaaattataccatatagtgaaaggcaattttctaaataatttcattactaatatgaactgtgaagttgtcattttttcatttgtccttttctgctatcaccttcctcttgtcagaatgaatatagacactgtatctaagtgggaccaaagaaaaaatagcgaactttcaccaaagttttcatgaaaacccaaaagctttaaaagttactatcaagaaattgaaaggaaacccacagaataggataaaatatttgtaaatcatatatttgataaaagtcttgtaaccagatacataaagagctcttacaactcaataaaaggcaagtaatttaaaaataggcaaaagaattgctggatggtatggtagttctatttttagtttttaccctaactactctgacttgatcatttaacattctgtgtatgtaacaaaatatcacatgcataaatattatgtatcaataaaattttttaatgggcaaaaaaaaaaaaaaaaaa

SEQ ID NO: 357 - protein, 1338 aa, Homo sapiens
MDRASELLFYVNGRKVIEKNVDPETMLLPYLRKKLRLTGTKYGCGGGGCGACTVMISRYNPITKRIRHHPANACLIPICSLYGAAVTTVEGIGSTHTRIHPVQERIAKCHGTQCGFCTPGMVMSIYTLLRNHPEPTLDQLTDALGGNLCRCTGYRPIIDACKTFCKTSGCCQSKENGVCCLDQGINGLPEFEEGSKTSPKLFAEEEFLPLDPTQELIFPPELMIMAEKQSQRTRVFGSERMMWFSPVTLKELLEFKFKYPQAPVIMGNTSVGPEVKFKGVFHPVIISPDRIEELSVVNHAYNGLTLGAGLSLAQVKDILADVVQKLPEEKTQMYHALLKHLGTLAGSQIRNMASLGGHIISRHPDSDLNPILAVGNCTLNLLSKEGKRQIPLNEQFLSKCPNADLKPQEILVSVNIPYSRKWEFVSAFRQAQRQENALAIVNSGMRVFFGEGDGIIRELCISYGGVGPATICAKNSCQKLIGRHWNEQMLDIACRLILNEVSLLGSAPGGKVEFKRTLIISFLFKFYLEVSQILKKMDPVHYPSLADKYESALEDLHSKHHCSTLKYQNIGPKQHPEDPIGHPIMHLSGVKHATGEAIYCDDMPLVDQELFLTFVTSSRAHAKIVSIDLSEALSMPGVVDIMTAEHLSDVNSFCFFTEAEKFLATDKVFCVGQLVCAVLADSEVQAKRAAKRVKIVYQDLEPLILTIEESIQHNSSFKPERKLEYGNVDEAFKVVDQILEGEIHMGGQEHFYMETQSMLVVPKGEDQEMDVYVSTQFPKYIQDIVASTLKLPANKVMCHVRRVGGAFGGKVLKTGIIAAVTAFAANKHGRAVRCVLERGEDMLITGGRHPYLGKYKAGFMNDGRILALDMEHYSNAGASLDESLFVIEMGLLKMDNAYKFPNLRCRGWACRTNLPSNTAFRGFGFPQAALITESCITEVAAKCGLSPEKVRIINMYKEIDQTPYKQEINAKNLIQCWRECMAMSSYSLRKVAVEKFNAENYWKKKGLAMVPLKFPVGLGSRAAGQAAALVHIYLDGSVLVTHGGIEMGQGVHTKMIQVVSRELRMPMSNVHLRGTSTETVPNANISGGSVVADLNGLAVKDACQTLLKRLEPIISKNPKGTWKDWAQTAFDESINLSAVGYFRGYESDMNWEKGEGQPFEYFVYGAACSEVEIDCLTGDHKNIRTDIVMDVGCSINPAIDIGQIEGAFIQGMGLYTIEELNYSPQGILHTRGPDQYKIPAICDMPTELHIALLPPSQNSNTLYSSKGLGESGVFLGCSVFFAIHDAVSAARQERGLHGPLTLNSPLTPEKIRMACEDKFTKMIPRDEPGSYVPWNVPI

SEQ ID NO: 358 - DNA, 989 bp, Homo sapiens
aagaattcggcacgagcaacggcagagctgtgcagaatgcttgtcagatccttctgaaacgccttgagcccatcattaagaaacatccggaaggtaaatgggaagactggatagaagctgcatttgaacaaagaatcagtctctcagccactggatacttcaggggctacaaggccttcatggactgggagaagggggtgggggacccatttccttactatgtctgcagagctgcctgttctgaggttgaaattgactgcctgacaggtgctcacaagaaaatcagaacggacatcatcatggatgcatgttgcagcctaaatccagccattgatattgggcagattgaaggtttgtttattcagggaatggggctttataccactgaagaactgaaatattccccagaaggtgtcctgtactctcggagcccagatgagtacaaaattccaaccatcactgatgtcccagaggagttcaatgtctccttgctgccatcatcacaaaccccactaaccatctattcgtctaagggcctcggggagtctgggatgttcctggggtcatctgtgttctttgccattgctgacgctgtggccgcagtgcgaagagaaagagacatagctgaggacttcacggtgaagagcccagcaacgccagaatgggttcgaatggcctgtgcagatcgattcacagaaatgcaatgattacaatcacctgcctctggacagatgccctcctcagatgggcagggccgggaaaccagcaccctccacccactccaggaactcctctgtgcggatcttggcctagagatcccaagagatgaccctgagacatttaaaccttggtctatccctatagcataacactgctatcattccctaaaaggtgtttcagtttttcacaagtaaaaagatggcttgttaatcctaactgggttccaaacttatattcttatactgttgtagaaaaaaaaaaaaaaaaaa

SEQ ID NO: 359 - DNA, 2490 bp, Homo sapiens
gggcttggcttggagggggcaagggagggaaagagagaagggggaaacacaaaaaacttctttctttccccctccgtttatcttcagcccgacattgtcacctcctctttgaggggttagaagaagctgagatctcccgacagagctggaaatgcattgcactttgactatggaaacagacgctattgatggctatataacgtgtgacaatgagctttcacccgaaagggagcactccaatatggcaattgacctcacctcaagcacacccaatggacagcatgcctcaccaagtcacatgacaagcacaaattcagtaaagctagaaatgcagagtgatgaagagtgtgacaggaaacccctgagccgtgaaaatgagatcaggggccatgatgagggtagcagcctagaagaacccctaattgagagcagcgaggtggctgacaacaggaaagtccaggagcttcaaggcgagggaggaatccggcttccgaatggtaaactgaaatgtgacgtctgtggcatggtttgcattgggcccaatgtgcttatggtacataaaaggagtcacactggtgaacgccccttccactgtaaccagtgtggagcttcttttactcagaagggcaaccttctgagacacataaagttacactctggagagaagccgttcaaatgtcctttctgtagctacgcctgtagaagaagggacgccctcacaggacacctcaggacccattctgtgggtaaacctcacaagtgcaactactgtggacgaagctacaagcagcgcagttcactggaggagcacaaggaacgctgccacaactatctccagaatgtcagcatggaggctgctgggcaggtcatgagtcaccatgtacctcctatggaagattgtaaggaacaagagcctattatggacaacaatatttctctggtgccttttgagagacctgctgtcatagagaagctcacggggaatatgggaaaacgtaaaagctccactccacaaaagtttgtgggggaaaagctcatgcgattcagctacccagatattcactttgatatgaacttaacatatgagaaggaggctgagctgatgcagtctcatatgatggaccaagccatcaacaatgcaatcacctaccttggagctgaggcccttcaccctctgatgcagcacccgccaagcacaatcgctgaagtggccccagttataagctcagcttattctcaggtctatcatccaaataggatagaaagacccattagcagggaaactgctgatagtcatgaaaacaacatggatggccccatctctctcatcagaccaaagagtcgaccccaggaaagagaggcctctcccagcaatagctgcctggattccactgactcagaaagcagccatgatgaccaccagtcctaccaaggacaccctgccttaaatcccaagaggaaacaaagcccagcttacatgaaggaggatgtcaaagctttggatactaccaaggctcctaagggctctctgaaggacatctacaaggtcttcaatggagaaggagaacagattagggccttcaagtgtgagcactgccgagtccttttcctagaccatgtcatgtacaccattcacatgggttgccatggctaccgggacccactggaatgcaacatctgtggctacagaagccaggaccgttatgagttttcatcacacattgttcgaggggagcacacattccactaggccttttcattccaaaggggacccctatgaagtaaagaactgcacatgaagaaataccgcacttacaatcccacctttcctcaaatgttgacataccttttattttttttaatattattactgttgataattcttattttgtggaggcagtgtcatttgctctgcctaattacgataaggaagaaacagaagagagaaggggcgggaatattgtttctttatcacctggcttgtttattttgtgggaatttaagagcagtccatttctaccaaggcatatcatgctttgaaaaatcacttgattcataaagattcacctaagagattctgatttgccactgatattcagaattatgatggaagacaggaaagtttagagttttctgggcaggactttggtggtttaaaaatggtataagtaactttattcttgaaagaagaatgtgtttcaaactgtaaaccaattttttgttcttcagagatcatggaacacaaacacattgttattttcagtgataactcctaagaggagctgagttgttgtgggttctatgtttacttcccctatggaatttataattcagtatgttttacactgtaccatatagcaaaacttttaaactacaggtagttaagggccacctacaatacatctgaggtcctgtgatcttatttttctaaacgtaagcactgtttttccatagttttgatgactggcattttatagacaccctggcagc

SEQ ID NO: 360 - protein, 526 aa, Homo sapiens
METDAIDGYITCDNELSPEREHSNMAIDLTSSTPNGQHASPSHMTSTNSVKLEMQSDEECDRKPLSRENEIRGHDEGSSLEEPLIESSEVADNRKVQELQGEGGIRLPNGKLKCDVCGMVCIGPNVLMVHKRSHTGERPFHCNQCGASFTQKGNLLRHIKLHSGEKPFKCPFCSYACRRRDALTGHLRTHSVGKPHKCNYCGRSYKQRSSLEEHKERCHNYLQNVSMEAAGQVMSHHVPPMEDCKEQEPIMDNNISLVPFERPAVIEKLTGNMGKRKSSTPQKFVGEKLMRFSYPDIHFDMNLTYEKEAELMQSHMMDQAINNAITYLGAEALHPLMQHPPSTIAEVAPVISSAYSQVYHPNRIERPISRETADSHENNMDGPISLIRPKSRPQEREASPSNSCLDSTDSESSHDDHQSYQGHPALNPKRKQSPAYMKEDVKALDTTKAPKGSLKDIYKVFNGEGEQIRAFKCEHCRVLFLDHVMYTIHMGCHGYRDPLECNICGYRSQDRYEFSSHIVRGEHTFH

SEQ ID NO: 361 - DNA, 8097 bp, Homo sapiens
atttcctataaatatcacaaatatttccaacaaaagagcatagatgtcttttatacaattcttttgagaatgattctgcagatttctgcattttctcctcattaatttgacctgggatggttttcactgaggaaaaaaatctttaagcaaacatgttaaatgtttacctatataaaaattattacttcaggtgactccgataatataacgcatgtgtggaatgaggatgatggacagaccttatctccaagcagtctggctgcacagctcctaattctggaaaactttgaagatgccctcttaaatatatcagcaaatagtccttatattccttacttggcatgtgtgagaaatgtgactgacagtttggccagaggttcaccagaaaatctaagactcctgcagtccacaatacgatttaaaaaatcttttcttcgcaatggttcctatgaagattactttcctccagttcctgaagtcctaaaatcaaaactgtctcaacttcgaaacttgaccgaacttctttgtgaatctgaaactttcagtttgatagagaagtcatgccagctctctgatatgagctttgggagcctgtgtgaagaaagtgagtttgatctgcaactcctcgaagcggcagagctgggcaccgaaatagcagccagcttactgtaccatgacaatgtcatatctaaaaaagtgagagatttgctgactggagatccaagcaaaattaatttaaatatggatcagtttctagaacaggcactgcaaatgaattacttggaaaatatcactcagttaataccgatcatagaagccatgctgcatgtcaataacagtgcagatgcttctgaaaagccaggtcagttactagaaatgtttaaaaatgttgaagagctgaaagaagatttaaggagaacaacaggaatgtccaacaggactattgacaagttgctggccattcccatccctgataatagagctgagattatttctcaggtgttctggctgcattcctgtgatactaatatcaccactcccaaactagaagatgcaatgaaagaattctgcaacctgtctctttcagagagatcccggcagtcttacctcatcggactcacccttctgcactacttaaacatttacaacttcacatacaaggtgtttttcccgaggaaagatcaaaagccagtagaaaagatgatggagctcttcataagactaaaagagattctcaatcagatggcttctggcacacatccgctgctagacaaaatgagatccctgaagcaaatgcatctgcccagaagtgttccattaacacaggcaatgtacagaagcaaccgaatgaacacaccacaaggatcatttagcaccatctcccaagcattatgttctcaaggaattaccactgaatatttaactgccatgctgccctcttcccagaggccaaaaggcaaccacaccaaggattttttgacttataaattaactaaagagcaaattgcttcaaaatatggaattcccataaattccacaccattttgcttctccctttataaagacatcattaacatgcccgctggacctgtgatttgggctttcttgaaacctatgttgttgggaagaattttgtatgcaccatataacccagtcacaaaggcaataatggaaaagtccaatgtaactctgagacagctggcggaattaagagaaaaatctcaagagtggatggataagtcgccacttttcatgaattccttccatctgttaaaccaggcaattccaatgctccagaatactctaaggaacccttttgtgcaagtttttgtaaagttctccgtgggactcgatgctgttgaactattgaaacagatagatgaactcgatattctaagactgaaattagagaacaacattgacatcatcgatcagcttaacacactatcttccctgacagtaaatatttcctcttgtgtattatatgaccgtattcaggcagcaaaaaccatagatgaaatggagagagaggctaaaaggctctacaaaagcaacgaactctttggaagtgttatttttaagcttccttctaacagaagctggcacagaggctatgactctggaaatgtctttcttcctcctgtcataaaatataccatccggatgagtctcaagaccgcacagaccacaagaagcctaagaaccaagatttgggctccagggccacacaattctccatcacacaaccagatctatggcagggcttttatttatttacaggatagtattgaaagagcaatcattgaattgcaaactggaaggaactcccaggaaatagcagtccaggttcaagcaattccttatccctgcttcatgaaagacaacttcctaaccagtgtctcttattctcttccaattgtgcttatggttgcctgggttgtatttatagctgcctttgtaaaaaagcttgtctatgagaaagacctccggcttcatgagtacatgaagatgatgggtgtgaactcctgcagccatttctttgcctggcttatagagagtgttggatttttactggttaccatcgtgatcctcatcattatactcaagtttggcaatattcttcctaaaacaaatgggttcattttgttcctgtatttttcggactacagcttctcggttattgccatgagctatcttatcagtgtcttcttcaacaacaccaacattgcagctctgatcggaagcctcatctacatcattgccttctttccatttattgttctggttacagtggagaatgagttgagctatgtattgaaagtgttcatgagcctgctgtccccaacagcattcagctatgcaagccaatacattgcacgatacgaagaacagggcattggtcttcagtgggaaaatatgtacacctccccggttcaggatgacaccacctcatttggctggctgtgctgtctaatcctagctgactctttcatttatttccttattgcttggtatgtcaggaatgtcttcccagggacatacggtatggcagctccctggtattttccaattcttccttcctattggaaggagcgatttgggtgtgcagaggtgaagcctgagaagagcaatggcctcatgtttactaacatcatgatgcagaacaccaacccatctgccagtcctgaatacatgttttcctctaacatcgagcctgaacctaaagatctcacagtcggggttgccctgcatggggtcacaaagatctatggctcaaaagttgctgttgataacctcaatctgaacttttatgaagggcatattacttcattgctggggcccaatggagctgggaaaactactaccatttccatgttaactgggctgtttggggcctcagcaggcaccatttttgtatatggaaaagatatcaaaacagacctacacacggtacggaagaacatgggagtctgtatgcagcacgacgtcttgttcagttacctcactactaaggagcaccttctcctatatggttccatcaaagttcctcactggactaaaaagcagctccacgaggaagtaaaaaggactttaaaagatactggactatatagccatcgtcataagagagttggaacactgtcaggaggcatgaagaggaagttatctatatccatagctctcattggtggatcaagggtagtaattttggatgaaccatctactggagttgacccatgttctcgccgaagtatatgggatgttatatccaagaacaaaactgccagaacaatcattctgtcaacgcaccacttggacgaggctgaagtgctgagtgaccgcatcgccttcctggagcagggtgggcttaggtgctgtgggtccccattttacctcaaggaagcctttggcgatgggtatcacctcacgcttaccaagaagaagagtccaaatttaaatgcaaatgcagtatgtgacaccatggccgtgacagcaatgatccaatcacatctccccgaagcctacctcaaggaggatattgggggagagcttgtttatgtacttcctccattcagcaccaaagtctcaggggcctacctgtcactcctacgggcactcgacaatggcatgggtgacctcaacatcgggtgctacggcatttcagataccaccgtggaggaggtctttctgaacttgaccaaagagtcacaaaaaaatagtgctatgagtcttgagcacttaacacaaaagaaaattgggaattccaatgccaatggcatctcaactcctgacgatttatctgtgagcagcagcaatttcacagacagagatgacaaaatcctgacaagaggagagaggctggatggctttggactgttgctgaagaagatcatggctatactcatcaagaggttccaccacacccgcaggaactggaaaggtctcattgctcaggttatcctccccatcgtctttgttaccactgccatgggccttggcacactgagaaattccagcaacagttatccagagattcagatctccccctctctttatggtacctccgaacagacagccttctatgctaattatcacccgagcacggaagcacttgtctcagcaatgtgggacttccctggaattgacaacatgtgtctgaacaccagtgatctacagtgtttaaacaaagacagtctggaaaaatggaacaccagtggagaacccatcactaattttggtgtttgctcctgctcagaaaatgtccaggaatgtcctaaatttaactattccccaccgcacagaagaacttactcatcccaggtaatttataacctcactgggcaacgagtggaaaattatcttatatcaactgcaaatgagtttgtccaaaaaagatatggaggttggagttttgggctgcctttgacaaaagaccttcgttttgatataacaggagtccctgccaatagaacacttgccaaggtatggtatgatccagaaggctatcactcccttccagcttacctcaacagcctgaataatttccttctgcgagttaacatgtcaaaatacgatgctgcccgacatggcatcatcatgtatagccatccttatccaggagtgcaagaccaagaacaagccacaatcagcagtttaatcgatattttagtggcactgtctatcttgatgggctactctgtcaccaccgccagctttgtcacctatgttgtaagggaacatcaaaccaaagccaaacagttgcagcacatttcaggcattggcgtgacatgctactgggtaacaaacttcatttatgacatggttttctacttggtgcctgtagcgttttcaattggtatcattgcgattttcaaattacctgcattctacagtgaaaacaacctaggcgctgtatctctcctacttctcctgtttgggtatgcaacattttcctggatgtacttgctggctgggctcttccatgaaacaggaatggccttcatcacttacgtctgtgtcaacttgttttttggcattaattccattgtttccctgtcagtggtatactttctttccaaggaaaagcctaatgatccgactttagaacttatttctgaaaccctcaagcgcattttcctgattttcccacaattctgttttggctacggtttgattgaactttctcaacaacagtcggtcctagacttcttaaaagcatatggagtggaatacccaaatgaaacctttgagatgaataaactaggtgcaatgtttgtggctttggtttctcagggcaccatgtttttttccttgcgactcttaatcaacgaatccctgataaagaaactcaggcttttcttcagaaaatttaattcttcacatgtaagggagacaatagatgaggatgaagatgtgcgggctgagagattaagagttgagagtggtgcagctgaatttgacttggtccaactttattgtctcacaaagacctaccaacttatccacaaaaagattatagctgtaaacaacatcagcattgggatacctgctggagagtgttttgggcttcttggagtgaatggagcaggaaagaccactatattcaagatgctgacaggagacatcattccttcaagtggaaacattctgatcagaaataagaccggatctctgggtcacgttgattctcacagctcattagttggctactgtcctcaggaagatgccttagatgacctggtaactgtggaagaacatttgtatttctatgccagggtacatggaattccagaaaaggatattaaagaaactgttcataaactccttaggagacttcacctgatgcccttcaaggacagagctacctctatgtgcagttatggcacaaaaagaaaattatccactgcactggccttgatagggaaaccttccattctactgctggatgagccgagctctggcatggatccgaagtcgaaacggcacctctggaagatcatttcagaagaagtacagaacaaatgttccgtcatcctcacatctcacagcatggaagaatgtgaagctctctgtaccaggttggccattatggtgaatggaaagtttcaatgtattggatctttgcagcacataaagagcaggtttggacgaggatttactgtcaaagttcacttgaagaataacaaagtgaccatggagaccctcacaaagttcatgcagctgcactttccaaaaacatacttaaaagatcagcacctcagcatgctagagtatcatgtaccagtcacagcaggaggagtcgcaaacatttttgatctgctggaaaccaacaagactgctttaaatattacaaatttcttagtgagtcagaccactctggaagaggttttcatcaactttgccaaagaccagaagtcctatgaaactgctgataccagcagccaaggttccactataagtgttgactcacaagatgaccagatggagtcttaacacttccagcaaactcaatctcagcgtgtgaccaatggcttcattttgaagaaaagccacagaagatacacttccgcaagatatcttcattttaaagtaaagtaatatactgtatggaaagttacaactgtgttagactaacaagtaattataaaaggaaatttttccttctaaggtcagtgagtgttgttgctactgaaatgaattcctgtatactcaacactgtgagcatgctaatgtatatgctggtgattcttatgcaaaggtgaagccacctcaagatgaatatcttaatttattactttcaataaaaagacagtttaaaaggcatggattttggtagttgaaatataagagtggagaagaaaagtcagatggtttgtggcaggtgccaccgggcaagcagacaacataatttatttccagaaaacaacagaatgaacatcatcatgaatacatgaatcggctgtgatgtgtgaactgctaagggccaaatgaacgtttgcagagcagtgggcacaatgtttacaatgtatgtgtatgtcactttcggtacctgtgaatgcatggggacgtgctgaacccgaaaaaaagtgcctttccataaggactgcaatagagagggcaatttaccctggtggtacacggaacctagattcactcctgccatgccttgccaatagtaagctgcagggtggaacaagaaatcacttgctctggggggaagggaggggggaatgggtgtgtcagctgggtagatacaaaccctgaaaagagaatccatgtgctactggcaggcaacattttttaaagctctttcagaaaccctcatatttggggtttcttttcaggaaacattcctgtggagggaaaacgaatatgaagataattttcagctaattatctgggtgacccagaatcgtgtatatggctataggatagacttcttaataatggcaagtgacgtggccctggggaaaggtgctttatgtaccgtgtgtgcgtgtatgtgtgtgtatctatacaagtttgtcagctttggcatgactgtttgtctcgaaaaccaataaactcaaagtttagaaaaactcaaaaaaaaaaaaa

SEQ ID NO: 362 - protein, 2277 aa, Homo sapiens
MFTYIKIITSGDSDNITHVWNEDDGQTLSPSSLAAQLLILENFEDALLNISANSPYIPYLACVRNVTDSLARGSPENLRLLQSTIRFKKSFLRNGSYEDYFPPVPEVLKSKLSQLRNLTELLCESETFSLIEKSCQLSDMSFGSLCEESEFDLQLLEAAELGTEIAASLLYHDNVISKKVRDLLTGDPSKINLNMDQFLEQALQMNYLENITQLIPIIEAMLHVNNSADASEKPGQLLEMFKNVEELKEDLRRTTGMSNRTIDKLLAIPIPDNRAEIISQVFWLHSCDTNITTPKLEDAMKEFCNLSLSERSRQSYLIGLTLLHYLNIYNFTYKVFFPRKDQKPVEKMMELFIRLKEILNQMASGTHPLLDKMRSLKQMHLPRSVPLTQAMYRSNRMNTPQGSFSTISQALCSQGITTEYLTAMLPSSQRPKGNHTKDFLTYKLTKEQIASKYGIPINSTPFCFSLYKDIINMPAGPVIWAFLKPMLLGRILYAPYNPVTKAIMEKSNVTLRQLAELREKSQEWMDKSPLFMNSFHLLNQAIPMLQNTLRNPFVQVFVKFSVGLDAVELLKQIDELDILRLKLENNIDIIDQLNTLSSLTVNISSCVLYDRIQAAKTIDEMEREAKRLYKSNELFGSVIFKLPSNRSWHRGYDSGNVFLPPVIKYTIRMSLKTAQTTRSLRTKIWAPGPHNSPSHNQIYGRAFIYLQDSIERAIIELQTGRNSQEIAVQVQAIPYPCFMKDNFLTSVSYSLPIVLMVAWVVFIAAFVKKLVYEKDLRLHEYMKMMGVNSCSHFFAWLIESVGFLLVTIVILIIILKFGNILPKTNGFILFLYFSDYSFSVIAMSYLISVFFNNTNIAALIGSLIYIIAFFPFIVLVTVENELSYVLKVFMSLLSPTAFSYASQYIARYEEQGIGLQWENMYTSPVQDDTTSFGWLCCLILADSFIYFLIAWYVRNVFPGTYGMAAPWYFPILPSYWKERFGCAEVKPEKSNGLMFTNIMMQNTNPSASPEYMFSSNIEPEPKDLTVGVALHGVTKIYGSKVAVDNLNLNFYEGHITSLLGPNGAGKTTTISMLTGLFGASAGTIFVYGKDIKTDLHTVRKNMGVCMQHDVLFSYLTTKEHLLLYGSIKVPHWTKKQLHEEVKRTLKDTGLYSHRHKRVGTLSGGMKRKLSISIALIGGSRVVILDEPSTGVDPCSRRSIWDVISKNKTARTIILSTHHLDEAEVLSDRIAFLEQGGLRCCGSPFYLKEAFGDGYHLTLTKKKSPNLNANAVCDTMAVTAMIQSHLPEAYLKEDIGGELVYVLPPFSTKVSGAYLSLLRALDNGMGDLNIGCYGISDTTVEEVFLNLTKESQKNSAMSLEHLTQKKIGNSNANGISTPDDLSVSSSNFTDRDDKILTRGERLDGFGLLLKKIMAILIKRFHHTRRNWKGLIAQVILPIVFVTTAMGLGTLRNSSNSYPEIQISPSLYGTSEQTAFYANYHPSTEALVSAMWDFPGIDNMCLNTSDLQCLNKDSLEKWNTSGEPITNFGVCSCSENVQECPKFNYSPPHRRTYSSQVIYNLTGQRVENYLISTANEFVQKRYGGWSFGLPLTKDLRFDITGVPANRTLAKVWYDPEGYHSLPAYLNSLNNFLLRVNMSKYDAARHGIIMYSHPYPGVQDQEQATISSLIDILVALSILMGYSVTTASFVTYVVREHQTKAKQLQHISGIGVTCYWVTNFIYDMVFYLVPVAFSIGIIAIFKLPAFYSENNLGAVSLLLLLFGYATFSWMYLLAGLFHETGMAFITYVCVNLFFGINSIVSLSVVYFLSKEKPNDPTLELISETLKRIFLIFPQFCFGYGLIELSQQQSVLDFLKAYGVEYPNETFEMNKLGAMFVALVSQGTMFFSLRLLINESLIKKLRLFFRKFNSSHVRETIDEDEDVRAERLRVESGAAEFDLVQLYCLTKTYQLIHKKIIAVNNISIGIPAGECFGLLGVNGAGKTTIFKMLTGDIIPSSGNILIRNKTGSLGHVDSHSSLVGYCPQEDALDDLVTVEEHLYFYARVHGIPEKDIKETVHKLLRRLHLMPFKDRATSMCSYGTKRKLSTALALIGKPSILLLDEPSSGMDPKSKRHLWKIISEEVQNKCSVILTSHSMEECEALCTRLAIMVNGKFQCIGSLQHIKSRFGRGFTVKVHLKNNKVTMETLTKFMQLHFPKTYLKDQHLSMLEYHVPVTAGGVANIFDLLETNKTALNITNFLVSQTTLEEVFINFAKDQKSYETADTSSQGSTISVDSQDDQMES

SEQ ID NO: 363 - DNA, 9112 bp, Homo sapiens
gaagagttgattgagaagtgcctcttggttaaggattaaccacagggaaaaatccagcagaaacagaagaactgtgggtttcttaccccagccctcaaggaagctatgccgtgaaaggggtactgatacactgacatacagcaagttggacggggcatcagttcttcatttgtggagtggagaaaagaagaggaaatctctcatttggggcatttgaaggatggcttccctgtttcatcagcttcagatcctggtctggaaaaattggctaggtgtaaaaaggcagccgctttggacacttgtcttgatcttatggccagtcattattttcataattttggctattactcggaccaaatttcctccaactgcaaaaccaacttgttacctcgcacctcgaaaccttcctagtactggattctttccattcctgcagaccctactctgtgacacagactctaaatgcaaagacacaccctatggcccacaagatctgcttcgtaggaaaggaattgatgatgcactatttaaagacagtgagattctgagaaagtcatccaacctggataaggacagcagtttatcattccagagcacccaagttccagaaagaaggcatgcatcactagccacagtatttcccagtccaagttctgatttggaaatccccggaacatatactttcaatggcagtcaagtgctcgcacgaattcttggcttggaaaagctgttaaagcaaaattcaacttcagaagatatacgaagagaactatgtgacagctattcaggatacattgtggatgatgccttctcttggacctttctaggaagaaatgtttttaacaaattttgcctttctaacatgacccttttagagtcttctctccaagaactaaacaaacagttctcccagctatccagtgaccccaacaatcagaagatagtgtttcaggaaatagtcagaatgctgtctttcttctcacaagtgcaagagcagaaagctgtgtggcagcttctgtctagttttccaaatgtgtttcagaatgacacatcactaagcaatctatttgatgttcttcgaaaggcaaacagtgtgctgctggttgtgcagaaggtttatccacgttttgcaactaacgaaggtttcagaaccctccagaagtctgttaaacatctgctgtacactctggactccccagctcaaggtgactccgataatataacgcatgtgtggaatgaggatgatggacagaccttatctccaagcagtctggctgcacagctcctaattctggaaaactttgaagatgccctcttaaatatatcagcaaatagtccttatattccttacttggcatgtgtgagaaatgtgactgacagtttggccagaggttcaccagaaaatctaagactcctgcagtccacaatacgatttaaaaaatcttttcttcgcaatggttcctatgaagattactttcctccagttcctgaagtcctaaaatcaaaactgtctcaacttcgaaacttgaccgaacttctttgtgaatctgaaactttcagtttgatagagaagtcatgccagctctctgatatgagctttgggagcctgtgtgaagaaagtgagtttgatctgcaactcctcgaagcggcagagctgggcaccgaaatagcagccagcttactgtaccatgacaatgtcatatctaaaaaagtgagagatttgctgactggagatccaagcaaaattaatttaaatatggatcagtttctagaacaggcactgcaaatgaattacttggaaaatatcactcagttaataccgatcatagaagccatgctgcatgtcaataacagtgcagatgcttctgaaaagccaggtcagttactagaaatgtttaaaaatgttgaagagctgaaagaagatttaaggagaacaacaggaatgtccaacaggactattgacaagttgctggccattcccatccctgataatagagctgagattatttctcaggtgttctggctgcattcctgtgatactaatatcaccactcccaaactagaagatgcaatgaaagaattctgcaacctgtctctttcagagagatcccggcagtcttacctcatcggactcacccttctgcactacttaaacatttacaacttcacatacaaggtgtttttcccgaggaaagatcaaaagccagtagaaaagatgatggagctcttcataagactaaaagagattctcaatcagatggcttctggcacacatccgctgctagacaaaatgagatccctgaagcaaatgcatctgcccagaagtgttccattaacacaggcaatgtacagaagcaaccgaatgaacacaccacaaggatcatttagcaccatctcccaagcattatgttctcaaggaattaccactgaatatttaactgccatgctgccctcttcccagaggccaaaaggcaaccacaccaaggattttttgacttataaattaactaaagagcaaattgcttcaaaatatggaattcccataaattccacaccattttgcttctccctttataaagacatcattaacatgcccgctggacctgtgatttgggctttcttgaaacctatgttgttgggaagaattttgtatgcaccatataacccagtcacaaaggcaataatggaaaagtccaatgtaactctgagacagctggcggaattaagagaaaaatctcaagagtggatggataagtcgccacttttcatgaattccttccatctgttaaaccaggcaattccaatgctccagaatactctaaggaacccttttgtgcaagtttttgtaaagttctccgtgggactcgatgctgttgaactattgaaacagatagatgaactcgatattctaagactgaaattagagaacaacattgacatcatcgatcagcttaacacactatcttccctgacagtaaatatttcctcttgtgtattatatgaccgtattcaggcagcaaaaaccatagatgaaatggagagagaggctaaaaggctctacaaaagcaacgaactctttggaagtgttatttttaagcttccttctaacagaagctggcacagaggctatgactctggaaatgtctttcttcctcctgtcataaaatataccatccggatgagtctcaagaccgcacagaccacaagaagcctaagaaccaagatttgggctccagggccacacaattctccatcacacaaccagatctatggcagggcttttatttatttacaggatagtattgaaagagcaatcattgaattgcaaactggaaggaactcccaggaaatagcagtccaggttcaagcaattccttatccctgcttcatgaaagacaacttcctaaccagtgtctcttattctcttccaattgtgcttatggttgcctgggttgtatttatagctgcctttgtaaaaaagcttgtctatgagaaagacctccggcttcatgagtacatgaagatgatgggtgtgaactcctgcagccatttctttgcctggcttatagagagtgttggatttttactggttaccatcgtgatcctcatcattatactcaagtttggcaatattcttcctaaaacaaatgggttcattttgttcctgtatttttcggactacagcttctcggttattgccatgagctatcttatcagtgtcttcttcaacaacaccaacattgcagctctgatcggaagcctcatctacatcattgccttctttccatttattgttctggttacagtggagaatgagttgagctatgtattgaaagtgttcatgagcctgctgtccccaacagcattcagctatgcaagccaatacattgcacgatacgaagaacagggcattggtcttcagtgggaaaatatgtacacctccccggttcaggatgacaccacctcatttggctggctgtgctgtctaatcctagctgactctttcatttatttccttattgcttggtatgtcaggaatgtcttcccagggacatacggtatggcagctccctggtattttccaattcttccttcctattggaaggagcgatttgggtgtgcagaggtgaagcctgagaagagcaatggcctcatgtttactaacatcatgatgcagaacaccaacccatctgccagtcctgaatacatgttttcctctaacatcgagcctgaacctaaagatctcacagtcggggttgccctgcatggggtcacaaagatctatggctcaaaagttgctgttgataacctcaatctgaacttttatgaagggcatattacttcattgctggggcccaatggagctgggaaaactactaccatttccatgttaactgggctgtttggggcctcagcaggcaccatttttgtatatggaaaagatatcaaaacagacctacacacggtacggaagaacatgggagtctgtatgcagcacgacgtcttgttcagttacctcactactaaggagcaccttctcctatatggttccatcaaagttcctcactggactaaaaagcagctccacgaggaagtaaaaaggactttaaaagatactggactatatagccatcgtcataagagagttggaacactgtcaggaggcatgaagaggaagttatctatatccatagctctcattggtggatcaagggtagtaattttggatgaaccatctactggagttgacccatgttctcgccgaagtatatgggatgttatatccaagaacaaaactgccagaacaatcattctgtcaacgcaccacttggacgaggctgaagtgctgagtgaccgcatcgccttcctggagcagggtgggcttaggtgctgtgggtccccattttacctcaaggaagcctttggcgatgggtatcacctcacgcttaccaagaagaagagtccaaatttaaatgcaaatgcagtatgtgacaccatggccgtgacagcaatgatccaatcacatctccccgaagcctacctcaaggaggatattgggggagagcttgtttatgtacttcctccattcagcaccaaagtctcaggggcctacctgtcactcctacgggcactcgacaatggcatgggtgacctcaacatcgggtgctacggcatttcagataccaccgtggaggaggtctttctgaacttgaccaaagagtcacaaaaaaatagtgctatgagtcttgagcacttaacacaaaagaaaattgggaattccaatgccaatggcatctcaactcctgacgatttatctgtgagcagcagcaatttcacagacagagatgacaaaatcctgacaagaggagagaggctggatggctttggactgttgctgaagaagatcatggctatactcatcaagaggttccaccacacccgcaggaactggaaaggtctcattgctcaggttatcctccccatcgtctttgttaccactgccatgggccttggcacactgagaaattccagcaacagttatccagagattcagatctccccctctctttatggtacctccgaacagacagccttctatgctaattatcacccgagcacggaagcacttgtctcagcaatgtgggacttccctggaattgacaacatgtgtctgaacaccagtgatctacagtgtttaaacaaagacagtctggaaaaatggaacaccagtggagaacccatcactaattttggtgtttgctcctgctcagaaaatgtccaggaatgtcctaaatttaactattccccaccgcacagaagaacttactcatcccaggtaatttataacctcactgggcaacgagtggaaaattatcttatatcaactgcaaatgagtttgtccaaaaaagatatggaggttggagttttgggctgcctttgacaaaagaccttcgttttgatataacaggagtccctgccaatagaacacttgccaaggtatggtatgatccagaaggctatcactcccttccagcttacctcaacagcctgaataatttccttctgcgagttaacatgtcaaaatacgatgctgcccgacatggcatcatcatgtatagccatccttatccaggagtgcaagaccaagaacaagccacaatcagcagtttaatcgatattttagtggcactgtctatcttgatgggctactctgtcaccaccgccagctttgtcacctatgttgtaagggaacatcaaaccaaagccaaacagttgcagcacatttcaggcattggcgtgacatgctactgggtaacaaacttcatttatgacatggttttctacttggtgcctgtagcgttttcaattggtatcattgcgattttcaaattacctgcattctacagtgaaaacaacctaggcgctgtatctctcctacttctcctgtttgggtatgcaacattttcctggatgtacttgctggctgggctcttccatgaaacaggaatggccttcatcacttacgtctgtgtcaacttgttttttggcattaattccattgtttccctgtcagtggtatactttctttccaaggaaaagcctaatgatccgactttagaacttatttctgaaaccctcaagcgcattttcctgattttcccacaattctgttttggctacggtttgattgaactttctcaacaacagtcggtcctagacttcttaaaagcatatggagtggaatacccaaatgaaacctttgagatgaataaactaggtgcaatgtttgtggctttggtttctcagggcaccatgtttttttccttgcgactcttaatcaacgaatccctgataaagaaactcaggcttttcttcagaaaatttaattcttcacatgtaagggagacaatagatgaggatgaagatgtgcgggctgagagattaagagttgagagtggtgcagctgaatttgacttggtccaactttattgtctcacaaagacctaccaacttatccacaaaaagattatagctgtaaacaacatcagcattgggatacctgctggagagtgttttgggcttcttggagtgaatggagcaggaaagaccactatattcaagatgctgacaggagacatcattccttcaagtggaaacattctgatcagaaataagaccggatctctgggtcacgttgattctcacagctcattagttggctactgtcctcaggaagatgccttagatgacctggtaactgtggaagaacatttgtatttctatgccagggtacatggaattccagaaaaggatattaaagaaactgttcataaactccttaggagacttcacctgatgcccttcaaggacagagctacctctatgtgcagttatggcacaaaaagaaaattatccactgcactggccttgatagggaaaccttccattctactgctggatgagccgagctctggcatggatccgaagtcgaaacggcacctctggaagatcatttcagaagaagtacagaacaaatgttccgtcatcctcacatctcacagcatggaagaatgtgaagctctctgtaccaggttggccattatggtgaatggaaagtttcaatgtattggatctttgcagcacataaagagcaggtttggacgaggatttactgtcaaagttcacttgaagaataacaaagtgaccatggagaccctcacaaagttcatgcagctgcactttccaaaaacatacttaaaagatcagcacctcagcatgctagagtatcatgtaccagtcacagcaggaggagtcgcaaacatttttgatctgctggaaaccaacaagactgctttaaatattacaaatttcttagtgagtcagaccactctggaagaggttttcatcaactttgccaaagaccagaagtcctatgaaactgctgataccagcagccaaggttccactataagtgttgactcacaagatgaccagatggagtcttaacacttccagcaaactcaatctcagcgtgtgaccaatggcttcattttgaagaaaagccacagaagatacacttccgcaagatatcttcattttaaagtaaagtaatatactgtatggaaagttacaactgtgttagactaacaagtaattataaaaggaaatttttccttctaaggtcagtgagtgttgttgctactgaaatgaattcctgtatactcaacactgtgagcatgctaatgtatatgctggtgattcttatgcaaaggtgaagccacctcaagatgaatatcttaatttattactttcaataaaaagacagtttaaaaggcatggattttggtagttgaaatataagagtggagaagaaaagtcagatggtttgtggcaggtgccaccgggcaagcagacaacataatttatttccagaaaacaacagaatgaacatcatcatgaatacatgaatcggctgtgatgtgtgaactgctaagggccaaatgaacgtttgcagagcagtgggcacaatgtttacaatgtatgtgtatgtcactttcggtacctgtgaatgcatggggacgtgctgaacccgaaaaaaagtgcctttccataaggactgcaatagagagggcaatttaccctggtggtacacggaacctagattcactcctgccatgccttgccaatagtaagctgcagggtggaacaagaaatcacttgctctggggggaagggaggggggaatgggtgtgtcagctgggtagatacaaaccctgaaaagagaatccatgtgctactggcaggcaacattttttaaagctctttcagaaaccctcatatttggggtttcttttcaggaaacattcctgtggagggaaaacgaatatgaagataattttcagctaattatctgggtgacccagaatcgtgtatatggctataggatagacttcttaataatggcaagtgacgtggccctggggaaaggtgctttatgtaccgtgtgtgcgtgtatgtgtgtgtatctatacaagtttgtcagctttggcatgactgtttgtctcgaaaaccaataaactcaaagtttagaaaaactcaaaaaaaaaaaaa

SEQ ID NO: 364 - protein, 2595 aa, Homo sapiens
MASLFHQLQILVWKNWLGVKRQPLWTLVLILWPVIIFIILAITRTKFPPTAKPTCYLAPRNLPSTGFFPFLQTLLCDTDSKCKDTPYGPQDLLRRKGIDDALFKDSEILRKSSNLDKDSSLSFQSTQVPERRHASLATVFPSPSSDLEIPGTYTFNGSQVLARILGLEKLLKQNSTSEDIRRELCDSYSGYIVDDAFSWTFLGRNVFNKFCLSNMTLLESSLQELNKQFSQLSSDPNNQKIVFQEIVRMLSFFSQVQEQKAVWQLLSSFPNVFQNDTSLSNLFDVLRKANSVLLVVQKVYPRFATNEGFRTLQKSVKHLLYTLDSPAQGDSDNITHVWNEDDGQTLSPSSLAAQLLILENFEDALLNISANSPYIPYLACVRNVTDSLARGSPENLRLLQSTIRFKKSFLRNGSYEDYFPPVPEVLKSKLSQLRNLTELLCESETFSLIEKSCQLSDMSFGSLCEESEFDLQLLEAAELGTEIAASLLYHDNVISKKVRDLLTGDPSKINLNMDQFLEQALQMNYLENITQLIPIIEAMLHVNNSADASEKPGQLLEMFKNVEELKEDLRRTTGMSNRTIDKLLAIPIPDNRAEIISQVFWLHSCDTNITTPKLEDAMKEFCNLSLSERSRQSYLIGLTLLHYLNIYNFTYKVFFPRKDQKPVEKMMELFIRLKEILNQMASGTHPLLDKMRSLKQMHLPRSVPLTQAMYRSNRMNTPQGSFSTISQALCSQGITTEYLTAMLPSSQRPKGNHTKDFLTYKLTKEQIASKYGIPINSTPFCFSLYKDIINMPAGPVIWAFLKPMLLGRILYAPYNPVTKAIMEKSNVTLRQLAELREKSQEWMDKSPLFMNSFHLLNQAIPMLQNTLRNPFVQVFVKFSVGLDAVELLKQIDELDILRLKLENNIDIIDQLNTLSSLTVNISSCVLYDRIQAAKTIDEMEREAKRLYKSNELFGSVIFKLPSNRSWHRGYDSGNVFLPPVIKYTIRMSLKTAQTTRSLRTKIWAPGPHNSPSHNQIYGRAFIYLQDSIERAIIELQTGRNSQEIAVQVQAIPYPCFMKDNFLTSVSYSLPIVLMVAWVVFIAAFVKKLVYEKDLRLHEYMKMMGVNSCSHFFAWLIESVGFLLVTIVILIIILKFGNILPKTNGFILFLYFSDYSFSVIAMSYLISVFFNNTNIAALIGSLIYIIAFFPFIVLVTVENELSYVLKVFMSLLSPTAFSYASQYIARYEEQGIGLQWENMYTSPVQDDTTSFGWLCCLILADSFIYFLIAWYVRNVFPGTYGMAAPWYFPILPSYWKERFGCAEVKPEKSNGLMFTNIMMQNTNPSASPEYMFSSNIEPEPKDLTVGVALHGVTKIYGSKVAVDNLNLNFYEGHITSLLGPNGAGKTTTISMLTGLFGASAGTIFVYGKDIKTDLHTVRKNMGVCMQHDVLFSYLTTKEHLLLYGSIKVPHWTKKQLHEEVKRTLKDTGLYSHRHKRVGTLSGGMKRKLSISIALIGGSRVVILDEPSTGVDPCSRRSIWDVISKNKTARTIILSTHHLDEAEVLSDRIAFLEQGGLRCCGSPFYLKEAFGDGYHLTLTKKKSPNLNANAVCDTMAVTAMIQSHLPEAYLKEDIGGELVYVLPPFSTKVSGAYLSLLRALDNGMGDLNIGCYGISDTTVEEVFLNLTKESQKNSAMSLEHLTQKKIGNSNANGISTPDDLSVSSSNFTDRDDKILTRGERLDGFGLLLKKIMAILIKRFHHTRRNWKGLIAQVILPIVFVTTAMGLGTLRNSSNSYPEIQISPSLYGTSEQTAFYANYHPSTEALVSAMWDFPGIDNMCLNTSDLQCLNKDSLEKWNTSGEPITNFGVCSCSENVQECPKFNYSPPHRRTYSSQVIYNLTGQRVENYLISTANEFVQKRYGGWSFGLPLTKDLRFDITGVPANRTLAKVWYDPEGYHSLPAYLNSLNNFLLRVNMSKYDAARHGIIMYSHPYPGVQDQEQATISSLIDILVALSILMGYSVTTASFVTYVVREHQTKAKQLQHISGIGVTCYWVTNFIYDMVFYLVPVAFSIGIIAIFKLPAFYSENNLGAVSLLLLLFGYATFSWMYLLAGLFHETGMAFITYVCVNLFFGINSIVSLSVVYFLSKEKPNDPTLELISETLKRIFLIFPQFCFGYGLIELSQQQSVLDFLKAYGVEYPNETFEMNKLGAMFVALVSQGTMFFSLRLLINESLIKKLRLFFRKFNSSHVRETIDEDEDVRAERLRVESGAAEFDLVQLYCLTKTYQLIHKKIIAVNNISIGIPAGECFGLLGVNGAGKTTIFKMLTGDIIPSSGNILIRNKTGSLGHVDSHSSLVGYCPQEDALDDLVTVEEHLYFYARVHGIPEKDIKETVHKLLRRLHLMPFKDRATSMCSYGTKRKLSTALALIGKPSILLLDEPSSGMDPKSKRHLWKIISEEVQNKCSVILTSHSMEECEALCTRLAIMVNGKFQCIGSLQHIKSRFGRGFTVKVHLKNNKVTMETLTKFMQLHFPKTYLKDQHLSMLEYHVPVTAGGVANIFDLLETNKTALNITNFLVSQTTLEEVFINFAKDQKSYETADTSSQGSTISVDSQDDQMES

SEQ ID NO: 365 - DNA, 419 bp, Homo sapiens
aagggcccctcattttggcagaacttaccatgtcgaccagccgcaaattaaagagtcatggcatgaggaggagcaagagccgatctcctcacaagggagtcaagagaggtggcagcaaaagaaaataccgtaagggcaacctgaaaagtaggaaacggggcgatgacgccaatcgcaattaccgctcccacttgtgagcccccagcgggctctgccctggtgcgcttcacacagcaccaagcagcaacaagaacagcagaaggggaactgccaaggagacctgatgttagatcaaagccagagaggagcctatggaatgtggatcaaatgccagttgtgacgaaatgaggaatgtatatgttggctgtttttccccaacatctcaataaaactttgaaagcagaaaaaaaaaaaaaaaa

SEQ ID NO: 366 - protein, 55 aa, Homo sapiens
MSTSRKLKSHGMRRSKSRSPHKGVKRGGSKRKYRKGNLKSRKRGDDANRNYRSHL

SEQ ID NO: 367 - DNA, 2490 bp, Homo sapiens
ggcgcagcggctccctataagcagaggagctgtccgtgtgctgaaacggcccgagaagctcgcccggagaacggggaggaatatgctgtggagctcctctgccatataaacaaaaagaggaaatctttcaaacatggctgaagcaaagacccactggcttggagcagccctgtctcttatccctttaattttcctcatctctggggctgaagcagcttcatttcagagaaaccagctgcttcagaaagaaccagacctcaggttggaaaatgtccaaaagtttcccagtcctgaaatgatcagggctttggagtacatagaaaacctccgacaacaagctcataaggaagaaagcagcccagattataatccctaccaaggtgtctctgtcccccttcagcaaaaagaaaatggcgatgaaagccacttgcccgagagggattcactgagtgaagaagactggatgagaataatactcgaagctttgagacaggctgaaaatgagcctcagtctgcaccaaaagaaaataagccctatgccttgaattcagaaaagaactttccaatggacatgagtgatgattatgagacacagcagtggccagaaagaaagcttaagcacatgcaattccctcctatgtatgaagagaattccagggataacccctttaaacgcacaaatgaaatagtggaggaacaatatactcctcaaagccttgctacattggaatctgtcttccaagagctggggaaactgacaggaccaaacaaccagaaacgtgagaggatggatgaggagcaaaaactttatacggatgatgaagatgatatctacaaggctaataacattgcctatgaagatgtggtcgggggagaagactggaacccagtagaggagaaaatagagagtcaaacccaggaagaggtgagagacagcaaagagaatatagaaaaaaatgaacaaatcaacgatgagatgaaacgctcagggcagcttggcatccaggaagaagatcttcggaaagagagtaaagaccaactctcagatgatgtctccaaagtaattgcctatttgaaaaggttagtaaatgctgcaggaagtgggaggttacagaatgggcaaaatggggaaagggccaccaggctttttgagaaacctcttgattctcagtctatttatcagctgattgaaatctcaaggaatttacagatacccccagaagacttaattgagatgctcaaaactggggagaagccgaatggatcagtggaaccggagcgggagcttgaccttcctgttgacctagatgacatctcagaggctgacttagaccatccagacctgttccaaaataggatgctctccaagagtggctaccctaaaacacctggtcgtgctgggactgaggccctaccagacgggctcagtgttgaggatattttaaatcttttagggatggagagtgcagcaaatcagaaaacgtcgtattttcccaatccatataaccaggagaaagttctgccaaggctcccttatggtgctggaagatctagatcgaaccagcttcccaaagctgcctggattccacatgttgaaaacagacagatggcatatgaaaacctgaacgacaaggatcaagaattaggtgagtacttggccaggatgctagttaaataccctgagatcattaattcaaaccaagtgaagcgagttcctggtcaaggctcatctgaagatgacctgcaggaagaggaacaaattgagcaggccatcaaagagcatttgaatcaaggcagctctcaggagactgacaagctggccccggtgagcaaaaggttccctgtggggcccccgaagaatgatgataccccaaataggcagtactgggatgaagatctgttaatgaaagtgctggaatacctcaaccaagaaaaggcagaaaagggaagggagcatattgctaagagagcaatggaaaatatgtaagctgctttcattaattaccctactttcattcctcccaccccaagcaaatcccaacatttctcttcagtgtgttgacttctatcctgttaacactgtaatatctttaaatgatgtacaggcagatgaaaccaggtcactggggagtctgcttcatttcctctgagctgttatcttgtgtatggatatgtgtaaatgttatgactccttgataaaaaatttattatgtccattattcaagaaagatatctatgactgtgtttaatagtatatctaatggctgtggcattgttgatgctcacatatgataaaaaagtgtcctataattctattgaaagtttttaatatttattgaattattttgttactgtctgtagtgttttgtggagtactggaccaaaaaaataaagcattataaatatatagttttatttataaggccttttctattgtgtgttttactgttgattaataaatgttatttctggacaaaaaaaaaaaaaaaa

SEQ ID NO: 368 - protein, 617 aa, Homo sapiens
MAEAKTHWLGAALSLIPLIFLISGAEAASFQRNQLLQKEPDLRLENVQKFPSPEMIRALEYIENLRQQAHKEESSPDYNPYQGVSVPLQQKENGDESHLPERDSLSEEDWMRIILEALRQAENEPQSAPKENKPYALNSEKNFPMDMSDDYETQQWPERKLKHMQFPPMYEENSRDNPFKRTNEIVEEQYTPQSLATLESVFQELGKLTGPNNQKRERMDEEQKLYTDDEDDIYKANNIAYEDVVGGEDWNPVEEKIESQTQEEVRDSKENIEKNEQINDEMKRSGQLGIQEEDLRKESKDQLSDDVSKVIAYLKRLVNAAGSGRLQNGQNGERATRLFEKPLDSQSIYQLIEISRNLQIPPEDLIEMLKTGEKPNGSVEPERELDLPVDLDDISEADLDHPDLFQNRMLSKSGYPKTPGRAGTEALPDGLSVEDILNLLGMESAANQKTSYFPNPYNQEKVLPRLPYGAGRSRSNQLPKAAWIPHVENRQMAYENLNDKDQELGEYLARMLVKYPEIINSNQVKRVPGQGSSEDDLQEEEQIEQAIKEHLNQGSSQETDKLAPVSKRFPVGPPKNDDTPNRQYWDEDLLMKVLEYLNQEKAEKGREHIAKRAMENM

SEQ ID NO: 369 - DNA, 4530 bp, Homo sapiens
gctcggagcgggctccgcggcttgcaaggcgcctgcgactcggtcccaggtcggcgggcggcgcacggcgggctcgcgcgggggccccggcgcgccgggcggcgcagtacgcagcgcgcggacccacgccacggccaggagcccagagcagcgcggccacactgcccaggggtcggccctcggccccggcgctcggagcgcggcggctgcctgggctttaatggctgctccgcggagcagcgcctagggctggaaggcggctgcggctcaggaagtcacccgagcaagcctccttcggggccggccgcacccgccgcggcgcgctccatgggggcgcgctccccccgggcggcccgctgacccgggacgccggggcccgctcgctcgccggccgcgcgtcccggccatgaactgagcccgcgggccagccccgcgcctgctccgcccgcgcctttcttctcgcgcctcctccgcccgccgccggcgggcccggctccccgggggctgcggcgccccgggctcggcggcccgcgggccccggggcgcggggcggcggcggcggggggcgcgcggctccgggcgcggcgcctgcaccatgaactaccagcagcagctggccaactcggctgccatccgggccgagatccagcgcttcgagtcggtccaccccaacatctactccatctacgagctgctggagcgcgtggaggagccggtgctgcagaaccagatccgggagcacgtcatcgccatcgaagatgccttcgtgaacagccaggaatggacgctgagtcgatctgtcccggagctcaaagtgggaattgtgggtaacttggccagcggcaagtctgccctggtgcaccggtacctgacgggcacatatgtccaggaggagtctccggaaggtggcaggttcaagaaagagattgtcgttgatggacagagctatctgctgctgatcagagatgaagggggccccccggaggcgcagtttgccatgtgggtggacgctgttatatttgtcttcagcttggaggatgaaataagtttccagaccgtttaccactactacagtcgaatggccaactatcggaacacgagcgagattcctctggttctggtgggaacccaggatgccataagttctgctaacccgagggtcatcgatgacgccagggcgaggaagctctccaacgacctgaaacggtgcacgtactacgagacgtgtgctacatacgggctgaatgtggagagggtcttccaggacgttgcccagaagattgttgccacaaggaagaagcagcagctgtccataggaccctgcaagtcgctacctaattctcccagccattcctccgtctgttccgcgcaggtgtctgccgtgcacatcagccagacaagtaatggaggtgggagtttaagcgactattcctcctccgttccatcgactcccagcaccagccagaaggaacttcggatcgatgttcctcccactgccaacacgcccacgcccgttcgcaagcagtctaagcgccggtccaacctgttcacctctcggaaagggagcgacccagacaaagagaagaaaggcctggagagtcgtgcggacagcattgggagcggccgagccatcccaattaaacagggcatgctgttgaagcgaagtggcaaatcgttgaataaagagtggaaaaagaaatatgtcaccctgtgtgacaatggcgtgctgacctatcatcccagtttacatgattacatgcagaatgttcatggtaaggagattgaccttctgagaaccactgtgaaagtcccagggaagaggccaccccgagccacgtcagcctgcgcacccatctccagccctaaaaccaatggcctatccaaggacatgagcagtttacacatctcacccaattcagggaatgtcactagtgcatctgggtctcagatggcaagcggcatcagcctggtctccttcaacagccgacccgacggcatgcaccagcgctcctactcagtctccagtgccgaccagtggagtgaggctacggtcattgcaaactcggccatcagcagtgacacagggctgggtgactccgtatgctccagccccagtatctccagcaccaccagccccaagctcgacccgcccccctcccctcacgccaacagaaagaagcaccgaaggaagaaaagcactagcaacttcaaagccgacggcctgtccggcactgctgaagaacaagaagaaaattttgagtttatcattgtgtccctcactggccaaacatggcactttgaagccacgacgtatgaggagcgggacgcctgggtccaagccatcgagagccagatcctggccagcctgcagtcgtgcgagagcagcaagaacaagtcccggctgacgagccagagcgaggccatggccctgcagtcgatccggaacatgcgcgggaactcccactgtgtggactgcgagacccagaatcccaactgggccagtttgaacttgggagccctcatgtgcatcgaatgctcagggatccaccggaatcttggcacccacctttcccgagtccgatctctggacctggatgactggccagtcgagctcatcaaggtgatgtcatccatcgggaacgagctagccaacagcgtctgggaagagagcagccaggggcggacgaaaccatcggtagactccacaagggaagagaaggaacggtggatccgtgccaagtacgagcagaagctcttcctggccccgctgccctgcacggagctgtccctgggccagcacctgctgcgggccaccgccgacgaggacctgcggacggccatcctgctgctggcacacggctcccgggacgaggtgaacgagacctgcggggagggagacggccgcacggcgctgcatctggcctgccgcaaggggaatgtggtcctggcgcagctcctgatctggtacggagtggacgtcacggcccgagatgcccacgggaacacagctctggcctacgcccggcaggcctccagccaggagtgcatcgacgtgctgctgcagtacggctgccccgacgagcgcttcgtgctcatggccacccctaacctgtccaggagaaacaataaccggaacaacagcagtgggagggtgcccaccatcatctgaggaacagccgtgcccgcctgctcgccgcacctgggacgcggcagcctcgccgcattctcgctcagaagtcgcagcacgtgagtcccgtcgcatcccctccctcttcctggtggccacctccctcccgcccacccactctcaccccaaacaaaatcacaaaacctggacatccctcaaggggcgaagaggcggccgggagactgcagaagtggctccttttcataaactcccctaaaccacacacaggagagagcgacgggcctcggccctttgatgatagcacatggcgcaggacccttgtcctggtggcacaagggatggggacgcgagggggaggggaggcgaggaacaaggagaaggggcaactttccttaactggcagttgagcacatagtacatttcccctctaccaaacggaacacttggattccatctcttctctgaggagctcgacggcataaatcagaagcaagcacagagtttgtcaggtttgaagcccctatgatggtgtgtgtcaaatcagttgtagctaatctgtccagggagaatactggcttcattacacttgtacagccgagttcttcccgcattactgctgtttaatagaacgtgattagtcatcgccgagaagaaagcatattagccgaggaggtagtcacgcggcacgcgccggtgattgccacgatgtgattgcaatactcttagaagcaccatattatcccagacatgttctttcaagcccttggagccctctctaaattcactgtcatcatttagtatctgtttaatttttcagtccaaagagaggaaatcagtcgctgagtattatttgactccggtctccttggtgcaaaaacaaaatgggaaaaataaataagaataactcagaaactcaaaaggaaaccacaaattcagctaataatagcatttcgagtatatttcgtaaactaaggaaatacacaaaaggctgttttttccgactgtaagagatatttgatgtccttttgccgaggtggatgtgttagtctcaggccctcctggaccacgttgcccaagtcacacaggcttctgtgttatgtatttagataagatgtgtgaaaatatatttgaataaaagaagttcataaatatgcattgatttttgtacagacaaatggcacctctcttaatttataaattgaactggatgtgaactaataatgtgcaactagttgagataagagggttacagatcattgtacatggaaaatattcccagcagtaaacacttccattaatgtgatctacggcttttgaaaaggagcatctcagaataagatggtggtacaatttgcttattaaaattgagaaagaaaaaaaaa

SEQ ID NO: 370 - protein, 857 aa, Homo sapiens
MNYQQQLANSAAIRAEIQRFESVHPNIYSIYELLERVEEPVLQNQIREHVIAIEDAFVNSQEWTLSRSVPELKVGIVGNLASGKSALVHRYLTGTYVQEESPEGGRFKKEIVVDGQSYLLLIRDEGGPPEAQFAMWVDAVIFVFSLEDEISFQTVYHYYSRMANYRNTSEIPLVLVGTQDAISSANPRVIDDARARKLSNDLKRCTYYETCATYGLNVERVFQDVAQKIVATRKKQQLSIGPCKSLPNSPSHSSVCSAQVSAVHISQTSNGGGSLSDYSSSVPSTPSTSQKELRIDVPPTANTPTPVRKQSKRRSNLFTSRKGSDPDKEKKGLESRADSIGSGRAIPIKQGMLLKRSGKSLNKEWKKKYVTLCDNGVLTYHPSLHDYMQNVHGKEIDLLRTTVKVPGKRPPRATSACAPISSPKTNGLSKDMSSLHISPNSGNVTSASGSQMASGISLVSFNSRPDGMHQRSYSVSSADQWSEATVIANSAISSDTGLGDSVCSSPSISSTTSPKLDPPPSPHANRKKHRRKKSTSNFKADGLSGTAEEQEENFEFIIVSLTGQTWHFEATTYEERDAWVQAIESQILASLQSCESSKNKSRLTSQSEAMALQSIRNMRGNSHCVDCETQNPNWASLNLGALMCIECSGIHRNLGTHLSRVRSLDLDDWPVELIKVMSSIGNELANSVWEESSQGRTKPSVDSTREEKERWIRAKYEQKLFLAPLPCTELSLGQHLLRATADEDLRTAILLLAHGSRDEVNETCGEGDGRTALHLACRKGNVVLAQLLIWYGVDVTARDAHGNTALAYARQASSQECIDVLLQYGCPDERFVLMATPNLSRRNNNRNNSSGRVPTII

SEQ ID NO: 371 - DNA, 4371 bp, Homo sapiens
gctcggagcgggctccgcggcttgcaaggcgcctgcgactcggtcccaggtcggcgggcggcgcacggcgggctcgcgcgggggccccggcgcgccgggcggcgcagtacgcagcgcgcggacccacgccacggccaggagcccagagcagcgcggccacactgcccaggggtcggccctcggccccggcgctcggagcgcggcggctgcctgggctttaatggctgctccgcggagcagcgcctagggctggaaggcggctgcggctcaggaagtcacccgagcaagcctccttcggggccggccgcacccgccgcggcgcgctccatgggggcgcgctccccccgggcggcccgctgacccgggacgccggggcccgctcgctcgccggccgcgcgtcccggccatgaactgagcccgcgggccagccccgcgcctgctccgcccgcgcctttcttctcgcgcctcctccgcccgccgccggcgggcccggctccccgggggctgcggcgccccgggctcggcggcccgcgggccccggggcgcggggcggcggcggcggggggcgcgcggctccgggcgcggcgcctgcaccatgaactaccagcagcagctggccaactcggctgccatccgggccgagatccagcgcttcgagtcggtccaccccaacatctactccatctacgagctgctggagcgcgtggaggagccggtgctgcagaaccagatccgggagcacgtcatcgccatcgaagatgccttcgtgaacagccaggaatggacgctgagtcgatctgtcccggagctcaaagtgggaattgtgggtaacttggccagcggcaagtctgccctggtgcaccggtacctgacgggcacatatgtccaggaggagtctccggaaggtggcaggttcaagaaagagattgtcgttgatggacagagctatctgctgctgatcagagatgaagggggccccccggaggcgcagtttgccatgtgggtggacgctgttatatttgtcttcagcttggaggatgaaataagtttccagaccgtttaccactactacagtcgaatggccaactatcggaacacgagcgagattcctctggttctggtgggaacccaggatgccataagttctgctaacccgagggtcatcgatgacgccagggcgaggaagctctccaacgacctgaaacggtgcacgtactacgagacgtgtgctacatacgggctgaatgtggagagggtcttccaggacgttgcccagaagattgttgccacaaggaagaagcagcagctgtccataggaccctgcaagtcgctacctaattctcccagccattcctccgtctgttccgcgcaggtgtctgccgtgcacatcagccagacaagtaatggaggtgggagtttaagcgactattcctcctccgttccatcgactcccagcaccagccagaaggaacttcggatcgatgttcctcccactgccaacacgcccacgcccgttcgcaagcagtctaagcgccggtccaacctgttcacctctcggaaagggagcgacccagacaaagagaagaaaggcctggagagtcgtgcggacagcattgggagcggccgagccatcccaattaaacagggcatgctgttgaagcgaagtggcaaatcgttgaataaagagtggaaaaagaaatatgtcaccctgtgtgacaatggcgtgctgacctatcatcccagtttacatgattacatgcagaatgttcatggtaaggagattgaccttctgagaaccactgtgaaagtcccagggaagaggccaccccgagccacgtcagcctgcgcacccatctccagccctaaaaccaatggcctatccaaggacatgagcagtttacacatctcacccaattcagacacagggctgggtgactccgtatgctccagccccagtatctccagcaccaccagccccaagctcgacccgcccccctcccctcacgccaacagaaagaagcaccgaaggaagaaaagcactagcaacttcaaagccgacggcctgtccggcactgctgaagaacaagaagaaaattttgagtttatcattgtgtccctcactggccaaacatggcactttgaagccacgacgtatgaggagcgggacgcctgggtccaagccatcgagagccagatcctggccagcctgcagtcgtgcgagagcagcaagaacaagtcccggctgacgagccagagcgaggccatggccctgcagtcgatccggaacatgcgcgggaactcccactgtgtggactgcgagacccagaatcccaactgggccagtttgaacttgggagccctcatgtgcatcgaatgctcagggatccaccggaatcttggcacccacctttcccgagtccgatctctggacctggatgactggccagtcgagctcatcaaggtgatgtcatccatcgggaacgagctagccaacagcgtctgggaagagagcagccaggggcggacgaaaccatcggtagactccacaagggaagagaaggaacggtggatccgtgccaagtacgagcagaagctcttcctggccccgctgccctgcacggagctgtccctgggccagcacctgctgcgggccaccgccgacgaggacctgcggacggccatcctgctgctggcacacggctcccgggacgaggtgaacgagacctgcggggagggagacggccgcacggcgctgcatctggcctgccgcaaggggaatgtggtcctggcgcagctcctgatctggtacggagtggacgtcacggcccgagatgcccacgggaacacagctctggcctacgcccggcaggcctccagccaggagtgcatcgacgtgctgctgcagtacggctgccccgacgagcgcttcgtgctcatggccacccctaacctgtccaggagaaacaataaccggaacaacagcagtgggagggtgcccaccatcatctgaggaacagccgtgcccgcctgctcgccgcacctgggacgcggcagcctcgccgcattctcgctcagaagtcgcagcacgtgagtcccgtcgcatcccctccctcttcctggtggccacctccctcccgcccacccactctcaccccaaacaaaatcacaaaacctggacatccctcaaggggcgaagaggcggccgggagactgcagaagtggctccttttcataaactcccctaaaccacacacaggagagagcgacgggcctcggccctttgatgatagcacatggcgcaggacccttgtcctggtggcacaagggatggggacgcgagggggaggggaggcgaggaacaaggagaaggggcaactttccttaactggcagttgagcacatagtacatttcccctctaccaaacggaacacttggattccatctcttctctgaggagctcgacggcataaatcagaagcaagcacagagtttgtcaggtttgaagcccctatgatggtgtgtgtcaaatcagttgtagctaatctgtccagggagaatactggcttcattacacttgtacagccgagttcttcccgcattactgctgtttaatagaacgtgattagtcatcgccgagaagaaagcatattagccgaggaggtagtcacgcggcacgcgccggtgattgccacgatgtgattgcaatactcttagaagcaccatattatcccagacatgttctttcaagcccttggagccctctctaaattcactgtcatcatttagtatctgtttaatttttcagtccaaagagaggaaatcagtcgctgagtattatttgactccggtctccttggtgcaaaaacaaaatgggaaaaataaataagaataactcagaaactcaaaaggaaaccacaaattcagctaataatagcatttcgagtatatttcgtaaactaaggaaatacacaaaaggctgttttttccgactgtaagagatatttgatgtccttttgccgaggtggatgtgttagtctcaggccctcctggaccacgttgcccaagtcacacaggcttctgtgttatgtatttagataagatgtgtgaaaatatatttgaataaaagaagttcataaatatgcattgatttttgtacagacaaatggcacctctcttaatttataaattgaactggatgtgaactaataatgtgcaactagttgagataagagggttacagatcattgtacatggaaaatattcccagcagtaaacacttccattaatgtgatctacggcttttgaaaaggagcatctcagaataagatggtggtacaatttgcttattaaaattgagaaagaaaaaaaaa

SEQ ID NO: 372 - protein, 804 aa, Homo sapiens
MNYQQQLANSAAIRAEIQRFESVHPNIYSIYELLERVEEPVLQNQIREHVIAIEDAFVNSQEWTLSRSVPELKVGIVGNLASGKSALVHRYLTGTYVQEESPEGGRFKKEIVVDGQSYLLLIRDEGGPPEAQFAMWVDAVIFVFSLEDEISFQTVYHYYSRMANYRNTSEIPLVLVGTQDAISSANPRVIDDARARKLSNDLKRCTYYETCATYGLNVERVFQDVAQKIVATRKKQQLSIGPCKSLPNSPSHSSVCSAQVSAVHISQTSNGGGSLSDYSSSVPSTPSTSQKELRIDVPPTANTPTPVRKQSKRRSNLFTSRKGSDPDKEKKGLESRADSIGSGRAIPIKQGMLLKRSGKSLNKEWKKKYVTLCDNGVLTYHPSLHDYMQNVHGKEIDLLRTTVKVPGKRPPRATSACAPISSPKTNGLSKDMSSLHISPNSDTGLGDSVCSSPSISSTTSPKLDPPPSPHANRKKHRRKKSTSNFKADGLSGTAEEQEENFEFIIVSLTGQTWHFEATTYEERDAWVQAIESQILASLQSCESSKNKSRLTSQSEAMALQSIRNMRGNSHCVDCETQNPNWASLNLGALMCIECSGIHRNLGTHLSRVRSLDLDDWPVELIKVMSSIGNELANSVWEESSQGRTKPSVDSTREEKERWIRAKYEQKLFLAPLPCTELSLGQHLLRATADEDLRTAILLLAHGSRDEVNETCGEGDGRTALHLACRKGNVVLAQLLIWYGVDVTARDAHGNTALAYARQASSQECIDVLLQYGCPDERFVLMATPNLSRRNNNRNNSSGRVPTII

SEQ ID NO: 373 - DNA, 3489 bp, Homo sapiens
attccaagctgtcaccccgaagctgagtgaactccgcaaagcgtcttctgtgtacctgggaggagcatggtgccatttcccttcctccttcagactttcttctacatggaaggccccgtcctccacaggtcccagcctcagctgacactcgggtcccaggaggctctgcgaaggtttgctgggcggttcccccgcacgccgggctacaacaaaggaacacagcatgacacgtgctgtgaacctcagctgtgagacaaccgaaggagagacaacattcagcaaaaacagagcccaaactgtccccgtttctctcagccccaactgctccatggcttggagtgcagcaaatgtttcagccgcgctcaaagggaaggctttgctctggagtcagcatgcagagctcgcctcgactcccctccgtgccgctcctcaccagcactggctgggtttgaatctcagctccctggctcctcgctgtaagccctggaatgcaaaccccaagggccaaacaccccgaggctctcaggtcccaggcgcggacaccttcctggccttggctgtcatggcccagatggaagcaaagacaactcccctctccacaggtcggctggtcctcctgccccgagagcaggagcccaggcacaggctctgtacagagttctccatctacttctcccagggtggctatgcaaaggccgtctgcctctcgctctctgggtcccacctgcagcctgtcccagtggattctgtaggctccacagtgatgctgggaaaagacccaaacacccggacaaagcacgtggacagctgccaatgccaaaacggcaggaagcaagggaaaggcagctggctccgaccctttgccaaccgtgtgcaacgctgcaggcacctagagccagcgaggagctaccaaactggttcccatctatgcttgcagcggctgctgtcgcagaggcaggacaggggtgcatggctatgccaagtatccttctgggatgagccgattctcttgtcccaggtcgggcatgatggagaggccagaaggtagaagaccgggatcacggaacaggatcaggaccccagaacaggaccgagaccatgaaacaggaagcaagctacatccagcacccagttcagagagagggctggggacgccgacactccacctccttcccagcaaactcggaaggctccagggcatccctggagctgctctggcagagaagaatcagtgtccacacgtgcagctctcgctcgaggaagggcaggggcgacatcagaggcatgctttgcacagcacacgcttctagaatggctgggatttcaaccttgaaagtctcaactccttcttcctcctcagatcttgggattttgaaagtgattcctaaatgcctttcgatctcatttttgccgaaggagatggtcctaatttactgcattccaattggaaacatttttgagagtaaaaatacctgaagacatgttgggcctggaggtagcagactcaaaattaaagcaggggcccctctatccaccgccccccagattgcattaaacacagcatgttggggatcagtgagttgccatggccctgcaatcagacattttgccctctgaaatttagccttgattttgaagccctgagtttagtatatttagatgagctgacgggcccagggagtcactcagaaagggtagaggtccttcagagctgcgttaagatacagtgggagggggtcaaattgctaatttcatctgccactgaaaactcccaaacagcagagaacttcccagaagacttgtgaagttgggagtctgcaggtggcgggggttgggtggggaggtgatggcattctacccctaagagagcattttgaagttgaagctcaacttaaaatatttgtgcctatttttgagacagggtcttgctctgtcacccaggctggagtgcaatggcaccatctcagctcactgcagcctcgacctcccaggcttgagcaatcctctcacctcagcctcctgagtagctgggactacaggcatgcaccaccacacttggctaatgtgtgtatgtgtgtgtgtgtttgtagaaatggggttttgccctgttgcccaggctggtctcaaactcccgaactcaagccacctgctctcctcggcctcccaaagtgttgggattacagatgtgcatcatcgtgcccagccacattatgctttttagagggacatcaccaatcagacagtggcctgggctggacacagcatccctggaagacggcccctctctaaggtgtcatctgccattagccaaggaccctcttgtctctctagctccaagtctccacagaggatgtgctcaaaatgacctctgtggagaccctctctccagataaagcctccttcagataaagcctcttgcggataaagcctaaagcactggtggtcaggacttcaacgtgtgaattccaggaggacacacttcagcccattacagacctgatggcttctgccagacacccagccgatccccatggcttatggaggaagaagacaagtggagacggggaggtggtcgggcgaccctttccacggccagcagcaactgcacccgtgtctgggcacctcctgagtgctgtaagcccccatgcatcatcaagacggaggcccaggcaagggcaggtgggagctgaaacccgtctcaggagatccccaagccaccttcccttggtcccagcccagattgtggctcccctgtgtgcctcccaggccccaggatagacgtcaaccgtgtccccttgtgggtgccttgagcttagcacctgcctgtcccttccaggggcccctctaatacaggacttacatcttcatgaagacactaactgtactagtgcgtgttctccagaggagcagagccactcaaggtgtgcgcatcagaagagagctattttaaggaactggctgacgctgtcaggccttcaactgattgggtgaggcccaccccttttgacgagagccacctgctttactcgaaggctaatctcatctagaaacacctttacagcaccaccgtccaaagtggagatgatgtcagcaaaggggatattgaagcagatggagtggtacagatggtgggtcactaaaacgcaggttgaaggcttttcacatcaagtcatgcctgtgcccacagacaggggaggaggtggcatgaggctccaagctctggagccttggaagtcaggcaggccccactggaatcacagccccctactcccaggcacacctaaggagtcagtctctcctgaccgatggatccaacttcacagctgcgactgagcaccagggggacgtggcgctgggaaattgtcccggcagacgagactgaaccctagaagggccccatggtaaaactgataaagcctgaaatgtgtgtgcagacatgggcctctttattaccacacaacgaccattaaaatctctctgctatggtgt

SEQ ID NO: 374 - protein, 274 aa, Homo sapiens
MTRAVNLSCETTEGETTFSKNRAQTVPVSLSPNCSMAWSAANVSAALKGKALLWSQHAELASTPLRAAPHQHWLGLNLSSLAPRCKPWNANPKGQTPRGSQVPGADTFLALAVMAQMEAKTTPLSTGRLVLLPREQEPRHRLCTEFSIYFSQGGYAKAVCLSLSGSHLQPVPVDSVGSTVMLGKDPNTRTKHVDSCQCQNGRKQGKGSWLRPFANRVQRCRHLEPARSYQTGSHLCLQRLLSQRQDRGAWLCQVSFWDEPILLSQVGHDGEARR

SEQ ID NO: 375 - DNA, 8459 bp, Homo sapiens
ggaggttgtggggccgccgccgcggagcaccgtccccgccgccgcccgagcccgagcccgagcccgcgcacccgcccgcgccgccgccgccgccgcccgaacagcctcccagcctgggcccccggcggcgccgtggccgcgtcccggctgtcgccgcccgagcccgagcccgcgcgccggcgggtggcggcgcaggctgaggagatgcggcgcggagcgccggagcagggctagagccggccgccgccgcccgccgcggtaagcgcagccccggcccggcgcccgcgggccattgtccgccgcccgccccgcgccccgcgcagcctgcaggccttggagcccgcggcaggtggacgccgccggtccacacccgccccgcgcgcggccgtgggaggcgggggccagcgctggccgcgcgccgtgggacccgccggtccccagggccgcccggccccttctggacctttccacccgcgccgcgaggcggcttcgcccgccggggcgggggcgcgggggtgggcacggcaggcagcggcgccgtctcccggtgcggggcccgcgccccccgagcaggttcatctgcagaagccagcggacgcctctgttcaacttgtgggttacctggctcatgagaccttgccggcgaggctcggcgcttgaacgtctgtgacccagccctcaccgtcccggtacttgtatgtgttggtgggagtttggagctcgttggagctatcgtttccgtggaaattttgagccatttcgaatcacttaaaggagtggacattgctagcaatgagctcccaaagccatccagatggactttctggccgagaccagccagtggagctgctgaatcctgcccgcgtgaaccacatgcccagcacggtggatgtggccacggcgctgcctctgcaagtggccccctcggcagtgcccatggacctgcgcctggaccaccagttctcactgcctgtggcagagccggccctgcgggagcagcagctgcagcaggagctcctggcgctcaagcagaagcagcagatccagaggcagatcctcatcgctgagttccagaggcagcacgagcagctctcccggcagcacgaggcgcagctccacgagcacatcaagcaacaacaggagatgctggccatgaagcaccagcaggagctgctggaacaccagcggaagctggagaggcaccgccaggagcaggagctggagaagcagcaccgggagcagaagctgcagcagctcaagaacaaggagaagggcaaagagagtgccgtggccagcacagaagtgaagatgaagttacaagaatttgtcctcaataaaaagaaggcgctggcccaccggaatctgaaccactgcatttccagcgaccctcgctactggtacgggaaaacgcagcacagttcccttgaccagagttctccaccccagagcggagtgtcgacctcctataaccacccggtcctgggaatgtacgacgccaaagatgacttccctcttaggaaaacagcttctgaaccgaatctgaaattacggtccaggctaaagcagaaagtggccgaaagacggagcagccccctgttacgcaggaaagacgggccagtggtcactgctctaaaaaagcgtccgttggatgtcacagactccgcgtgcagcagcgccccaggctccggacccagctcacccaacaacagctccgggagcgtcagcgcggagaacggtatcgcgcccgccgtccccagcatcccggcggagacgagtttggcgcacagacttgtggcacgagaaggctcggccgctccacttcccctctacacatcgccatccttgcccaacatcacgctgggcctgcctgccaccggcccctctgcgggcacggcgggccagcaggacaccgagagactcacccttcccgccctccagcagaggctctcccttttccccggcacccacctcactccctacctgagcacctcgcccttggagcgggacggaggggcagcgcacagccctcttctgcagcacatggtcttactggagcagccaccggcacaagcacccctcgtcacaggcctgggagcactgcccctccacgcacagtccttggttggtgcagaccgggtgtccccctccatccacaagctgcggcagcaccgcccactggggcggacccagtcggccccgctgccccagaacgcccaggctctgcagcacctggtcatccagcagcagcatcagcagtttctggagaaacacaagcagcagttccagcagcagcaactgcagatgaacaagatcatccccaagccaagcgagccagcccggcagccggagagccacccggaggagacggaggaggagctccgtgagcaccaggctctgctggacgagccctacctggaccggctgccggggcagaaggaggcgcacgcacaggccggcgtgcaggtgaagcaggagcccattgagagcgatgaggaagaggcagagcccccacgggaggtggagccgggccagcgccagcccagtgagcaggagctgctcttcagacagcaagccctcctgctggagcagcagcggatccaccagctgaggaactaccaggcgtccatggaggccgccggcatccccgtgtccttcggcggccacaggcctctgtcccgggcgcagtcctcacccgcgtctgccaccttccccgtgtctgtgcaggagccccccaccaagccgaggttcacgacaggcctcgtgtatgacacgctgatgctgaagcaccagtgcacctgcgggagtagcagcagccaccccgagcacgccgggaggatccagagcatctggtcccgcctgcaggagacgggcctccggggcaaatgcgagtgcatccgcggacgcaaggccaccctggaggagctacagacggtgcactcggaagcccacaccctcctgtatggcacgaaccccctcaaccggcagaaactggacagtaagaaacttctaggctcgctcgcctccgtgttcgtccggctcccttgcggtggtgttggggtggacagtgacaccatatggaacgaggtgcactcggcgggggcagcccgcctggctgtgggctgcgtggtagagctggtcttcaaggtggccacaggggagctgaagaatggctttgctgtggtccgcccccctggacaccatgcggaggagagcacgcccatgggcttttgctacttcaactccgtggccgtggcagccaagcttctgcagcagaggttgagcgtgagcaagatcctcatcgtggactgggacgtgcaccatggaaacgggacccagcaggctttctacagcgaccctagcgtcctgtacatgtccctccaccgctacgacgatgggaacttcttcccaggcagcggggctcctgatgaggtgggcacagggcccggcgtgggtttcaacgtcaacatggctttcaccggcggcctggacccccccatgggagacgctgagtacttggcggccttcagaacggtggtcatgccgatcgccagcgagtttgccccggatgtggtgctggtgtcatcaggcttcgatgccgtggagggccaccccacccctcttgggggctacaacctctccgccagatgcttcgggtacctgacgaagcagctgatgggcctggctggcggccggattgtcctggccctcgagggaggccacgacctgaccgccatttgcgacgcctcggaagcatgtgtttctgccttgctgggaaacgagcttgatcctctcccagaaaaggttttacagcaaagacccaatgcaaacgctgtccgttccatggagaaagtcatggagatccacagcaagtactggcgctgcctgcagcgcacaacctccacagcggggcgttctctgatcgaggctcagacttgcgagaacgaagaagccgagacggtcaccgccatggcctcgctgtccgtgggcgtgaagcccgccgaaaagagaccagatgaggagcccatggaagaggagccgcccctgtagcactccctcgaagctgctgttctcttgtctgtctgtctctgtcttgaagctcagccaagaaactttcccgtgtcacgcctgcgtcccaccgtggggctctcttggagcacccagggacacccagcgtgcaacagccacgggaagcctttctgccgcccaggcccacaggtctcgagacgcacatgcacgcctgggcgtggcagcctcacagggaacacgggacagacgccggcgacgcgcagacacacggacacgcggaagccaagcacactctggcgggtcccgcaagggacgccgtggaagaaaggagcctgtggcaacaggcggccgagctgccgaattcagttgacacgaggcacagaaaacaaatatcaaagatctaataatacaaaacaaacttgattaaaactggtgcttaaagtttattacccacaactccacagtctctgtgtaaaccactcgactcatcttgtagcttattttttttttaaagaggacgttttctacggctgtggcccgcctctgtgaaccatagcggtgtgcggcggggggtctgcacccgggtgggggacagagggacctttaaagaaaacaaaactggacagaaacaggaatgtgagctgggggagctggcttgagtttctcaaaagccatcggaagatgcgagtttgtgcctttttttttattgctctggtggatttttgtggctgggttttctgaagtctgaggaacaatgccttaagaaaaaacaaacagcaggaatcggtgggacagtttcctgtggccagccgagcctggcagtgctggcaccgcgagctggcctgacgcctcaagcacgggcaccagccgtcatctccggggccaggggctgcagcccggcggtccctgttttgctttattgctgtttaagaaaaatggaggtagttccaaaaaagtggcaaatcccgttggaggttttgaagtccaacaaattttaaacgaatccaaagtgttctcacacgtcacatacgattgagcatctccatctggtcgtgaagcatgtggtaggcacacttgcagtgttacgatcggaatgctttttattaaaagcaagtagcatgaagtattgcttaaattttaggtataaataaatatatatatgtataatatatattccaatgtattccaagctaagaaacttacttgattcttatgaaatcttgataaaatatttataatgcatttatagaaaaagtatatatatatatataaaatgaatgcagattgcgaaggtccctgcaaatggatggcttgtgaatttgctctcaaggtgcttatggaaagggatcctgattgattgaaattcatgttttctcaagctccagattggctagatttcagatcgccaacacattcgccactgggcaactaccctacaagtttgtactttcattttaattattttctaacagaaccgctcccgtctccaagccttcatgcacatatgtacctaatgagtttttatagcaaagaatataaatttgctgttgatttttgtatgaattttttcacaaaaagatcctgaataagcattgttttatgaattttacatttttcctcaccatttagcaattttctgaatggtaataatgtctaaatctttttcctttctgaattcttgcttgtacatttttttttacctttcaaaggtttttaattatttttgtttttatttttgtacgatgagttttctgcagcgtacagaattgttgctgtcagattctattttcagaaagtgagaggagggaccgtaggtcttttcggagtgacaccaacgattgtgtctttcctggtctgtcctaggagctgtataaagaagcccaggggctctttttaactttcaacactagtagtattacgaggggtggtgtgtttttcccctccgtggcaagggcagggagggttgcttaggatgcccggccaccctgggaggcttgccagatgccgggggcagtcagcattaatgaaactcatgtttaaacttctctgaccacatcgtcaggatagaattctaacttgagttttccaaagaccttttgagcatgtcagcaatgcatggggcacacgtggggctctttacccacttgggtttttccactgcagccacgtggccagccctggattttggagcctgtggctgcaaggaacccagggacccttgttgcctggtgaacctgcagggagggtatgattgcctgaccaggacagccagtctttactctttttctcttcaacagtaactgacagtcacgttttactggtaacttattttccagcacatgaagccaccagtttcattccaaagtgtatattgggttcagacttgggggcagaagttcagacacaccgtgctcaggagggacccagagccgagtttcggagtttggtaaagtttacagggtagcttctgaaattaactcaaacttttgaccaaatgagtgcagattcttggattcacttggtcactgggctgctgatggtcagctctgagacagtggtttgagagcaggcagaacggtcttgggacttgtttgactttcccctccctggtggccactctttgctctgaagcccagattggcaagaggagctggtccattccccattcatggcacagagcagtggcagggcccagctagcaggctcttctggcctccttggcctcattctctgcatagccctctggggatcctgccacctgccctcttaccccgccgtggcttatggggaggaatgcatcatctcactttttttttttaagcagatgatgggataacatggactgctcagtggccaggttatcagtggggggacttaattctaatctcattcaaatggagacgccctctgcaaaggcctggcagggggaggcacgtttcatctgtcagctcactccagcttcacaaatgtgctgagagcattactgtgtagccttttctttgaagacacactcggctcttctccacagcaagcgtccagggcagatggcagaggatctgcctcggcgtctgcaggcgggaccacgtcagggagggttccttcatgtgttctccctgtgggtccttggacctttagcctttttcttcctttgcaaaggccttgggggcactggctgggagtcagcaagcgagcactttatatccctttgagggaaaccctgatgacgccactgggcctcttggcgtctgccctgccctcgcggcttcccgccgtgccgcagcgtgcccacgtgcccacgccccaccagcaggcggctgtcccggaggccgtggcccgctgggactggccgcccctccccagcgtcccagggctctggttctggagggccactttgtcaaggtgtttcagtttttctttacttcttttgaaaatctgtttgcaaggggaaggaccatttcgtaatggtctgacacaaaagcaagtttgatttttgcagcactagcaatggactttgttgtttttctttttgatcagaacattccttctttactggtcacagccacgtgctcattccattcttctttttgtagactttgggcccacgtgttttatgggcattgatacatatataaatatatagatataaatatatatgaatatatttttttaagtttcctacacctggaggttgcatggactgtacgaccggcatgactttatattgtatacagattttgcacgccaaactcggcagctttggggaagaagaaaaatgcctttctgttcccctctcatgacatttgcagatacaaaagatggaaatttttctgtaaaacaaaaccttgaaggagaggagggcggggaagtttgcgtcttattgaacttattcttaagaaattgtactttttattgtaagaaaaataaaaaggactacttaaacatttgtcatattaagaaaaaaagtttatctagcacttgtgacataccaataatagagtttattgtatttatgtggaaacagtgttttagggaaactactcagaattcacagtgaactgcctgtctctctcgagttgatttggaggaattttgttttgttttgttttgtttgtttccttttatctccttccacgggccaggcgagcgccgcccgccctcactggccttgtgacggtttattctgattgagaactgggcggactcgaaagagtccccttttccgcacagctgtgttgactttttaattacttttaggtgatgtatggctaagatttcactttaagcagtcgtgaactgtgcgagcactgtggtttacaattatactttgcatcgaaaggaaaccatttcttcattgtaacgaagctgagcgtgttcttagctcggcctcactttgtctctggcattgattaaaagtctgctattgaaagaaaaag

SEQ ID NO: 376 - protein, 1084 aa, Homo sapiens
MSSQSHPDGLSGRDQPVELLNPARVNHMPSTVDVATALPLQVAPSAVPMDLRLDHQFSLPVAEPALREQQLQQELLALKQKQQIQRQILIAEFQRQHEQLSRQHEAQLHEHIKQQQEMLAMKHQQELLEHQRKLERHRQEQELEKQHREQKLQQLKNKEKGKESAVASTEVKMKLQEFVLNKKKALAHRNLNHCISSDPRYWYGKTQHSSLDQSSPPQSGVSTSYNHPVLGMYDAKDDFPLRKTASEPNLKLRSRLKQKVAERRSSPLLRRKDGPVVTALKKRPLDVTDSACSSAPGSGPSSPNNSSGSVSAENGIAPAVPSIPAETSLAHRLVAREGSAAPLPLYTSPSLPNITLGLPATGPSAGTAGQQDTERLTLPALQQRLSLFPGTHLTPYLSTSPLERDGGAAHSPLLQHMVLLEQPPAQAPLVTGLGALPLHAQSLVGADRVSPSIHKLRQHRPLGRTQSAPLPQNAQALQHLVIQQQHQQFLEKHKQQFQQQQLQMNKIIPKPSEPARQPESHPEETEEELREHQALLDEPYLDRLPGQKEAHAQAGVQVKQEPIESDEEEAEPPREVEPGQRQPSEQELLFRQQALLLEQQRIHQLRNYQASMEAAGIPVSFGGHRPLSRAQSSPASATFPVSVQEPPTKPRFTTGLVYDTLMLKHQCTCGSSSSHPEHAGRIQSIWSRLQETGLRGKCECIRGRKATLEELQTVHSEAHTLLYGTNPLNRQKLDSKKLLGSLASVFVRLPCGGVGVDSDTIWNEVHSAGAARLAVGCVVELVFKVATGELKNGFAVVRPPGHHAEESTPMGFCYFNSVAVAAKLLQQRLSVSKILIVDWDVHHGNGTQQAFYSDPSVLYMSLHRYDDGNFFPGSGAPDEVGTGPGVGFNVNMAFTGGLDPPMGDAEYLAAFRTVVMPIASEFAPDVVLVSSGFDAVEGHPTPLGGYNLSARCFGYLTKQLMGLAGGRIVLALEGGHDLTAICDASEACVSALLGNELDPLPEKVLQQRPNANAVRSMEKVMEIHSKYWRCLQRTTSTAGRSLIEAQTCENEEAETVTAMASLSVGVKPAEKRPDEEPMEEEPPL

SEQ ID NO: 377 - DNA, 509 bp, Homo sapiens
atggtgccaaaagcgaagaaggaagttcctgcccctcctaaagctgaagcccaagggaaggctttaaatgccaagaaagcggtgttgaaaggtgtccacagccacaaaaaaaaagaagatccacacgtcactcaccttctggaggcccaagacactgggactctggaggccgttcaaatatccttggaagagcgctcacaggagaaacaagtttgaccactatgctatcatgaagtttcctctgatcactgagttggccataaagaagatagaagacaacaacacacttgtgttcactgtggatgttaaagccaacaagcaccagatcaaacaggctgtgaagaagctctatgacattgatgtggccaaggtcaacaccctgattcgacctgatggagagaagaaggcatatgttcaactggctcctgattatgatgctttggatgttgcaaacaaaattgggatcatctaaactgagtccagctggctaattctaaatatatgtatat

SEQ ID NO: 378 - DNA, 3008 bp, Homo sapiens
gggtgccgacggcggcgccgggacgggcgtggggggtagggcgagtcatatgatccgctcggcttcctgggtctggctgctgccgcccgccggtgtccgcccgtgtcgcgccggggcaccaaggagccgttggagggtccgggcggaggcccgctcgtgtggaagtcgtcgacgccgccgctcgtccgtcctcccgtccgttctcgctcccggccgccatcatgctggcgctcatctcccgcctgctggactggttccgttcgctcttctggaaggaagagatggagctgacgctcgtggggctgcagtactcgggcaagaccaccttcgtcaatgtcatcgcgtcaggtcaattcagtgaagatatgatacccacagtgggcttcaacatgaggaaggtaactaaaggtaacgtcacaataaagatctgggacataggaggacaaccccgatttcgaagcatgtgggagcggtattgcagaggagtcaatgctattgtttacatgatagatgctgcagatcgtgaaaagatagaagcttcccgaaatgagctacataatcttctagataaaccacagttacaaggaattccagtgctagtgcttggaaacaagagagatcttcctaatgccttggatgagaaacagctaattgaaaaaatgaatctgtctgctattcaggatagagaaatttgctgctattcaatttcttgcaaagaaaaggataatatagatatcacacttcagtggcttattcagcattcaaaatctagaagaagctgaagcatctcctgaagtcttccagtccttcttggctataatcctagaattattgtccgttcctctgaagtaattcccagaatacggtccttcctaaaccccagaaattgcctttttcagagtttatttctcatgtgcactgctgaagatgaatatccctaatccttcataaagaatcagctagagttgtcatgataaagtcagcacacacaaaaaggcttcttacacatacctgtcttaaaccatgtgtagagctttaaaaacagaaaaaaaaccccatatacttatgaccatcttaaatcaagaaaattgcatatttccattctggtctttctgggccagatttttatattggttttcagtaaatgtctatctataatatttcattatagagtccagtagcttaatactgacactgacttgatacagcatgaagtttctagtgccacacacagtatttagaaaacctttaggcgtgaatgactcatgtgggatatatgtaaacataatgtttattttatctcacaaatgcatgtgaaatgtataattacatcttaggaatccaaaatggtctgcagagagtgagcggaggcaccagatcaatgttggttctttgcactggtgagattctgcctgatgaatattaaagatatcctgctttctgagaactctatcaccagatggcagttgggatatgggaggaactaaagcatcctgttttgtatctgtccagatcattatttctgtctcttgttttttcttcctggttcaggatacttttttaaggggttgagaattgaagattttccaaaagcgttcatgaatttagagcattccacccaatataataaaacctgttaagaatgtcagtctttgttcaaacatctgtttgttctatctccagtcattaaatcagtgctgctgcatgacactcttaactcctgactttttatatccagtcataaagttgactttcagcacaaaagatacttataaacaaataaaaaatttttatttttctctcttactgatgtaagctttggcactcttttgactggtgccattagacatcttgattattgtgacaactctagacctgcctgctttatctaatgtaatcatgctcaatgtctacaggttgtttaataatcagtcacacagagaactgaggaactgatgctgtttgtttgcttctatgatacagagatgtctaaaaacttcaaatggacatgttttgtagtttagcgacttccgtatacataaagggacatattaatactggttcatttgtaaattattattcatatagaccactgtagtagataaaactctatggtacacctgcttatgtgttgcctcacactgtgtgtgattttgtttcttttgttaagcagcacttatgtagactgcatttccaaatgtgttgagcactcagagtgtagtcaacagtaagttcttttaatgaatatcagttttaatttatagactgccatggccttaaaaatattctgtacaatatactgcactgtgttgcacagacactacttgcttttctccattcatatttttatgagtagaatctgggcttttaaatttctcttcttattctttgaagcatgttgcatactaccctggtgggatggatggttctgtaaatgaagggatatttaaacttgctactgttgttcaacaccattaatggtcagtgtgaaccattacaaagaatgtggcaacttgcttgtgcctaaaaggaggaattggaactagaatgtgtgactctgtggggactgcataggtttgttaattgacctatagctaaaccttaatgtgtttgtgtgtctatacattgctttccgcatttcaagacatccagacgctattaccaacattttcctgtgcattaacctctgcatgtgaaaacttttaacagttactgaactatgtaaatatgtgaatttttttatttaggtggatgcattttttgtctgtttactgctcttctcagctttattcaataaacttgcattttaagggttgtattggcaattttaacttaaaatgtgcatcatgatggaaggtgcagacttttttggaagtttccgagaggagggtctatagaccatttgtcagaaatcagatcagccctcaaagaatggggtctgtgggctagttaaaatagaaataaacttttaaaatatccacagaaaaaaaaaaaaaaaaaaaaaaaaa

SEQ ID NO: 379 - protein, 186 aa, Homo sapiens
MLALISRLLDWFRSLFWKEEMELTLVGLQYSGKTTFVNVIASGQFSEDMIPTVGFNMRKVTKGNVTIKIWDIGGQPRFRSMWERYCRGVNAIVYMIDAADREKIEASRNELHNLLDKPQLQGIPVLVLGNKRDLPNALDEKQLIEKMNLSAIQDREICCYSISCKEKDNIDITLQWLIQHSKSRRS

SEQ ID NO: 380 - DNA, 6072 bp, Homo sapiens
ggtggtcggcggggaggcccccgcgctttaaaataatgcccgcggcgcccgcgcgaccatgcaatggcgagcgctcgtcctggggctggtgctcctccggcttggcctccatggagtattgtggctcgtcttcgggctggggcccagcatgggcttctaccagcgctttccgctcagcttcggcttccagcgtctgaggagccccgacggccccgcgtcgcccacctcggggcccgtgggccggcctgggggggtatccgggccgtcgtggctgcagccgccggggaccggggcagcgcagagcccgcgcaaggctccgcggcgtcctgggccggggatgtgcggcccagccaactggggctacgtgctgggcggccggggccgcggcccggacgagtacgagaagcgctacagcggcgccttccctccgcagctgcgtgcccagatgcgcgacctggcacggggcatgttcgtctttggctacgacaactacatggctcacgccttcccccaggacgagctcaaccccatccactgccgcggccgtgggcccgaccgcggggacccttcaaatctgaacatcaatgatgtactagggaactactcattgactcttgttgatgcattggatacacttgcaataatgggaaattcatccgagttccagaaagcagtcaagttagtgatcaacacagtttcatttgacaaagattccaccgtccaagtctttgaggccacgataagggtcctgggaagcctcctttctgctcacagaataataactgactccaagcagccctttggtgacatgacaattaaggactatgataatgagttgttatacatggcccatgacctggcggtgcggctcctccctgcttttgaaaacaccaagacagggattccatatcctcgggtgaatctaaagacaggagttcctcctgacaccaataatgagacatgcacagcgggagccggttccctcctggtggaatttgggattctgagtcgactcctgggggactccacatttgagtgggtggccagacgagcagtgaaagccctttggaacctccggagcaatgatacaggattactaggcaatgtcgtgaacattcagacgggccactgggttggaaagcagagtggcctgggtgccgggctggactccttctatgaatacctcttgaaatcttacattctctttggagaaaaagaagacctagaaatgtttaatgctgcatatcagagtattcagaactacttaagaagagggcgggaagcctgcaatgaaggagaaggagaccctccactctatgtcaacgtgaacatgttcagtgggcagctgatgaacacctggattgactctctgcaggcctttttccctggactgcaggtgctgataggagatgtggaagatgccatctgccttcatgccttctactatgccatatggaaacgatatggtgccctccctgagagatataactggcagctgcaggcccctgacgttctcttctacccactgagaccagagttagtggaatccacatatctcctctaccaggcaaccaagaatcccttctacctccatgtaggaatggatattctgcagagtctggaaaagtacacaaaagtcaagtgtgggtacgccacgctgcatcacgtcattgacaagtccacagaagaccggatggagagcttctttctcagtgagacctgtaaatatttgtatctgctgtttgatgaagacaatccagtacacaagtctggaaccagatacatgttcacaacagagggacacattgtatctgtggatgagcatcttcgggaattgccatggaaggaattcttctctgaagagggagggcaggaccaagggggaaagtctgtgcacaggccgaaacctcatgagttaaaagtcatcaactccagctccaactgcaatcgtgtacctgatgagaggaggtactccctgcccttaaagagcatctacatgcgacagattgaccagatggttggtttgatttgatctgctctctgtgaggcctcatcttgaaccagaccttaacgaccaaacccagaccatgccaaagtccagtctgaaatgaaaggggacagaagtcttgctgtccatggtggtgtaggaatttctgtgcaacacctcaccacgtctggttaatccttgcacacttcagtgtttctctcctgttcaataaaatgccctgttaaggatataatttgaagtgagaagatacatggaaattgccctcttatgacatgttgatgttataagcacaatagatggggcatctttggattgatgttcacagctttatacttcagaacctaagtctcttcactttgctggcacctgctatactggagtattgctatgtctttaaaaaatttttttttattatattttatttttttgagacagggtcttgatatttttttgggacagggttacctgggctcaagtgatccttctgcctcagcctcccgagtagctgggattacaggtgagcaccactgtacctggctagctacttctttgttagaggattgagaatgaaatttctgcaaaagggcccatggttcatttggtatccctatttaattgcattgaaaatgtcatcctttctgttgttagataattggggtcttcccctgatatccaaccgtgattttggatcacatgggagaaaaagtcatccagtttttcatgtttgcctcaagtaatctttacagtgttacaaattatttgcttaagaagaatggtcttaaccagaattcttaacagatagtctcttaggttattatgttatggtctaagaggttaactgacatcttttggatggtattttgcattttgaatatgaacttacctgaggaactcccatagttccagaatcaggtgccttttagggagagaacaatacctaagattgtctgagcttccatctttctcatatttcctaagcaaggattctcacttatgaccatatttgggttagagttctgttttgtttctgttttctgtgtctagtgccaattagctaaatcagggagaaagaaatgatcacatgacttttagcatccttgagccatttctctgtgtaatacaggctttagattagtgccttatattggttttggtttggggcactggatgtcgcagctactgctatggtttcaggaggcctgtttagccacatggtgagaccgtggtgaaagggggatggaaattgcttggccagtctttgcctttcatcctgtaaaagtaagcatgtagaaggaggaagttgtgctaaaatgcctttgtttttttgttattattttcttagccagaacatctctctttgaactcacactgatacacacctgctactcttacacagtgcagcagggctgactcttagtctggcttccatgaagcgtcatgggtggaaacgcattctagtaaaaaaggtaggaaatccctaaaacttccagcctcacatagcacggttctcacctgtcactgttttcccacctctaaggatttcatgtacatcttttcaaagctagaaataagcactgtctaagtttatgttgcatttttagtcaaaagggagaaatcttattccttcttgaaaattttaagtgttatggttttatatagttcagttctttgagatttttgaaaagagtattttcagtaataaacgtgccatctctatctcttaaacatttattacaacaattgttttaaaatagaaaaaataaaatgcttctattttaccttttttcatttcagaagcattattctgtttattaacagtgtcccatctactgaatagaaaactttgagaataatatatatatatattttaaatgttttcactgactcattgaaaatgttaattacacacacatgcatgcatgcacacacgagcatacttgtacctttgtctctgggcaaacaggtgggactgttagtgacccatttgggaaaatagagcatctcagagaaggaggtgagttcttcctgcctgtgatttctcttggcgctcccctcctctcccgctctggcttctgtggcggcagtggtgggtaagcactccagtgttctcttaatgaggcactttgcctgtcactcgagcaagcctgggtgttccttcctcctcatgctcctggaatagggaatagggatctcatgcttgcaaactacacaatgctgcaggtgcttcccaggggccacaggctgtcaggaaacgtgttttatgttaagtcacaaacccacttgacttctgggtactggaattaataccagtgggtgagactgagggtgagtgagttagtacatattaatcctggttgttgagcttccagactaccccgtccaaagtttgatgctatgtagtcagtggtttgtggggctggatgccagaaggttctttgagccagtttcaaaggttacttgtttttttttttttttttttaagtcagaatgttaacagctgtgatatatcctgcagggcttttgcagtttcttctgttctgtgttctgaaatcctgggtagagaatggctgaggaggagattaccagagaagttgctttgctcagtgctttgccccaggattgcctcaaatctgagtggacttcatcctttgcggcggctctgagcctggcccatcttcctattcccacgtgtagctagtgtctagtgtcagctttgctcaatgtggtggaaacattttgcagaactgttgtagaaagctgccttatagttggcttgacaaagcataattctctcataacaaactttcaaatcattacagtagcttagctactttagttgatgtgaccgaggaatcccttctagaatcataggtggcaagggagggtttgctagctctccatttgcactggccattgtgaaaaaccagcttctgtattcaaatctttccttcatttttttaaattttttttttggcagcgcttgtgctggaacttactcattgtaactgaatcctcagggcttttcttgttttagatcatggactgtgcacgtgacacttaaataattttctatgtatttaaagaaaaatgcaccaggatggtgtctgtgcacgtgactattagaggagcgtctgtagaagtacctggtttggtcagtgcagttgtgcaatctgagggccttgtttcctcctcccctttccccttctccccaccaaaggaaaatatccctcttaatgatttcgtagttcagtttactgaatgattaccacctgtaattcctctttggattgtgtagactcaacatgagacattcctttctgctttctggagggcaccaggggcctttctctttgataaattttttttgtctgttgacaaaaacaaaaatcttttttcaaatgtagtgctggtgaaaaggtagggctgagtgattaccttagccacagggtggctgagcaggaactttagaagaaaatcctgagctttcctgtccattcccagcatccagctcctattctagtgcctcttccctgcagggcagggaccccttgggaaatcgaggaggtgggacgggctgggccctgtgtcccaggtttcacagggctcagggttatgctcccgcttgaatctggacgtgaatctggtaaaaatatcaagtacctgtggaactccctgattctataccctcttccttctttctgcaaggcagaggaataatatttttaaaggttattttgttttagttttaaatagcaaaacacaagctgcatttttatttattttgcataagaaaggtaaatctttttacaaaaaaaagtatagagttggaaactctgggaaaacttacggaaatacacaaatgcttctctgtaatgtgcaatatgctttgcaactgtagatgatattttatgtttaatctgtaaataagaaatgtatttaaattaaaagggatctttttgtaaaaggaccaaatgttcttttataaatgtaataaggaatatcttgctctttaaaatttattaggatttttatgagtaatttttattaaaagatttctttttttg

SEQ ID NO: 381 - protein, 657 aa, Homo sapiens
MQWRALVLGLVLLRLGLHGVLWLVFGLGPSMGFYQRFPLSFGFQRLRSPDGPASPTSGPVGRPGGVSGPSWLQPPGTGAAQSPRKAPRRPGPGMCGPANWGYVLGGRGRGPDEYEKRYSGAFPPQLRAQMRDLARGMFVFGYDNYMAHAFPQDELNPIHCRGRGPDRGDPSNLNINDVLGNYSLTLVDALDTLAIMGNSSEFQKAVKLVINTVSFDKDSTVQVFEATIRVLGSLLSAHRIITDSKQPFGDMTIKDYDNELLYMAHDLAVRLLPAFENTKTGIPYPRVNLKTGVPPDTNNETCTAGAGSLLVEFGILSRLLGDSTFEWVARRAVKALWNLRSNDTGLLGNVVNIQTGHWVGKQSGLGAGLDSFYEYLLKSYILFGEKEDLEMFNAAYQSIQNYLRRGREACNEGEGDPPLYVNVNMFSGQLMNTWIDSLQAFFPGLQVLIGDVEDAICLHAFYYAIWKRYGALPERYNWQLQAPDVLFYPLRPELVESTYLLYQATKNPFYLHVGMDILQSLEKYTKVKCGYATLHHVIDKSTEDRMESFFLSETCKYLYLLFDEDNPVHKSGTRYMFTTEGHIVSVDEHLRELPWKEFFSEEGGQDQGGKSVHRPKPHELKVINSSSNCNRVPDERRYSLPLKSIYMRQIDQMVGLI

SEQ ID NO: 382 - DNA, 1732 bp, Homo sapiens
gaggggcgggggctggaggcagcagcgcccccgcactccccgcgtctcgcacacttgcaccggtcgctcgcgcgcagcccggcgtcgccccacgccgcgctcgctcctccctccctcctcccgctccgtggctcccgtgctcctggcgaggctcaggcgcggagcgcgcggacgggcgcaccgacagacggccccggggacgcctcggctcgcgcctcccgggcgggctatgttgattgccccgccggggccggcccgcgggatcagcacagcccggcccgcggccccggcggccaatcgggactatgaaccggaaagcgcggcgctgcctgggccacctctttctcagcctgggcatggtctacctccggatcggtggcttctcctcagtggtagctctgggcgcaagcatcatctgtaacaagatcccaggcctggctcccagacagcgggcgatctgccagagccggcccgacgccatcatcgtcataggagaaggctcacaaatgggcctggacgagtgtcagtttcagttccgcaatggccgctggaactgctctgcactgggagagcgcaccgtcttcgggaaggagctcaaagtggggagccgggaggctgcgttcacctacgccatcattgccgccggcgtggcccacgccatcacagctgcctgtacccagggcaacctgagcgactgtggctgcgacaaagagaagcaaggccagtaccaccgggacgagggctggaagtggggtggctgctctgccgacatccgctacggcatcggcttcgccaaggtctttgtggatgcccgggagatcaagcagaatgcccggactctcatgaacttgcacaacaacgaggcaggccgaaagatcctggaggagaacatgaagctggaatgtaagtgccacggcgtgtcaggctcgtgcaccaccaagacgtgctggaccacactgccacagtttcgggagctgggctacgtgctcaaggacaagtacaacgaggccgttcacgtggagcctgtgcgtgccagccgcaacaagcggcccaccttcctgaagatcaagaagccactgtcgtaccgcaagcccatggacacggacctggtgtacatcgagaagtcgcccaactactgcgaggaggacccggtgaccggcagtgtgggcacccagggccgcgcctgcaacaagacggctccccaggccagcggctgtgacctcatgtgctgtgggcgtggctacaacacccaccagtacgcccgcgtgtggcagtgcaactgtaagttccactggtgctgctatgtcaagtgcaacacgtgcagcgagcgcacggagatgtacacgtgcaagtgagccccgtgtgcacaccaccctcccgctgcaagtcagattgctgggaggactggaccgtttccaagctgcgggctccctggcaggatgctgagcttgtcttttctgctgaggagggtacttttcctgggtttcctgcaggcatccgtgggggaaaaaaaatctctcagagccctcaactattctgttccacacccaatgctgctccaccctcccccagacacagcccaggtccctccgcggctggagcgaagccttctgcagcaggaactctggacccctgggcctcatcacagcaatatttaacaatttattctgataaaaataatattaatttatttaattaaaaagaattcttccacaaaaaaaaaaaaaaaaaa

SEQ ID NO: 383 - protein, 349 aa, Homo sapiens
MNRKARRCLGHLFLSLGMVYLRIGGFSSVVALGASIICNKIPGLAPRQRAICQSRPDAIIVIGEGSQMGLDECQFQFRNGRWNCSALGERTVFGKELKVGSREAAFTYAIIAAGVAHAITAACTQGNLSDCGCDKEKQGQYHRDEGWKWGGCSADIRYGIGFAKVFVDAREIKQNARTLMNLHNNEAGRKILEENMKLECKCHGVSGSCTTKTCWTTLPQFRELGYVLKDKYNEAVHVEPVRASRNKRPTFLKIKKPLSYRKPMDTDLVYIEKSPNYCEEDPVTGSVGTQGRACNKTAPQASGCDLMCCGRGYNTHQYARVWQCNCKFHWCCYVKCNTCSERTEMYTCK

SEQ ID NO: 384 - DNA, 2409 bp, Homo sapiens
agagaagaagcaggcagcttgagacaggtggagctggatcaagctgtgaacgtgatttgctggaagctggttgacgatgtgtcacactgtgtaagggaatcgcatggagatgggcattccgaactgttaatggggacatgggactccagttgtctctgatcacttgtgtggattttcctggcgtagaacgacagaagccgctagtaagtcgccaagacctacagcaggaattctgcaccaaagggcataaaatcttgttattttaatttgcatctgggagaatgtctgagcaaggagacctgaatcaggcaatagcagaggaaggagggactgagcaggagacggccactccagagaacggcattgttaaatcagaaagtctggatgaagaggagaaactggaactgcagaggcggctggaggctcagaatcaagaaagaagaaaatccaagtcaggagcaggaaaaggtaaactgactcgcagccttgctgtctgtgaggaatcttctgccagaccaggaggtgaaagtcttcaggatcagactctctgaaaactgcaaatggaaaggaattcaaaagaatttagattaaaagttaaataaaaagtaggcacagtagtgctgaattttcctcaaaggctctcttttgataaggctgaaccaaatataatcccaagtatcctctctccttccttgttggagatgtcttacctctcagctccccaaaatgcacttgcctataagaaacacaattgctggttcatatgaaacttaggaaatagtgaataaggtgcatttaactttggagaaatacttttatggctttggtggagatttctcaatactgcaaaagttgtccagaaatgaatctgagctgatggtgactttaagttaatattattaatatatcactgcatatttttacccttatttttgctccttacagcaagattagtaggttataaaaatttaaatttaaacaaaattatttcatgacaaaatgggaaacttcacatcatacttatttttgtttgcctttcaggcatcatattagcttttataaaaaatggtcttgctgctgaaattgtacttattttatcagaggctgggtgcagtcaagacaaaagtaaaatggtttacctgagcccaggggagggaaaattgattaagatatcattatttttgtttggtttggttttgcttttttcctcttactttaattgaaatactctgaattcccctcatggaaacagagagcattgagagcactttctttaaaaggaccaaaaataaattcctaatagattttgtcctaagagagtgtttttttttctagcatcattttctttacatgccactcatgtcataaggcatggacaggctatctttcagtggccattactatgtttcgtacacatgctttattttacttgggctctgagaaatgtgtggctttccttcagcattttatttgtgcttctctttttaatggagattgaaaagggagaataatgtgaatatcacggcttatattattaaatgttgattgatggcttgtaatgtactgcacacaatatatgttaactctgcagaatgacagaccctgggagaagtaatgccccagttgtcccccactcctaatgccaggcagagaaggacagcctttatagacttaatctgctttttgtcccatttgacaaggtaccaggaggaaattttttaagggatcaactgtatcacagtgcccactctggacctaagtctagtgtatccatacaattggtgcagagaaataaggtgtaaatggtgctttgttcctgctggttccaagctcagaaaccaagactagctttgtaggagagaatgagagcctgcaagcctctctttggattggctgaggagtggtgggagcagggggttgatagaaaacatccagacacacatataagcaagtggccgtgctacctttttagagaataaagaaacagacttttgagtttatatgcaatgccttcattaggtaccaccggcacttacaaaatgtgcggactgaatcccagagaacactggcagatgtatacagtatatggattgtatcgcttccccaatgtttgtaaattcacagtatttggaaaactgccttcattttccagtgtgggaaaaactcttgctacctgtattacttgatctcagacccatacctgatggttcagtctgtccttaagttaaaagaattttgcttttctaatgttatactatttacctgtcagtgtattactgcaacttgaatcactcttttactgttgttggatataaacttatcctgtaccaatgtatttattaacacttgtattttattattgagcatatcaataaaaatattaaaaaataacagattgttttttaccaa

SEQ ID NO: 385 - protein, 89 aa, Homo sapiens
MSEQGDLNQAIAEEGGTEQETATPENGIVKSESLDEEEKLELQRRLEAQNQERRKSKSGAGKGKLTRSLAVCEESSARPGGESLQDQTL

SEQ ID NO: 386 - DNA, 2418 bp, Homo sapiens
agagaagaagcaggcagcttgagacaggtggagctggatcaagctgtgaacgtgatttgctggaagctggtcattagtgttgacgatgtgtcacactgtgtaagggaatcgcatggagatgggcattccgaactgttaatggggacatgggactccagttgtctctgatcacttgtgtggattttcctggcgtagaacgacagaagccgctagtaagtcgccaagacctacagcaggaattctgcaccaaagggcataaaatcttgttattttaatttgcatctgggagaatgtctgagcaaggagacctgaatcaggcaatagcagaggaaggagggactgagcaggagacggccactccagagaacggcattgttaaatcagaaagtctggatgaagaggagaaactggaactgcagaggcggctggaggctcagaatcaagaaagaagaaaatccaagtcaggagcaggaaaaggtaaactgactcgcagccttgctgtctgtgaggaatcttctgccagaccaggaggtgaaagtcttcaggatcagactctctgaaaactgcaaatggaaaggaattcaaaagaatttagattaaaagttaaataaaaagtaggcacagtagtgctgaattttcctcaaaggctctcttttgataaggctgaaccaaatataatcccaagtatcctctctccttccttgttggagatgtcttacctctcagctccccaaaatgcacttgcctataagaaacacaattgctggttcatatgaaacttaggaaatagtgaataaggtgcatttaactttggagaaatacttttatggctttggtggagatttctcaatactgcaaaagttgtccagaaatgaatctgagctgatggtgactttaagttaatattattaatatatcactgcatatttttacccttatttttgctccttacagcaagattagtaggttataaaaatttaaatttaaacaaaattatttcatgacaaaatgggaaacttcacatcatacttatttttgtttgcctttcaggcatcatattagcttttataaaaaatggtcttgctgctgaaattgtacttattttatcagaggctgggtgcagtcaagacaaaagtaaaatggtttacctgagcccaggggagggaaaattgattaagatatcattatttttgtttggtttggttttgcttttttcctcttactttaattgaaatactctgaattcccctcatggaaacagagagcattgagagcactttctttaaaaggaccaaaaataaattcctaatagattttgtcctaagagagtgtttttttttctagcatcattttctttacatgccactcatgtcataaggcatggacaggctatctttcagtggccattactatgtttcgtacacatgctttattttacttgggctctgagaaatgtgtggctttccttcagcattttatttgtgcttctctttttaatggagattgaaaagggagaataatgtgaatatcacggcttatattattaaatgttgattgatggcttgtaatgtactgcacacaatatatgttaactctgcagaatgacagaccctgggagaagtaatgccccagttgtcccccactcctaatgccaggcagagaaggacagcctttatagacttaatctgctttttgtcccatttgacaaggtaccaggaggaaattttttaagggatcaactgtatcacagtgcccactctggacctaagtctagtgtatccatacaattggtgcagagaaataaggtgtaaatggtgctttgttcctgctggttccaagctcagaaaccaagactagctttgtaggagagaatgagagcctgcaagcctctctttggattggctgaggagtggtgggagcagggggttgatagaaaacatccagacacacatataagcaagtggccgtgctacctttttagagaataaagaaacagacttttgagtttatatgcaatgccttcattaggtaccaccggcacttacaaaatgtgcggactgaatcccagagaacactggcagatgtatacagtatatggattgtatcgcttccccaatgtttgtaaattcacagtatttggaaaactgccttcattttccagtgtgggaaaaactcttgctacctgtattacttgatctcagacccatacctgatggttcagtctgtccttaagttaaaagaattttgcttttctaatgttatactatttacctgtcagtgtattactgcaacttgaatcactcttttactgttgttggatataaacttatcctgtaccaatgtatttattaacacttgtattttattattgagcatatcaataaaaatattaaaaaataacagattgttttttaccaa

SEQ ID NO: 387 - protein, 89 aa, Homo sapiens; identical to SEQ ID NO: 385

SEQ ID NO: 388 - DNA, 3241 bp, Homo sapiens
ggaagacagagcagtgcatggttatggatactggacaaggatatttggaaaggttgacgatgtgtcacactgtgtaagggaatcgcatggagatgggcattccgaactgttaatggggacatgggactccagttgtctctgatcacttgtgtggattttcctggcgtagaacgacagaagccgctagtaagtcgccaagacctacagcaggaattctgcaccaaagggcataaaatcttgttattttaatttgcatctgggagaatgtctgagcaaggagacctgaatcaggcaatagcagaggaaggagggactgagcaggagacggccactccagagaacggcattgttaaatcagaaagtctggatgaagaggagaaactggaactgcagaggcggctggaggctcagaatcaagaaagaagaaaatccaagtcaggagcaggaaaaggtaaactgactcgcagccttgctgtctgtgaggaatcttctgccagaccaggaggtgaaagtcttcaggatcaggaatcaattcatttacagctttccagtttttccagcctgcaagaggaggataaatctaggaaagatgactctgaaagagaaaaagaaaaggataaaaacaaagataaaacctctgaaaaacccaagatcagaatgttatcaaaagattgcagccaagaatacacggattctacaggcatagacttacacgagtttctgattaacacattaaagaataattccagggacaggatgatacttttgaaaatggagcaggaaattattgatttcattgctgacaacaataatcattataaaaagttccctcagatgtcatcgtatcagaggatgcttgtccatcgagtggcagcttattttggattggatcacaatgtggatcaaacaggaaaatctgttatcatcaacaagaccagcagcaccagaataccagagcaaaggttttgtgaacatttaaaagatgaaaaaggtgaagaatcccagaagcggtttatcttgaagcgagataactctagtattgataaagaagacaatcagcaaaacagaatgcatccatttagagatgacagacgaagtaaatcaattgaagagagagaagaggaatatcagagagtgagggagagaatatttgcacacgattcagtttgctcccaggaaagcctttttgtggaaaacagtaggctcttggaagacagtaacatatgcaatgagacctataagaaaagacagctctttcggggcaacagagatggctcagggagaacatctgggagtcgacagagcagctcagaaaatgaactcaagtggtctgaccaccaaagggcctggagcagcacagactccgacagttccaaccgcaatctaaagcccgccatgaccaagacggcgagttttgggggcatcacggtgctgaccaggggtgacagcacttccagtactaggagtaccgggaagctgtccaaagcaggttccgagtcttccagcagtgcaggctcctcaggatcgctgtcccgcacccatccacctctccagagcacacccctagtctcaggtgtggcagctggctctccaggctgtgtgccttatccagagaatggaatagggggccaggttgctcccagcagcaccagctacatcctccttccacttgaagctgcaacaggcatcccgcctggaagcatccttcttaatccacacacaggccagccctttgtgaatcccgatggaactcctgcaatatacaacccacccaccagtcagcagcccctgcgaagcgccatggtggggcagtcccaacagcagccaccacagcagcagccctccccgcagccccaacagcaggtccagccaccgcagccacagatggcaggccctctggtcactcagagagatgatgtggcaacacagtttggccagatgaccctgagccggcagtcctcgggggagactcctgaacccccatcaggtcctgtctacccatcctcccttatgccacagccggcccagcagcccagctatgtaatcgcctctacaggccagcagcttcctacaggaggattctcaggctctggccctcccatctcccagcaggtcctccagccccctccctcaccacagggatttgtgcaacagcctccgcctgcacagatgcctgtatattattacccatctggtcagtaccctacctcaaccacgcaacagtaccggcccatggccccggttcagtacaacgctcagaggagtcaacagatgccacaggcagcacagcaagcaggttaccagccagtcttgtctggtcaacagggattccaaggcctaataggagtgcagcagccacctcagagtcagaacgtgataaataaccaacaaggaactccggtgcaaagcgtgatggtttcctacccaacaatgtcttcttatcaggtgccaatgacccagggttctcaaggactgccccagcagtcataccaacagccaatcatgctacctaaccaggcaggtcaagggtcactcccagccactggaatgcctgtttactgtaatgtcacaccgcccacccctcagaacaaccttaggctgattggcccacactgcccctccagcactgtcccagtgatgtcagctagctgcagaacaaactgtgcaagtatgagcaatgctggttggcaggtcaaattctgagagctctggctgtggtacatttcttcagatatttctcatggcctttgatggaagaggaacaaggtgggaaaactggctgaggacttaagtattcactcaacactcaaatgattgctgctggtattctgtaaaaaataaacaaagactaatatacacgttagctggttaatggtgcatatttctgtcatgtctgctaggtatgcctttatagcttagctagtgacatgaattcatcaaggtaagattttctcctaccactgaataccactgtgtagattataatatccctaatttggattagttttgtactttgtgttgagtttgtgatgctaaaagtatttaaaaattatatactaaatcacattgtaccaaagctgtaatggaaaagcaaagaagaattgatgaattgaaggaataatttatatacattatagagttttcttttttaatggatatatactgtattgtagtgtttaatcaaaataaaactatttgaccttatggaggaaggtcatgtttttaccaccagtttggttca

SEQ ID NO: 389 - protein, 812 aa, Homo sapiens
MSEQGDLNQAIAEEGGTEQETATPENGIVKSESLDEEEKLELQRRLEAQNQERRKSKSGAGKGKLTRSLAVCEESSARPGGESLQDQESIHLQLSSFSSLQEEDKSRKDDSEREKEKDKNKDKTSEKPKIRMLSKDCSQEYTDSTGIDLHEFLINTLKNNSRDRMILLKMEQEIIDFIADNNNHYKKFPQMSSYQRMLVHRVAAYFGLDHNVDQTGKSVIINKTSSTRIPEQRFCEHLKDEKGEESQKRFILKRDNSSIDKEDNQQNRMHPFRDDRRSKSIEEREEEYQRVRERIFAHDSVCSQESLFVENSRLLEDSNICNETYKKRQLFRGNRDGSGRTSGSRQSSSENELKWSDHQRAWSSTDSDSSNRNLKPAMTKTASFGGITVLTRGDSTSSTRSTGKLSKAGSESSSSAGSSGSLSRTHPPLQSTPLVSGVAAGSPGCVPYPENGIGGQVAPSSTSYILLPLEAATGIPPGSILLNPHTGQPFVNPDGTPAIYNPPTSQQPLRSAMVGQSQQQPPQQQPSPQPQQQVQPPQPQMAGPLVTQRDDVATQFGQMTLSRQSSGETPEPPSGPVYPSSLMPQPAQQPSYVIASTGQQLPTGGFSGSGPPISQQVLQPPPSPQGFVQQPPPAQMPVYYYPSGQYPTSTTQQYRPMAPVQYNAQRSQQMPQAAQQAGYQPVLSGQQGFQGLIGVQQPPQSQNVINNQQGTPVQSVMVSYPTMSSYQVPMTQGSQGLPQQSYQQPIMLPNQAGQGSLPATGMPVYCNVTPPTPQNNLRLIGPHCPSSTVPVMSASCRTNCASMSNAGWQVKF

SEQ ID NO: 390 - DNA, 2413 bp, Homo sapiens
aacagattttaactctgaaaagccatttccagtgtctatagactattgtgagcctggagaagtagcatttagttgggatagcttcactagagctgcctgccaaagacttccttccacaggatcttgtcgcaccagcaactgacaggagcttgggagctcgggagcttgggagagggcttatgtttttaataatgtagctgtcagttcgaagcctggaaatgttgaccctcaaagggcataaaatcttgttattttaatttgcatctgggagaatgtctgagcaaggagacctgaatcaggcaatagcagaggaaggagggactgagcaggagacggccactccagagaacggcattgttaaatcagaaagtctggatgaagaggagaaactggaactgcagaggcggctggaggctcagaatcaagaaagaagaaaatccaagtcaggagcaggaaaaggtaaactgactcgcagccttgctgtctgtgaggaatcttctgccagaccaggaggtgaaagtcttcaggatcagactctctgaaaactgcaaatggaaaggaattcaaaagaatttagattaaaagttaaataaaaagtaggcacagtagtgctgaattttcctcaaaggctctcttttgataaggctgaaccaaatataatcccaagtatcctctctccttccttgttggagatgtcttacctctcagctccccaaaatgcacttgcctataagaaacacaattgctggttcatatgaaacttaggaaatagtgaataaggtgcatttaactttggagaaatacttttatggctttggtggagatttctcaatactgcaaaagttgtccagaaatgaatctgagctgatggtgactttaagttaatattattaatatatcactgcatatttttacccttatttttgctccttacagcaagattagtaggttataaaaatttaaatttaaacaaaattatttcatgacaaaatgggaaacttcacatcatacttatttttgtttgcctttcaggcatcatattagcttttataaaaaatggtcttgctgctgaaattgtacttattttatcagaggctgggtgcagtcaagacaaaagtaaaatggtttacctgagcccaggggagggaaaattgattaagatatcattatttttgtttggtttggttttgcttttttcctcttactttaattgaaatactctgaattcccctcatggaaacagagagcattgagagcactttctttaaaaggaccaaaaataaattcctaatagattttgtcctaagagagtgtttttttttctagcatcattttctttacatgccactcatgtcataaggcatggacaggctatctttcagtggccattactatgtttcgtacacatgctttattttacttgggctctgagaaatgtgtggctttccttcagcattttatttgtgcttctctttttaatggagattgaaaagggagaataatgtgaatatcacggcttatattattaaatgttgattgatggcttgtaatgtactgcacacaatatatgttaactctgcagaatgacagaccctgggagaagtaatgccccagttgtcccccactcctaatgccaggcagagaaggacagcctttatagacttaatctgctttttgtcccatttgacaaggtaccaggaggaaattttttaagggatcaactgtatcacagtgcccactctggacctaagtctagtgtatccatacaattggtgcagagaaataaggtgtaaatggtgctttgttcctgctggttccaagctcagaaaccaagactagctttgtaggagagaatgagagcctgcaagcctctctttggattggctgaggagtggtgggagcagggggttgatagaaaacatccagacacacatataagcaagtggccgtgctacctttttagagaataaagaaacagacttttgagtttatatgcaatgccttcattaggtaccaccggcacttacaaaatgtgcggactgaatcccagagaacactggcagatgtatacagtatatggattgtatcgcttccccaatgtttgtaaattcacagtatttggaaaactgccttcattttccagtgtgggaaaaactcttgctacctgtattacttgatctcagacccatacctgatggttcagtctgtccttaagttaaaagaattttgcttttctaatgttatactatttacctgtcagtgtattactgcaacttgaatcactcttttactgttgttggatataaacttatcctgtaccaatgtatttattaacacttgtattttattattgagcatatcaataaaaatattaaaaaataacagattgttttttaccaaaaaaaaaaaaaaa

SEQ ID NO: 391 - protein, 89 aa, Homo sapiens; identical to SEQ ID NO: 385

SEQ ID NO: 392 - DNA, 3962 bp, Homo sapiens
cgcgctcggcgccctgctcgccgggcagaggggaaggcggcggccggctggggatgggcggcccggctgcgccgaggggcgccgggaggctccgcgcgctgctgctggcgctggtggtcgcggggatccccgcgggcgcctacaacctcgacccgcagcgccccgtgcacttccagggccccgctgactcgttcttcggctacgcagttctggagcatttccacgacaacacgcgctgggtccttgtgggcgcaccaaaggcagattccaaatacagcccttcagtgaagtctcctggggctgtgtttaagtgccgtgttcacaccaaccctgaccggagatgcaccgaactggacatggctcgagggaagaatcggggcacgtcctgcggaaagacctgccgggaagaccgcgatgatgagtggatgggggtgagcctggcccgacagcccaaggctgatggccgtgtgttggcctgtgctcatcgctggaagaacatctactatgaagccgaccacatcctaccccatggcttctgctacatcatcccctccaacctccaggccaaaggcaggacgctgatcccttgctatgaagagtataagaagaagtacggagaggaacacggctcctgccaggctgggatagcgggcttcttcaccgaggagctggtggtgatgggtgctccagggtcattttattgggctggaaccatcaaagtgctgaaccttacggacaacacctatttaaaactgaacgacgaagtgatcatgaacaggcggtacacctacctgggctacgcagtgaccgctggccacttctctcacccgtccaccattgatgtggtaggaggtgccccacaggacaaaggcatcggcaaggtttatattttcagagctgaccgaagatcaggcaccttaattaagatctttcaagcatcaggtaaaaagatgggctcttacttcggctcctccttgtgcgcagttgacctgaatggggacggcctctctgacctgctggtgggggcccccatgttttctgagatcagggatgagggacaggtcactgtctacatcaacagaggaaatggagccctcgaggagcagctggctctgactggggatggtgcctacaatgcgcactttggagagagcattgccagcctggacgatctggacaatgatgggttcccagatgtggccattggtgcacccaaggaggatgacttcgcaggggcggtctatatctatcatggtgatgccggtgggatagtccctcagtactcaatgaaactgtctgggcagaagataaatccagtgctccggatgtttggtcagtccatatcgggaggcattgatatggatggaaatggctatcctgatgtcactgttggagccttcatgtccgacagcgtggttcttctcagagcaaggcctgtcattacggtggatgtctccatcttcctcccgggctccatcaacatcacagcgcctcagtgtcacgacggacagcagcctgtgaactgcctgaacgtcaccacctgcttcagcttccatggcaaacacgttccaggagagattggcctgaattatgttctgatggctgacgtggccaaaaaggagaagggccagatgcccagggtctactttgtgctgctgggagagaccatgggtcaggtcacagagaagctgcagctgacttacatggaggagacgtgtcgtcactatgtggcccatgtgaagcggagggtgcaggacgtcatcagcccgatcgtgtttgaagcagcctacagcctcagtgagcatgtgactggagaggaggagagggaactgccgcctctgacaccagttctccgctggaaaaagggacaaaagattgcccaaaagaatcagactgtttttgaaaggaattgccgttcagaggactgtgccgcagacctgcagcttcagggtaaactgctgctctccagtatggatgagaaaaccctgtatctagctttgggggctgtgaagaacatctccctaaacatctctatctccaacctcggagatgatgcctatgatgccaacgtgtccttcaatgtttcccgggagctcttcttcatcaacatgtggcagaaggaggagatgggcatctcctgtgagctgctggaatcggacttcctcaaatgcagcgtgggatttcctttcatgaggtcaaagtcaaagtatgaattcagcgtgatctttgatacaagccacctgtctggggaagaggaagttctcagcttcattgttactgctcagagtggcaacacggagcgctctgaatccctgcatgacaacaccctcgtgctgatggtgccactgatgcacgaggtggacacgtccatcaccggaatcatgtctccaacctcctttgtatatggcgagtccgtggacgcagccaacttcattcagctggatgacctggagtgtcactttcagcccatcaatatcacccttcaggtctacaacactggcccaagcacccttccagggtcatctgtcagcatctctttccctaatcgactctcatctggtggtgcagagatgtttcatgtccaggaaatggtggtgggccaagagaagggaaactgctctttccagaaaaacccaactccctgcatcatccctcaagaacaagaaaatatcttccacacaatatttgcttttttcacaaagtctggaagaaaagtcttggactgtgaaaaaccaggaatttcttgcctaacagcacactgtaactttagtgctcttgctaaagaagaaagtcgtactatagacatttacatgctgctgaacacagaaatactgaaaaaggacagttcgtctgtcatccagttcatgtcccgcgccaaggtgaaggtggatcctgccctaagggtggtggaaatagctcatgggaacccagaagaggtgacggtggtcttcgaggccctgcacaatctggagccccgtggctacgtcgtggggtggatcatcgccatcagtttgttggtgggaatcctcatcttcctgctgctggccgtgctgctctggaagatgggcttctttcgccgaaggtacaaagaaattatcgaagctgagaagaaccggaaagagaatgaagacagttgggactgggtccagaaaaaccagtgagctgccacaccagtcacatgacctgatcactagcctgtcatccttggtctttgtatcttccatatttggaagaaaaaaatcttctccagatttttcggaggccccactgatgctgttctcttcttcattctatcaagcccaggtgccagcctgaggcagccacttcggccaggtcacacgaccggggccagcaccacttcctttaaagatgaactctgaactttggagagtgagctacagagccgagcaatatttatggatgcaacacgcatggtcaaccctcaggggaaaactgttacctaaagtatttttataaatataagccttttatactgattatgtcttttatatttgtatcgatgttttattatttctattaaatagttatataattcactcaagcactgatatctggcctaaaatcttggaagtacatgtccatgaatacaaattttaaaggatgaaaatcttaccgtactttggaacttgctgtttaaaaagacagatgaaataagttgaagaaacctcatgtaatgaatccaccaggctggcagtggtgcatataaactgtgggtgtggcaagaccccgaagacatttcacatctttatcgcctcgatcaagtgtggagtcacatgctaatgtgtgctaaagaactgtaagtgttttttcatatgtacttttcattggaagattcccaacaagaatttggatggaaaacctgatccctagcaagaagtctgctctgtatcacctttatatagcagacatgtcaccctgcttctacacagatgatggatgaa

SEQ ID NO: 393 - protein, 1035 aa, Homo sapiens
MGGPAAPRGAGRLRALLLALVVAGIPAGAYNLDPQRPVHFQGPADSFFGYAVLEHFHDNTRWVLVGAPKADSKYSPSVKSPGAVFKCRVHTNPDRRCTELDMARGKNRGTSCGKTCREDRDDEWMGVSLARQPKADGRVLACAHRWKNIYYEADHILPHGFCYIIPSNLQAKGRTLIPCYEEYKKKYGEEHGSCQAGIAGFFTEELVVMGAPGSFYWAGTIKVLNLTDNTYLKLNDEVIMNRRYTYLGYAVTAGHFSHPSTIDVVGGAPQDKGIGKVYIFRADRRSGTLIKIFQASGKKMGSYFGSSLCAVDLNGDGLSDLLVGAPMFSEIRDEGQVTVYINRGNGALEEQLALTGDGAYNAHFGESIASLDDLDNDGFPDVAIGAPKEDDFAGAVYIYHGDAGGIVPQYSMKLSGQKINPVLRMFGQSISGGIDMDGNGYPDVTVGAFMSDSVVLLRARPVITVDVSIFLPGSINITAPQCHDGQQPVNCLNVTTCFSFHGKHVPGEIGLNYVLMADVAKKEKGQMPRVYFVLLGETMGQVTEKLQLTYMEETCRHYVAHVKRRVQDVISPIVFEAAYSLSEHVTGEEERELPPLTPVLRWKKGQKIAQKNQTVFERNCRSEDCAADLQLQGKLLLSSMDEKTLYLALGAVKNISLNISISNLGDDAYDANVSFNVSRELFFINMWQKEEMGISCELLESDFLKCSVGFPFMRSKSKYEFSVIFDTSHLSGEEEVLSFIVTAQSGNTERSESLHDNTLVLMVPLMHEVDTSITGIMSPTSFVYGESVDAANFIQLDDLECHFQPINITLQVYNTGPSTLPGSSVSISFPNRLSSGGAEMFHVQEMVVGQEKGNCSFQKNPTPCIIPQEQENIFHTIFAFFTKSGRKVLDCEKPGISCLTAHCNFSALAKEESRTIDIYMLLNTEILKKDSSSVIQFMSRAKVKVDPALRVVEIAHGNPEEVTVVFEALHNLEPRGYVVGWIIAISLLVGILIFLLLAVLLWKMGFFRRRYKEIIEAEKNRKENEDSWDWVQKNQ

SEQ ID NO: 394 - DNA, 3694 bp, Homo sapiens
cagtccggccgggcggagctaggggcgggcccctgcgtctctgggcgctggagcgcggcgactatcacgccgcgtggcggacggacggactgacggacgcgcagccttacccgaaaggccatggcggagcacgcccctcgccgctgctgcctgggctgggacttcagcacgcagcaggtaaaggttgttgctgttgatgcagagttgaatgtcttctatgaggaaagtgtgcattttgacagagatcttccagaatttgggactcagggcggtgttcatgtgcacaaggatgggctgacggtcacttctccagtactaatgtgggtccaggcactggatatcatcttggagaagatgaaggcttcgggcttcgacttctctcaagtcctagccttgtccggggcgggccagcaacacggaagtatatactggaaggctggagcccagcaggcactgacaagcttatcaccagacctccggctacaccagcagcttcaggactgtttctccatcagcgactgcccggtgtggatggactccagcaccacagcccagtgccgccagctggaggctgctgtgggtggtgctcaggctctcagctgcctcacggggtcccgtgcctatgagcgttttacagggaaccaaattgcaaaaatttaccagcagaaccccgaggcctactcacatacagagagaatttctttggtcagtagctttgctgcttccctgttccttggctcttactcccctattgactacagtgatggttctggaatgaatttgttgcagatacaggataaagtctggtcccaggcttgccttggtgcctgtgcacctcatttagaggagaagcttagcccaccagtaccatcatgctcagttgtgggagccatttcttcctactacgtccagcgctacggatttcctccaggatgcaaagtggtggccttcactggggacaacccagcgtcgctggcaggcatgagactggaggaaggtgacattgcggtcagcctgggcaccagtgacaccctgtttctctggctccaagagcccatgcctgccctggaaggccacatcttctgcaacccggttgactcccagcactacatggcactcctgtgctttaaaaatggctccctcatgagagagaagatccgcaacgagtctgtatcccgttcctggagcgatttctctaaggcactgcagtccacagagatgggcaacggtggaaacctgggtttttattttgatgtaatggagatcacccctgaaattattggacgtcataggtttaacacagaaaaccacaaggttgcagcattccctggggatgtggaggttcgagcactaattgaaggacaattcatggccaagaggattcacgcagaaggcctgggctatcgagtcatgtccaagacaaagattttggccacaggaggagcatctcacaatagagaaatcttacaggtgcttgcagatgtgtttgatgccccggtgtatgttatagacactgccaactcggcctgtgtgggttctgcataccgagcttttcatggtcttgcaggtggaacagatgtgcccttttcagaggttgtgaagttagctccaaatcccagactagctgctaccccaagcccgggagcttctcaggtctacgaggcccttctcccccagtatgccaaactcgagcagagaatcttgtctcagacccgggggcctccggagtgaacaggcatccctgttgcccctgcctgcccagatttactgaccccatttgtcgacatggccccagacaggagggatccacttctctgttctgaacagctcttcctgcccctactgactccttggagtgtccaggaccatcttaaagccgccctcagcacatctgcatgaagatagataggcactcctgtccctgtgcccgtgtgccccagggcaggaaagcatctctcttttcctgtcttttatcccaggaggcaggacaacactgagactgggatatgtccaataaaaactatgacttttccccttgcagaggcagaattaaagctaatctagggactcaaatcagcagaatgggggagacaaagcccggtctcaccccctaacctcatcctatctctttctccaaccctgactgcccactcctccacaaaccgtgacccatagccgcccccaccccataccttgatctaccatccatcctcttccccaatccaaaccccacagtctcttctctcccacaccctgccctccttgtttcagctgtctgaggtgcctcgcagggcctctcttacttgccccatgctcaccctttccatgctgtccccattctctcctttcaccatctctcctctccccctccttcatctctcctccctccccaaactcacttggcataattcacaacctcccacccaaacaatgggcctggtggacgtgcttcctgtgccctccctttagctatgcccacagatcactgagagggaccatctcccaagtggtgcagtttagaacttctctccctttttctccctcattccctctctcttcttgcagtccacttgctgaagaagttgtgtcatttctctggaagaatttccaaaattctggatttcttttttattttggagtatttcatcagctgaaaagtgattctcactttgagttttcttcctatatttgtatagtgagttcctttttccttcctctttatccctcctgttttactttatacctctctattccttgctcaaattattgcaaaagcctctatagaaagtcctctgtgatctgactcctgcagactcttccagatttttctgcccaaggcctttactgagctcaggactccagctaaatcaaaatacgcatgttctcacccagagtgacaaaatcctgcagataggtttaagacctagtggctcagagcagtagctactgggaagttaaaaggaaggggcttagaaaatgaatgggaccaaaggcatcacttctgatggagatgaagccatcttgaaagtgagtggtgtcctttggaggcatggtggatgaaaggcgcaaaggaagcaagaggttaaagataatggcccattagatacaacagcaagcccaagattccgaagaagacagacaactccccctagtaccacctagacattactttttaaagacattttacattattgtccagcagaaaaaggctgtcttggaccatgaaacagtaaactgtaactaaacacttcaacatgaatttgaaaataaataattgtggatataaaagaacaccagagatcagaaattcaaaaactcagaataaaaatgaaaaagctacaagcatatatgagaagagaactgactgaacttgggaaataatttgaacaaaaagataaatcttcacagatatgaatactaaattatatcttaatgaaaatagatatggtcacaagtacattaaggcacgtagaaggtaggagtaagaaaagctaagagaagcaaaacaaacaaagcaatattaaaggaagagccaaaaagacccagaaataaaatgacagataaagaagattgtcaaagaaaagatgatacaggtaagattggaactcatgaagacaaaagataagacagtggcatagagttaatatttaaaattcaaatattaaaactcaaataaaccccaaagaacttttgg

SEQ ID NO: 395 - protein, 536 aa, Homo sapiens
MAEHAPRRCCLGWDFSTQQVKVVAVDAELNVFYEESVHFDRDLPEFGTQGGVHVHKDGLTVTSPVLMWVQALDIILEKMKASGFDFSQVLALSGAGQQHGSIYWKAGAQQALTSLSPDLRLHQQLQDCFSISDCPVWMDSSTTAQCRQLEAAVGGAQALSCLTGSRAYERFTGNQIAKIYQQNPEAYSHTERISLVSSFAASLFLGSYSPIDYSDGSGMNLLQIQDKVWSQACLGACAPHLEEKLSPPVPSCSVVGAISSYYVQRYGFPPGCKVVAFTGDNPASLAGMRLEEGDIAVSLGTSDTLFLWLQEPMPALEGHIFCNPVDSQHYMALLCFKNGSLMREKIRNESVSRSWSDFSKALQSTEMGNGGNLGFYFDVMEITPEIIGRHRFNTENHKVAAFPGDVEVRALIEGQFMAKRIHAEGLGYRVMSKTKILATGGASHNREILQVLADVFDAPVYVIDTANSACVGSAYRAFHGLAGGTDVPFSEVVKLAPNPRLAATPSPGASQVYEALLPQYAKLEQRILSQTRGPPE

SEQ ID NO: 396 - DNA, 6284 bp, Homo sapiens
acacacacacacacggcacctgggctaggcccggacacctgtctgcagcatggataagtatgacgacctgggcctggaggccagtaaattcatcgaggacctgaacatgtatgaggcctctaaggatgggctcttccgagtggacaagggtgcaggcaacaaccccgagtttgaggaaactcgcagggtgttcgccaccaagatggccaaaatccacctccagcagcagcagcagcagctcctgcaggaggagactctgcccagggggagtagaggccctgtcaatggagggggccgcctgggcccacaggcccgttgggaagttgtgggcagcaagctgactgtggatggtgctgccaagcctcctcttgctgcctcgacaggggcacctggggcagtcaccaccctcgctgctgggcagcccccgtacccaccgcaggagcagagatccaggccatacctgcatggcacgaggcatggcagccaggactgtggttccagggagagcctggcgacttctgagatgtctgctttccaccagccaggcccctgtgaggatccttcctgcctcactcatggagactattatgacaacctctccttggcaagcccaaagtggggtgacaaaccaggagtgtcccccagcatcggcctgagtgtagggagtgggtggcctagctccccggggagtgacccaccactgcccaaaccctgcggggaccatcccctaaatcaccgacagctctccctgagctccagcaggtcttctgagggtagcctcggtggtcagaatagtggcattggtggccgcagcagcgagaagccaacaggcctttggtccactgcctcctcccagcgggtgagccctggcctgccttccccaaacttggagaacggagcaccagctgtggggcctgttcagcccaggaccccttctgtgtcagcacccttggccctgagctgccccaggcaaggaggtcttccaagatcaaactcggggctggggggtgaggtttcaggtgtgatgtccaaacccaatgtggacccccaaccctggttccaggatgggcccaaatcttacctttccagttctgccccgtcatcctcgccagctggtctggacggttcacagcagggtgcggtccctgggctggggccgaagcctggctgcacagaccttggcactggtcccaagctcagccccaccagtcttgtccatccagtgatgtccaccctgcctgagttatcttgtaaagagggtcccctgggctggtcttctgatggtagcctgggatctgtgctcctggacagccccagctcccctagggtaaggctgccctgccagcccctcgtcccaggtcctgagctgagaccctctgctgctgagttgaaattagaagccctcacccaacgtctggagcgagagatggatgctcacccgaaggctgattactttggagcctgtgtgaaatgcagcaaaggggtgtttggggctggccaggcctgtcaggccatggggaacctctaccatgacacatgcttcacctgtgcagcttgcagccggaagctgagaggaaaagccttttattttgtcaacggcaaagtgttttgtgaagaagacttcctgtactctggtttccagcagtcggctgacaggtgttttctttgtggacatctgatcatggacatgatcctgcaagccctggggaagtcctaccaccccggctgtttccgctgtgtcatctgtaatgagtgtttggatggggtgcccttcaccgtggactcagagaacaagatctactgtgtccgagattaccacaaggtgctggcccccaagtgtgcagcctgtgggcttcccatccttccacctgagggctcagatgagaccatccgtgtcgtgtccatggacagagactaccacgtggagtgttaccactgcgaggactgtggtctggagctcaatgatgaagatggccaccgctgttatccgctggaggaccacctgttctgtcactcctgccacgtgaagaggctggagaagagaccctcatctacagcccttcaccagcaccacttctagccagagccacttgcagacatcacggcaggggatgaggagccggggttgctgctgctgcttccggtggcccctggggtggaagtggggtaggggaagaggaggggcaggagggagagttcctgtgagcatgtggggggtgcctttcctttaaccagggaggtgaacactacctgcctcctgcgtgtattttccaagtgcttttctctgttgccacattttcctcaggttactcaggaaaatgctccagcatgtgcgagcacatgacctgaggttgcatcatagcaccaaaggaatcctcctgtcccctctgggaacatttcatgcttcagagggagaggtttttattgagcttgtttcacaatatccccttgaagggacagctcagctgccaatacattcaaccctttctcttccttcaggaaaatacctatacccaaatgttccctcccccgacatatatcatggcatgatttaaggcttcttttcacctgagagcttcagttcttctgcagaatggctgcaaatttaattgcattaaggcaagaaggaagctctaatgtgtgctttgtatcctaagataaatttgcttagaaaaccagagtcaagatttgaaataggtgaggcagggtttcctccttagacactgacagcattctctgtaccccttcaaatccttactctcctaaaggcagctgagtccgcgacagaaatttgccctatgtgagtaaaacatactttgggagaagaacttggtgcaggcaccaggatttttttttttgcccacgtgtttgcgctgtttttctctggagttctcaagagttggtgacttggaaggccgcttctgcaaggcaagtctcaggaacccatgcaggtacatcgcttgcacctgtttttagcttatttaatgacgggcttttgggaagagctgcccgcatactgagagacagcttcttataaacaaggagagtttttgtgtgtgcgagatctctaagccagcgtgggagggagcgcctcaggataagttattatattcatttcgttggtttctctcctgcccaattcttggcacaggcattatgtttgaagaaaccaggataaggtacactgcttttgtctgtttaatttttttagttgtttcccttcactttcagtcttccacacacaaaaaatacctcacagagcttcaccaaatcacagattcaggaggaatttggctttcacactggactcagataccttcttcagtgtgttggaaatcactggcttcacacaggcccaactccagctggtcagggcagagtgatcgtaactaaaggtcagtggggaatagatccgattcagtgcttttgccttatgcatttcagcatcctggctccccagggtggcaggagctgagggagggccacacactggcaagatttcaagaccactctctgcactgaagaggtaaaatttgcactgcaagtcacatccctgaggccagaggtcagtaccctttggtatttcgattagaagaagctgcaaaagaaaggcagcccattttaccattgccagccaggccggggacacaggagccggtgtgtgcactctgcctcctcaccttgcacccagagcaagaggactgggtgctgggctgcagaggccggtcagtggagcccctagcacgtgtgaactcaggcttttcattgggcccggctccacttctaggccatgttttgactcatttggtaaccattgcctgtaagcagcacagaattggtgccatggattatcttttccatgttgatggaattcattctgttggaatcctttggccagatgtcacttcagccagggtgtgcatcatcattggttctttttcacaggctgagcctcctgaaaacccatgaacgctggggctggggaagtgaaccctgaggtggggaccctctcttcccatcaaatcatccagctcagtgtggggcgtggcaggggggtaaatgaagccagccaatgtgttaacctgtctctgtcaacctaagaatgttggccttactgacacacctttgctccatgttcaagaccagaagtagctgggatttgtttgcaaattgggtaattagtttaaaaatctgtgattacatttttaaatgaaattttcaaagtggcctagattgaggtgattcagataggtttgcgaatataccattttatattgttgagaaagaacaaaaagggaatttccagatgtcctagaaatcctagcaacagatttctctggttgtcagtttccctggagaaggcgccagataggaatctccaatcagttgtttttctcttcgcttcaggcccttacacaaaagccatgaagagatgttcacctacccggtattttaaatgttctgtaaattattagccaaatagaactgtaatggggttgtatttatgggcgcctagaaagaaaacacaaggacttggtaggccaggaagaaaagattttaaaatttagaatgaatagcccttctgggttttctttttgacaattcttggacttgaggtaaaacaaggaggattgtggccggatttcagatcccaaagccagcctccatcttaggcctttgcctcattgtgccttttaggttttcttacccaccgtctcctgttttgtcttttttttcttttctcctacccctatcttgggacattcagaaactgcctgggtggtttgagaagagacaacccagtttgatctgcaatacaaggatccattcgtaatctctctctcactgatgttattcccccatctgccgtcttggttcatctcaccacagaagggcatttagtcctacccagccatcggctgcgtatgacagcaggatggcacttcccatttctctgtggttagtgctcgagtgaaaacctctttcagctgagtcctctgaggttctgctgttgagtcctgggtggctgatggaatgattgaggaggtctggtcaccctcaagcgccgtcatcgccttgtttccatgggcttctgtcacacaaaatgaagaacagaaatgttaggacttaagagaatgtttggaattcacacctctttgcagtcctttcaaggctgctgctctgtgctgtgtcccatgcatgtgaaagtagagctgtgatggctgctgggacgcttgcaaagatcatgtgtgagaattgagcacaagaccacaaattattactgcttgatgcgcttgttaaaactctatctgccaggaaaccaaattttcttttcttttctttttttttttgagacagggcctcactctgttgcccaggctggagtgcagtggcgcgatctcagctcactgcagcctccacctactgggctcaagtgatcctcccacctcagcctcccgagtagccgggaccacaggcgtgtatgactggctacgcctggctaatttttgtatttttaatagagacgagtttcaccatgttgcccaggatggtctggaactcctgggctcaagtgatctgcccacttccgcctcccaaagtgttgggattatggccattagccactgtacctggcacaatttttttttgtaccctcctttatgccaagaatcagtcctaatttctttactatgtgaagtaacttttaaaggtaatagaaaaggccaggcacagtggctcatgcctgtaatcccaggcgccgtggctcacgcctgtaatcccagcactttgagaggctgaggcgggtggatcacttaaggtcaggagttagagaccagcctgaccaacatggtgaaacactgtctctactaaaaatacaaaattagctgggtttggtggcgcacgcctgtaatcccagctacctgagaggttgaggcaggagaatcgcttgaacctgggaggcagaggttgcagtgagccgagatggtgccattgcactccgacctgggcaacagagcgaaacactgtctcaaaaaaaaaaaaaaaagtaacagaaaaaagagtgaaatatattagctatcttttattctgagccaaaacttgacagatgtgggaaatcttcatatagtgtatgaaaatttcattgtacagggaaattattttcctctgtgtcttttcttttactataaagtgattcagaattttactgttactataaaattatgcaaagtattgtgacaaaactgcatcaatttgttgactattaaagtgctccttgaacatta

SEQ ID NO: 397 - protein, 676 aa, Homo sapiens
MDKYDDLGLEASKFIEDLNMYEASKDGLFRVDKGAGNNPEFEETRRVFATKMAKIHLQQQQQQLLQEETLPRGSRGPVNGGGRLGPQARWEVVGSKLTVDGAAKPPLAASTGAPGAVTTLAAGQPPYPPQEQRSRPYLHGTRHGSQDCGSRESLATSEMSAFHQPGPCEDPSCLTHGDYYDNLSLASPKWGDKPGVSPSIGLSVGSGWPSSPGSDPPLPKPCGDHPLNHRQLSLSSSRSSEGSLGGQNSGIGGRSSEKPTGLWSTASSQRVSPGLPSPNLENGAPAVGPVQPRTPSVSAPLALSCPRQGGLPRSNSGLGGEVSGVMSKPNVDPQPWFQDGPKSYLSSSAPSSSPAGLDGSQQGAVPGLGPKPGCTDLGTGPKLSPTSLVHPVMSTLPELSCKEGPLGWSSDGSLGSVLLDSPSSPRVRLPCQPLVPGPELRPSAAELKLEALTQRLEREMDAHPKADYFGACVKCSKGVFGAGQACQAMGNLYHDTCFTCAACSRKLRGKAFYFVNGKVFCEEDFLYSGFQQSADRCFLCGHLIMDMILQALGKSYHPGCFRCVICNECLDGVPFTVDSENKIYCVRDYHKVLAPKCAACGLPILPPEGSDETIRVVSMDRDYHVECYHCEDCGLELNDEDGHRCYPLEDHLFCHSCHVKRLEKRPSSTALHQHHF

SEQ ID NO: 398 - DNA, 3156 bp, Homo sapiens
tcctttaaacctggagttgtctgaggtggtttgcaaactgcaaagcgccctgttcccaatgatgcacctgagaagtctgtaaatggggtaaatttaggcaaacacacctggaaaagtggcattttggagtggggaatgctgtggccggaggttagcaaccggatgatgcaaaagcgtatttaaggcagcagttctggcctttccccgccacggagcagaagcccccatagtgatgtgagaagcggcgctgtcccagtttactaggatgggatgggctttggatctaaccagcagcgaagaaaacctgcggtgcggctgcgctcggtagtaggggtccacaaagcgtcagaatctgcagcagccccggcctttgcgagctccagctccgaagtcaacccggcccccaaattccactgggaaaccttaagacaccggtgtttttaccgtaagaagacctcagaagcccatggaaacaaggcgatgacggcgcttgagggtgaccagacctcctcaatcattccatcagccacccaggactcaacagcagaacctcagaggactcagctgaaagaggttttcactcgagcactaaccacagagaaatgggaagtgccatcctgctgtcatacgcagccgatggctgggtaggactaaatgcccttctgtggtgagatgaaccaagacggcagatgggggaataacatcagtgagagagagattacgaatggatccttgtattgcagatcaaactgggttgtctcttctcaaaccacccaggcagtttctgaatgtcccaagataggggtaggagaaaagaaaaaaaagacaaaacaggagacggtgggtaagaaaacctaaaaggcacaatgaggcaaaggcctaagatggaggctggctttgggatctgaaatccggccacaatcctccttgttttacctcaagtccaagaattgtcaaaaagaaaacccagaagggctattcattctaaattttaaaatcttttcttcctggcctaccaagtccttgtgttttctttctaggcgcccataaatacaaccccattacagttctatttggctaataatttacagaacatttaaaataccgggtaggtgaacatctcttcatggcttttgtgtaagggcctgaagcgaagagaaaaacaactgattggagattcctatctggcgccttctccagggaaactgacaaccagagaaatctgttgctaggatttctaggacatctggaaattccctttttgttctttctcaacaatataaaatggtatattcgcaaacctatctgaatcacctcaatctaggccactttgaaaatttcatttaaaaatgtaatcacagatttttaaactaattacccaatttgcaaacaaatcccagctacttctggtcttgaacatggagcaaaggtgtgtcagtaaggccaacattcttaggttgacagagacaggttaacacattggctggcttcatttacccccctgccacgccccacactgagctggatgatttgatgggaagagagggtccccacctcagggttcacttccccagccccagcgttcatgggttttcaggaggctcagcctgtgaaaaagaaccaatgatgatgcacaccctggctgaagtgacatctggccaaaggattccaacagaatgaattccatcaacatggaaaagataatccatggcaccaattctgtgctgcttacaggcaatggttaccaaatgagtcaaaacatggcctagaagtggagccgggcccaatgaaaagcctgagttcacacgtgctaggggctccactgaccggcctctgcagcccagcacccagtcctcttgctctgggtgcaaggtgaggaggcagagtgcacacaccggctcctgtgtccccggcctggctggcaatggtaaaatgggctgcctttcttttgcagcttcttctaatcgaaataccaaagggtactgacctctggcctcagggatgtgacttgcagtgcaaattttacctcttcagtgcagagagtggtcttgaaatcttgccagtgtgtggccctccctcagctcctgccaccctggggagccaggatgctgaaatgcataaggcaaaagcactgaatcggatctattccccactgacctttagttacgatcactctgccctgaccagctggagttgggcctgtgtgaagccagtgatttccaacacactgaagaaggtatctgagtccagtgtgaaagccaaattcctcctgaatctgtgatttggtgaagctctgtgaggtattttttgtgtgtggaagactgaaagtgaagggaaacaactaaaaaaattaaacagacaaaagcagtgtaccttatcctggtttcttcaaacataatgcctgtgccaagaattgggcaggagagaaaccaacgaaatgaatataataacttatcctgaggcgctccctcccacgctggcttagagatctcgcacacacaaaaactctccttgtttataagaagctgtctctcagtatgcgggcagctcttcccaaaagcccgtcattaaataagctaaaaacaggtgcaagcgatgtacctgcatgggttcctgagacttgccttgcagaagcggccttccaagtcaccaactcttgagaactccagagaaaaacagcgcaaacacgtgggcaaaaaaaaaaatcctggtgcctgcaccaagttcttctcccaaagtatgttttactcacatagggcaaatttctgtcgcggactcagctgcctttaggagagtaaggatttgaaggggtacagagaatgctgtcagtgtctaaggaggaaaccctgcctcacctatttcaaatcttgactctggttttctaagcaaatttatcttaggatacaaagcacacattagagcttccttcttgccttaatgcaattaaatttgcagccattctgcagaagaactgaagctctcaggtgaaaagaagccttaaatcatgccatgatatatgtcgggggagggaacatttgggtataggtattttcctgaaggaagagaaagggttgaatgtattggcagctgagctgtcccttcaaggggatattgtgaaacaagctcaataaaaacctctccctctgaagcatgaaa

SEQ ID NO: 399 - protein, 125 aa, Homo sapiens
MGFGSNQQRRKPAVRLRSVVGVHKASESAAAPAFASSSSEVNPAPKFHWETLRHRCFYRKKTSEAHGNKAMTALEGDQTSSIIPSATQDSTAEPQRTQLKEVFTRALTTEKWEVPSCCHTQPMAG

SEQ ID NO: 400 - DNA, 1803 bp, Homo sapiens
acccaaaagtgggtgaaaggtcggcggcgccggcactgcagctggggctgagaagccaggacggcccgagaactgacagacggagtgacagacggactgaccatggccgaccagccaaaacccatcagcccgctcaagaacctgctggccggcggctttggcggcgtgtgcctggtgttcgtcggtcaccctctggacacggtcaaggtccgactgcagacacagccaccgagtttgcctggacaacctcccatgtactctgggacctttgactgtttccggaagactctttttagagagggcatcacggggctatatcggggaatggctgcccctatcatcggggtcactcccatgtttgccgtgtgcttctttgggtttggtttggggaagaaactacaacagaaacacccagaagatgtgctcagctatccccagctttttgcagctgggatgttatctggcgtattcaccacaggaatcatgactcctggagaacggatcaagtgcttattacagattcaggcttcttcaggagaaagcaagtacactggtaccttggactgtgcaaagaagctgtaccaggagtttgggatccgaggcatctacaaagggactgtgcttacccttatgcgagatgtcccagctagtggaatgtatttcatgacatatgaatggctgaaaaatatcttcactccggagggaaagagggtcagtgagctcagtgcccctcggatcttggtggctgggggcattgcagggatcttcaactgggctgtggcaatccccccagatgtgctcaagtctcgattccagactgcacctcctgggaaatatcctaatggtttcagagatgtgctgagggagctgatccgggatgaaggagtcacatccttgtacaaagggttcaatgcagtgatgatccgagccttcccagccaatgcggcctgtttccttggctttgaagttgccatgaagttccttaattgggccacccccaacttgtgaggctgaaggctgctcaagttcacttctggatgctggaagctgtcgttgaggagaaggagtagtaagcagaactaagcagtcttggagggcaaggggaggggaatggtgagatccgagccctgtgcatggacttggtgagactgttgccttaatgacatcctgcaccgtgtataacttagtgtgtcattttgaaacttgaattcattcttatcaatttaagggatcttaaaaggatttggaaatggaacaagtagcttccagaccagatactacctgtggcaagaatgctgcctaccagttaactgctggtcctaccacagtcaaagtattcctcattaaagagagaatctcaggttctcactggaggcactgtgcatattttcaaccagatcaccaggagctgagatcttcttcagtccctagccaggaatacccatttgatttccagggtgccatctaatcctgggctgtacatgtggatatggacttgaggcccacctctgtgtccaagtggattgagcatatatgcctaggaggagatagactgttaatcgttggattttgattttttttttttatgcctgcaaataatcaaaagtaaaactggagtagcctaattttctgggagcaggtggagaactttccctcctacacagtgaggacagtcccagtctgctgggataagtgagaaagcccagggtgtaggaaggccctttttacatactcttttctcatgagagctcactattttaacaataaacaataaacgttgtttctaaaaaaaaaaaaaaaaaa

SEQ ID NO: 401 - protein, 301 aa, Homo sapiens
MADQPKPISPLKNLLAGGFGGVCLVFVGHPLDTVKVRLQTQPPSLPGQPPMYSGTFDCFRKTLFREGITGLYRGMAAPIIGVTPMFAVCFFGFGLGKKLQQKHPEDVLSYPQLFAAGMLSGVFTTGIMTPGERIKCLLQIQASSGESKYTGTLDCAKKLYQEFGIRGIYKGTVLTLMRDVPASGMYFMTYEWLKNIFTPEGKRVSELSAPRILVAGGIAGIFNWAVAIPPDVLKSRFQTAPPGKYPNGFRDVLRELIRDEGVTSLYKGFNAVMIRAFPANAACFLGFEVAMKFLNWATPNL

SEQ ID NO: 402 - DNA, 1604 bp, Homo sapiens
ctccacaggcgggcgttaaaccgcgcgggcagcgctgcgagagctcccaaagatgactcgagtggtgagccccgaggcggcgcgtttccccgccgcgccagacagggagagagggcctagatgtgccggcgccggttggtcagaggcggtggcctctgacctttccgagagctgagaaggcggcgggaggaaaaaaggcagacacacgctgggcgcccggccgctgacggcgggtaatgctcggacaacgtgccggcgacggggagcgcccgggcctcccgggcgacggcgaaggcggagtcccggcccggccagggaggcgcgcggagaggcccccccagcggccagccaaggtaaacaaggccgtgacgtgcgccgcgcacttaccgggagctgcggcctcgcggccgctgagcccgaacaagccagaccgggtcaggccgggccagagggaccggattggggcgaagcggcagcggaggcggcgggccgacgccggtcaagcccgcgctgcttcctccagaagagtcgtccccacagctccggaagtgcttggcgccgttgcgtcacttccggatcggggtcgacccacggtcgctcgggtcgcgacaggctcccggctagagggcctgtttagcgccgcctccttgaaacttagcgctctgacccagagtctgaccagggtacggcaggcgccgaccgcgtctggagccactattcgcctaccagcgtctcccgtcgagatgtttttaaccagcgcgtttctcaccggcttctcatttcactgtttgtactccgggatcgggcacggagaagacatcctggcgtcagtggagcagataaccattgtttctcggccgctatctggtcagaggggagctgggccgggaaattctgcctacaccccgaggcggtcgcagggtggccccagagccgcaaccacaccaggctttcgcttcccctgccgaggcctcgttcgccgcgcagttctccgacttacggtcaccgtgcaagattgcatcttaactgccttgcttgcagtttcttttcacagtataggagttgtcatcatgacttccagttaccttctgggaccggttgtcaaatgatgtggctagagacggaggctcactcagattgttgctgcaccacaatggaaatgccagtatgaagccgctgatgttaggaaggctccaggttgtgcaattccatagacaacaaatcaaatcatttccaaccatactggagtcgcgtatatacatattcaagacacctgtgcaggccgggcgcggtggctcaagcctgtaatcccagcactttgggaggccgaggcgagtggatcacgaggtcaggagatcgagaccatcctggctaacacggtgaaaccccgtctgtactaaaagtacaaaaaaattagccggacgtggtggcgggcgcctgtagtcccagctactcgggaggctgaggcaggagaatggcgtgaacccgggaggcggagcttgcagtgagtcgagatggcgccactgcactccagcctgggcgacagagcgagactctgtctcaaaataaaataaaataaaataaaaaataaaacaaataaagac

SEQ ID NO: 403 - protein, 290 aa, Homo sapiens
MLGQRAGDGERPGLPGDGEGGVPARPGRRAERPPQRPAKVNKAVTCAAHLPGAAASRPLSPNKPDRVRPGQRDRIGAKRQRRRRADAGQARAASSRRVVPTAPEVLGAVASLPDRGRPTVARVATGSRLEGLFSAASLKLSALTQSLTRVRQAPTASGATIRLPASPVEMFLTSAFLTGFSFHCLYSGIGHGEDILASVEQITIVSRPLSGQRGAGPGNSAYTPRRSQGGPRAATTPGFRFPCRGLVRRAVLRLTVTVQDCILTALLAVSFHSIGVVIMTSSYLLGPVVK

SEQ ID NO: 404 - DNA, 4081 bp, Homo sapiens
gtggggacgactcttctggaggaagcagcgcgggcttgaccggcgtcggcccgccgcctccgctgccgcttcgccccaatccggtccctctggcccggcctgacccggtctggcttgttcgggctcagcggccgcgaggccgcagctcccgatggaaatcatattatgtagaatacttgggtgacatctgcctgagagatctccaagaattacagaagacaaaaatactaatgcatttgagaaagcggtagttttggggggagggggaaaaagcaactgctttcctgatctgcaacttggctggatgctaagatgtcagtggacatgaatagccaggggtctgacagcaatgaagaggactatgacccaaattgtgaggaagaggaagaagaagaagaagacgaccctggggacatagaggactattacgtgggagtagccagcgatgtggagcagcagggggctgatgcctttgatcccgaggagtaccagttcacttgcttgacctacaaggaatctgagggtgccctcaatgagcacatgaccagcttagcttctgtcctaaaggtatctcattcagttgctaaacttatattagttaatttccactggcaagtttcagagatattggacagatacaagtccaattctgctcaactgcttgttgaggctcgagttcagcctaatccatcaaaacatgttcccacatcccatccccctcaccactgtgcagtgtgtatgcagtttgtgcgaaaggaaaacctactctctctggcctgtcagcaccagttttgccgcagctgctgggagcagcactgctcagttctcgtcaaggacggcgtgggcgtgggagtctcttgcatggctcaggactgtccactccgtacaccagaggactttgtgtttccattgcttcccaatgaagaattgagagagaaatacaggcgctacctcttcagggactatgtggagagtcattaccagctccagctgtgccctggtgcagactgccccatggttattcgggtacaggagcctagagctcgccgagtacagtgcaatcggtgcaacgaggtcttctgtttcaagtgtcgtcagatgtatcacgcacccacagactgtgccacaatccggaaatggctcacgaagtgtgcagacgactctgaaacagccaactacattagtgctcacactaaagactgtcccaagtgcaacatctgcattgagaagaatggaggctgcaatcacatgcaatgctccaaatgtaaacacgacttctgctggatgtgtctaggagattggaagactcatggcagtgaatactatgagtgcagtcgttacaaggagaatcctgacatcgtgaaccagagccaacaagcccaggcgagggaagccctcaagaagtacttattctactttgagaggtgggaaaaccacaataaaagcttgcagctagaggcacagacataccagcggattcacgagaagattcaggagagggtcatgaacaatctggggacatggatcgactggcagtacctacagaatgctgccaagctcttggccaagtgtcgatacaccctgcaatacacctacccatatgcatattacatggagtccggacccaggaagaagctgtttgaataccagcaggctcagctggaggctgagatcgaaaacctctcatggaaagtggagcgtgcagacagctatgacagaggggacttggagaaccagatgcatatagcggagcagcggaggagaaccctgctgaaagatttccatgacacctaagttgggatgtggatgtgccggggtgaggaagatgtggctgcaaggtctcccggctgccatactgcatgctgcaggctctgcctttcatgaccccaggcaacagccagggccccactcctgagagacactggcaacacctcttagttgatttctgttttcttctcttttcactttttgtttctaccagggtagaggccatgttgaactggcctcttttcaggacttttatttccccctggatggttgttgggagggagggaaagtgttttctgaatggctattaatagtattagatcattacaacttatgtaactttcaaaggttgtacaattatacaaaaaaaaaaaaaaggcaaactataggataacacagagccctttttgaaaataaattggcattggagtgttttaccctctagctgttttacttagaatgtaacatatgctgcctacccacctcaaaatgtctgtactgcaagagggccctgggcctctgctttccatattcacgtttggccagagttgtagtcccaaagaagagcatgggtggcagatggtagggaattgaactggcctgtgcaatgggcatggagcacaaggggtcacagcatgcctcctgccttaccgtggcagtacggagacagtccagaacatggtcttcttgccacggggtgttgttgtctctggtggtgctgcatgtctgtggctcacctttattcttgaaactgaggtttacctggatctggctactgaggctagagcccacagcagaatggggttgggcctgtggccccccaaactagggggtgtgggttcatcacagtgttgccttttgtctcctaaagatagggatctacttttgaagggaattgttcctcccaaataaatttgctttaccttggtcctttcttttgtgccagtattcaagtggtatagctctgagcagggtcacatttggccaaacctgacactgtcttgctgcattctcctttggcaaacatcagggtcagaattcaggatagcccttcctagggcactggactttctggcatgggggctgtgtttgcacaagttattttcatgttacctggagagtgtccagaggctgctctgaggctgaggtgtgttcccccttgcctggttccagctgtcagagggataccatcctagggtctgggaatccaaggccacgagactccttggtttgtggtccgagatcctgtactaaggagggtctggccagaggaacagaccagcttttgcacaatgaagcgcaagggaacaagtggtttgcctggtgtcctacctgtcctgaacctggtcctgtgggccattgaaaagttagatctgtgatctctggggtttttgtggctttgttcaatgcttccactctagggcaggcagagcagtctatactctcccaagcctgcttgacctccaagtagagctgatacagagatctgtgaatattgtgatagaaattctttggtattcatacatttcagctgcaagtcagcaatttcccaggtaccatgtaagctataaaacagtcattcttaaagacagaggatagctgtgactcatgggatcatgaggtccatggctggttgcaggttccctttttccttcctcaggttttgtctcttcctgtgttgtccccagcaagggagagactgtggggtggattgggagaacagattaggagtatagcaaatgaacccagaatggaacagtggggagctaactgtgaatgaggagagtacctgctgcaggacctggaggtcaggtgtgaatgctgtattggcacagggaataaatatcctggcgtctggagccttcacctctccgtcaagtccttcctgtgatactgccatggcacaggatctgagttgcagctctgcaccctaaatcacaccctgggcattgtctgggctgcagggctgccaggttctgtacttgtgtccagctgtggccctggatgctggagctggagggttttctgtgctcagactgtagcctgtagctcttggcctgtgtagagccccctcctgtgccctcagtggctgtcgtttgttaacatcatcaggaagatgggaaaggtcaggcagaatttttctgccctacaaagggtggaagagaaaggacacagtattttcatgaatttaccatatatctttgtttttcttcaacgaaaaagttaattgaggcaatgtcatctgctcaaagttgagtggtttattcacaataaactgtaagtttctgattataaaaaaaaaaaaaaaaaaaaa

SEQ ID NO: 405 - protein, 493 aa, Homo sapiens
MSVDMNSQGSDSNEEDYDPNCEEEEEEEEDDPGDIEDYYVGVASDVEQQGADAFDPEEYQFTCLTYKESEGALNEHMTSLASVLKVSHSVAKLILVNFHWQVSEILDRYKSNSAQLLVEARVQPNPSKHVPTSHPPHHCAVCMQFVRKENLLSLACQHQFCRSCWEQHCSVLVKDGVGVGVSCMAQDCPLRTPEDFVFPLLPNEELREKYRRYLFRDYVESHYQLQLCPGADCPMVIRVQEPRARRVQCNRCNEVFCFKCRQMYHAPTDCATIRKWLTKCADDSETANYISAHTKDCPKCNICIEKNGGCNHMQCSKCKHDFCWMCLGDWKTHGSEYYECSRYKENPDIVNQSQQAQAREALKKYLFYFERWENHNKSLQLEAQTYQRIHEKIQERVMNNLGTWIDWQYLQNAAKLLAKCRYTLQYTYPYAYYMESGPRKKLFEYQQAQLEAEIENLSWKVERADSYDRGDLENQMHIAEQRRRTLLKDFHDT

SEQ ID NO: 406 - DNA, 2841 bp, Homo sapiens
agagggcgtcttcacgcaggcaccgagaagctcccactagtgtatgccttaatggtgccgctcttgtccgcgtctacgcttgggaccttggcttctgacttggagagtgtacagctctgcccgacggcaacccagcttgggaagagaagccccagcgtgggctggggctcaaggcgcaggaaggccgagcccggcgcggacgcaggcggctccgggcgggctcagcacccccaggcaccgtctcctagtgaccgcggcgctcgcgggcctggcggccgttgtccgggcgactgcgcagcgcgggcacccccgcggcccctcccctgggcgcgcgcgcgacctgggtgccatggcggcagcggcggtgacaggccagcggcctgagaccgcggcggccgaggaggcctcgaggccgcagtgggcgccgccagaccactgccaggctcaggcggcggccgggctgggcgacggcgaggacgcaccggtgcgtccgctgtgcaagccccgcggcatctgctcgcgcgcctacttcctggtgctgatggtgttcgtgcacctgtacctgggtaacgtgctggcgctgctgctcttcgtgcactacagcaacggcgacgaaagcagcgatcccgggccccaacaccgtgcccagggccccgggcccgagcccaccttaggtcccctcacccggctggagggcatcaaggtggggcacgagcgtaaggtccagctggtcaccgacagggatcacttcatccgaaccctcagcctcaagccgctgctcttcgaaatccccggcttcctgactgatgaagagtgtcggctcatcatccatctggcgcagatgaaggggttacagcgcagccagatcctgcctactgaagagtatgaagaggcaatgagcactatgcaggtcagccagctggacctcttccggctgctggaccagaaccgtgatgggcaccttcagctccgtgaggttctggcccagactcgcctgggaaatggatggtggatgactccagagagcattcaggagatgtacgccgcgatcaaggctgaccctgatggtgacggagtgctgagtctgcaggagttctccaacatggaccttcgggacttccacaagtacatgaggagccacaaggcagagtccagtgagctggtgcggaacagccaccatacctggctctaccagggtgagggtgcccaccacatcatgcgtgccatccgccagagggtgctgcgcctcactcgcctgtcgcctgagatcgtggagctcagcgagccgctgcaggttgttcgatatggtgaggggggccactaccatgcccacgtggacagtgggcctgtgtacccagagaccatctgctcccataccaagctggtagccaacgagtctgtacccttcgagacctcctgccggcaagtatctcccaactgggggctgccttcaatcctcagaccaggaacacccatgacacaggcacagccctgcactgtgggcgtgccccttggcatggggccaggagatcactgggttatcccggttagtgatgccctcacctctccccacaagttgtttacccaatggctggaaaggggtggctactggtcatcgtgaccactggagtcaacacagactgatgtacccacagacaccaaaacttgccccctgagttctgaagcaaggggcaaggctgggcccctagcttgtcctgcccattcctccaggtgttgatcttgattccacttagagaagctgaagctgtgcctccctcccctgtcaagccagttctttcctcttcaggtggctgttctggcccagccccttcccatccccaaggagcccttcagcgcgccctgttgcttctgctagcctacctttccctgccaggcccttgctcagggccatggcatttaactaagtgcacctgtgatcttggccaaaaaaccattgcaactcacagtaagagactgggtttcggggaaggaggggctagggacattttggcactggcctgccctattgtctcccatcctagtctgtcctggtccctggcaacaggaacctgggcagcttatcctgcccacaggtaagcccctgggagcatccacaactggggacctgctcagtgccccccctgccttacagctacatgacagtgctgttttatttgaacaacgtcactggtgggggcgagactgttttccctgtagcagataacagaacctacgatgaaatgagtctgattcaggatgacgtggacctccgtgacacacggaggcactgtgacaagggaaacctgcgtgtcaagccccaacagggcacagcagtcttctggtacaactacctgcctgatgggcaaggttgggtgggtgacgtagacgactactcgctgcacgggggctgcctggtcacgcgcggcaccaagtggattgccaacaactggattaatgtggaccccagccgagcgcggcaagcgctgttccaacaggagatggcccgccttgcccgagaagggggcaccgactcacagcccgagtgggctctggaccgggcctaccgcgatgcgcgcgtggaactctgagggaagagttagccccggttcccagccgcgggtcgccagttgcccaagatcaggggtccggctgtccttctgtcctgctgcagactaaaggtctggccaatgtcttgccccaccccgccagccgcgatacggcgcagttcctatattcatgttatttattgtgtactgactccatctgccccgtcaaataaaaaaccacaaggttcgagccgccgggcccgacaaactccgggtcggcgaaaaaaaaaaaaaa

SEQ ID NO: 407 - protein, 423 aa, Homo sapiens
MAAAAVTGQRPETAAAEEASRPQWAPPDHCQAQAAAGLGDGEDAPVRPLCKPRGICSRAYFLVLMVFVHLYLGNVLALLLFVHYSNGDESSDPGPQHRAQGPGPEPTLGPLTRLEGIKVGHERKVQLVTDRDHFIRTLSLKPLLFEIPGFLTDEECRLIIHLAQMKGLQRSQILPTEEYEEAMSTMQVSQLDLFRLLDQNRDGHLQLREVLAQTRLGNGWWMTPESIQEMYAAIKADPDGDGVLSLQEFSNMDLRDFHKYMRSHKAESSELVRNSHHTWLYQGEGAHHIMRAIRQRVLRLTRLSPEIVELSEPLQVVRYGEGGHYHAHVDSGPVYPETICSHTKLVANESVPFETSCRQVSPNWGLPSILRPGTPMTQAQPCTVGVPLGMGPGDHWVIPVSDALTSPHKLFTQWLERGGYWSS

SEQ ID NO: 408 - DNA, 2294 bp, Homo sapiens
agagggcgtcttcacgcaggcaccgagaagctcccactagtgtatgccttaatggtgccgctcttgtccgcgtctacgcttgggaccttggcttctgacttggagagtgtacagctctgcccgacggcaacccagcttgggaagagaagccccagcgtgggctggggctcaaggcgcaggaaggccgagcccggcgcggacgcaggcggctccgggcgggctcagcacccccaggcaccgtctcctagtgaccgcggcgctcgcgggcctggcggccgttgtccgggcgactgcgcagcgcgggcacccccgcggcccctcccctgggcgcgcgcgcgacctgggtgccatggcggcagcggcggtgacaggccagcggcctgagaccgcggcggccgaggaggcctcgaggccgcagtgggcgccgccagaccactgccaggctcaggcggcggccgggctgggcgacggcgaggacgcaccggtgcgtccgctgtgcaagccccgcggcatctgctcgcgcgcctacttcctggtgctgatggtgttcgtgcacctgtacctgggtaacgtgctggcgctgctgctcttcgtgcactacagcaacggcgacgaaagcagcgatcccgggccccaacaccgtgcccagggccccgggcccgagcccaccttaggtcccctcacccggctggagggcatcaaggtggggcacgagcgtaaggtccagctggtcaccgacagggatcacttcatccgaaccctcagcctcaagccgctgctcttcgaaatccccggcttcctgactgatgaagagtgtcggctcatcatccatctggcgcagatgaaggggttacagcgcagccagatcctgcctactgaagagtatgaagaggcaatgagcactatgcaggtcagccagctggacctcttccggctgctggaccagaaccgtgatgggcaccttcagctccgtgaggttctggcccagactcgcctgggaaatggatggtggatgactccagagagcattcaggagatgtacgccgcgatcaaggctgaccctgatggtgacggagtgctgagtctgcaggagttctccaacatggaccttcgggacttccacaagtacatgaggagccacaaggcagagtccagtgagctggtgcggaacagccaccatacctggctctaccagggtgagggtgcccaccacatcatgcgtgccatccgccagagggtgctgcgcctcactcgcctgtcgcctgagatcgtggagctcagcgagccgctgcaggttgttcgatatggtgaggggggccactaccatgcccacgtggacagtgggcctgtgtacccagagaccatctgctcccataccaagctggtagccaacgagtctgtacccttcgagacctcctgccggcaagtatctcccaactgggggctgccttcaatcctcagaccaggaacacccatgacacaggcacagccctgcactgtgggcgtgccccttggcatggggccaggagatcactgggttatcccggtaagcccctgggagcatccacaactggggacctgctcagtgccccccctgccttacagctacatgacagtgctgttttatttgaacaacgtcactggtgggggcgagactgttttccctgtagcagataacagaacctacgatgaaatgagtctgattcaggatgacgtggacctccgtgacacacggaggcactgtgacaagggaaacctgcgtgtcaagccccaacagggcacagcagtcttctggtacaactacctgcctgatgggcaaggttgggtgggtgacgtagacgactactcgctgcacgggggctgcctggtcacgcgcggcaccaagtggattgccaacaactggattaatgtggaccccagccgagcgcggcaagcgctgttccaacaggagatggcccgccttgcccgagaagggggcaccgactcacagcccgagtgggctctggaccgggcctaccgcgatgcgcgcgtggaactctgagggaagagttagccccggttcccagccgcgggtcgccagttgcccaagatcaggggtccggctgtccttctgtcctgctgcagactaaaggtctggccaatgtcttgccccaccccgccagccgcgatacggcgcagttcctatattcatgttatttattgtgtactgactccatctgccccgtcaaataaaaaaccacaaggttcgagccgccgggcccgacaaactccgggtcggcgaaaaaaaaaaaaaa

SEQ ID NO: 409 - protein, 563 aa, Homo sapiens
MAAAAVTGQRPETAAAEEASRPQWAPPDHCQAQAAAGLGDGEDAPVRPLCKPRGICSRAYFLVLMVFVHLYLGNVLALLLFVHYSNGDESSDPGPQHRAQGPGPEPTLGPLTRLEGIKVGHERKVQLVTDRDHFIRTLSLKPLLFEIPGFLTDEECRLIIHLAQMKGLQRSQILPTEEYEEAMSTMQVSQLDLFRLLDQNRDGHLQLREVLAQTRLGNGWWMTPESIQEMYAAIKADPDGDGVLSLQEFSNMDLRDFHKYMRSHKAESSELVRNSHHTWLYQGEGAHHIMRAIRQRVLRLTRLSPEIVELSEPLQVVRYGEGGHYHAHVDSGPVYPETICSHTKLVANESVPFETSCRQVSPNWGLPSILRPGTPMTQAQPCTVGVPLGMGPGDHWVIPVSPWEHPQLGTCSVPPLPYSYMTVLFYLNNVTGGGETVFPVADNRTYDEMSLIQDDVDLRDTRRHCDKGNLRVKPQQGTAVFWYNYLPDGQGWVGDVDDYSLHGGCLVTRGTKWIANNWINVDPSRARQALFQQEMARLAREGGTDSQPEWALDRAYRDARVEL

SEQ ID NO: 410 - DNA, 2111 bp, Homo sapiens
agagggcgtcttcacgcaggcaccgagaagctcccactagtgtatgccttaatggtgccgctcttgtccgcgtctacgcttgggaccttggcttctgacttggagagtgtacagctctgcccgacggcaacccagcttgggaagagaagccccagcgtgggctggggctcaaggcgcaggaaggccgagcccggcgcggacgcaggcggctccgggcgggctcagcacccccaggcaccgtctcctagtgaccgcggcgctcgcgggcctggcggccgttgtccgggcgactgcgcagcgcgggcacccccgcggcccctcccctgggcgcgcgcgcgacctgggtgccatggcggcagcggcggtgacaggccagcggcctgagaccgcggcggccgaggaggcctcgaggccgcagtgggcgccgccagaccactgccaggctcaggcggcggccgggctgggcgacggcgaggacgcaccggtgcgtccgctgtgcaagccccgcggcatctgctcgcgcgcctacttcctggtgctgatggtgttcgtgcacctgtacctgggtaacgtgctggcgctgctgctcttcgtgcactacagcaacggcgacgaaagcagcgatcccgggccccaacaccgtgcccagggccccgggcccgagcccaccttaggtcccctcacccggctggagggcatcaaggtggggcacgagcgtaaggtccagctggtcaccgacagggatcacttcatccgaaccctcagcctcaagccgctgctcttcgaaatccccggcttcctgactgatgaagagtgtcggctcatcatccatctggcgcagatgaaggggttacagcgcagccagatcctgcctactgaagagtatgaagaggcaatgagcactatgcaggtcagccagctggacctcttccggctgctggaccagaaccgtgatgggcaccttcagctccgtgaggttctggcccagactcgcctgggaaatggatggtggatgactccagagagcattcaggagatgtacgccgcgatcaaggctgaccctgatggtgacggagtgctgagtctgcaggagttctccaacatggaccttcgggacttccacaagtacatgaggagccacaaggcagagtccagtgagctggtgcggaacagccaccatacctggctctaccagggtgagggtgcccaccacatcatgcgtgccatccgccagagggtgctgcgcctcactcgcctgtcgcctgagatcgtggagctcagcgagccgctgcaggttgttcgatatggtgaggggggccactaccatgcccacgtggacagtgggcctgtgtacccagagaccatctgctcccataccaagctggtagccaacgagtctgtacccttcgagacctcctgccgctacatgacagtgctgttttatttgaacaacgtcactggtgggggcgagactgttttccctgtagcagataacagaacctacgatgaaatgagtctgattcaggatgacgtggacctccgtgacacacggaggcactgtgacaagggaaacctgcgtgtcaagccccaacagggcacagcagtcttctggtacaactacctgcctgatgggcaaggttgggtgggtgacgtagacgactactcgctgcacgggggctgcctggtcacgcgcggcaccaagtggattgccaacaactggattaatgtggaccccagccgagcgcggcaagcgctgttccaacaggagatggcccgccttgcccgagaagggggcaccgactcacagcccgagtgggctctggaccgggcctaccgcgatgcgcgcgtggaactctgagggaagagttagccccggttcccagccgcgggtcgccagttgcccaagatcaggggtccggctgtccttctgtcctgctgcagactaaaggtctggccaatgtcttgccccaccccgccagccgcgatacggcgcagttcctatattcatgttatttattgtgtactgactccatctgccccgtcaaataaaaaaccacaaggttcgagccgccgggcccgacaaactccgggtcggcgaaaaaaaaaaaaaa

SEQ ID NO: 411 - protein, 502 aa, Homo sapiens [sequence omitted]

SEQ ID NO: 412 - DNA, 4079 bp, Homo sapiens
cttcttagccgtggctgcctcagcacctcgaggatcgacatggacgctctcgaggactacgtttggccgcgggcaacctcggagcttatactcctcccagtgacgggtctggagtgcgtgggggaccggctgttggcgggtgagggtcccgatgtcctggtgtacagcttggactttggtgggcatctgcggatgataaagcgagtgcagaacctgcttggccactatcttatccatggcttccgggtacggccagagcctaatggagaccttgacttggaggccatggtggctgtgtttggaagcaagggactccgagttgtgaaaattagctggggacagggccacttctgggagctttggcgctctggcctgtggaacatgtctgactggatttgggatgcacgctggcttgagggaaatatagccttggccctgggccacaactcagtggtgctatatgaccctgtagtagggtgcatcctgcaagaggtgccctgcacagacaggtgcaccctctcttcagcctgcctgattggagacgcctggaaggagctgaccatagtggcaggtgctgtttccaaccagctcttggtctggtacccagcaactgccttagcagacaacaaacctgtagcacctgaccgacgaatcagtgggcatgtgggcatcatcttcagcatgtcatacctggaaagcaagggattgctggctacagcttcagaagaccgaagcgttcgtatctggaaggtgggcgacctgcgagtgcctgggggtcgggtgcagaatattgggcactgctttgggcacagcgcccgtgtgtggcaggtcaagcttctagagaattaccttatcagtgcaggagaggattgtgtctgcttggtgtggagccatgaaggtgagatcctccaggcctttcggggacaccagggacgtgggatccgggccatagctgcccatgagaggcaggcctgggtgatcactgggggtgatgactcaggcattcggctgtggcacttggtagggcgtgggtaccggggattgggggtctcggctctctgcttcaagtcccgtagtaggccaggtacactcaaggctgtgactctggctggctcttggcgactgctggcagtgactgatacaggggccctgtatctctatgacgtcgaggtcaagtgctgggagcagctgctagaggataaacatttccagtcctactgcctgctggaggcagctcctggtcccgagggcttcggattgtgtgctatggccaatggggaaggtcgtgtcaaggttgtccccatcaacactccaactgctgctgtggaccagaccctgtttcctgggaaggtgcacagcttgagctgggccctgcgtggttatgaggagctcctgttgctggcatcgggccctggcggggtagtagcttgcctagagatctcagccgcaccctctggcaaggccatctttgtcaaggaacgttgtcggtacctgctgcccccaagcaagcagagatggcacacatgcagtgccttcctacccccaggtgacttcctggtgtgtggtgaccgccggggctctgtgctgctattcccctccagaccaggtctgctcaaggaccctggggtgggaggcaaggctcgggctggtgctggggcacctgtagtgggtagtggtagtagtgggggtgggaatgctttcactgggttgggcccagtgtctaccctgccctctctgcacgggaagcagggtgtgacctcagtcacatgccatggtggctatgtgtataccacagggcgtgatggagcctactaccagctgtttgtacgagacggccagctccagccagtcctaaggcagaagtcctgtcgaggcatgaactggctagctgggctccgtatagtgcccgatgggagcatggttatcctgggtttccatgccaatgagtttgtggtgtggaaccctcggtcacacgagaagctgcacatcgtcaactgtggtggagggcaccgttcgtgggcattctctgatactgaggcggccatggcctttgcttacctcaaggatggggatgtcatgctgtacagggctctgggtggctgcacccggccacacgtgattctccgggagggtctgcatggccgtgagatcacttgtgtaaagcgtgtgggcaccattaccctggggcctgaatatggagtgcccagcttcatgcagcctgatgacctggagcctggcagtgaggggcccgacttgactgacattgtgatcacatgtagtgaggacactactgtctgtgtcctagcactccctacaaccacaggctcagcccacgcactcacagctgtttgtaaccatatctcctcggtacgtgctgtggctgtgtggggcattggcaccccaggtggccctcaggatcctcagccaggcctgactgcccatgtggtgtctgcgggggggcgggctgagatgcactgcttcagcatcatggttactccggaccccagcaccccaagccgcctcgcctgccatgtcatgcacctttcgtcccaccggctagatgagtattgggaccggcaacgcaatcggcatcggatggttaaggtagacccagagaccaggtacatgtcccttgctgtgtgtgaacttgaccagcccggccttggcccccttgtggctgcagcctgtagtgatggggccgtaaggctctttcttttgcaggattctgggcggattctgcagctccttgctgaaaccttccaccataagcgatgtgtcctcaaggtccactcctttacacacgaggcacccaaccagaggcggaggctcctcctgtgcagcgcagctactgatggcagcctggctttctgggatctcaccaccatgctagaccatgactccactgtcctggagcctccagtggatcctgggcttccctaccggcttggcaccccctccctgactctccaggcccacagctgtggtatcaacagcctgcacaccttgcccacccgtgagggccaccatctcgtggccagtggcagtgaagatggatccctccatgtcttcgtgcttgctgtggagatgctacagctagaagaggctgtgggagaggctgggctggtaccccagctgcgtgtgctagaggaatactctgtcccctgtgcacatgctgcccatgtgacaggcctcaagatcctaagcccaagcatcatggtctcagcctccattgatcaacggctgaccttctggcgtctggggcatggtgaacccaccttcatgaatagcactgtgttccatgtgcctgatgtggctgacatggactgctggcctgtgagccctgagtttggccaccgttgtgcccttgggggtcaggggcttgaggtttacaactggtatgactgaggtatcctgcggtggctggcgtgctgggcatggggcctgctcacagacagcatggagcagggaagggctgtctgtgcccatgctcagcatgccttgaggggaggaggtggtggccgtgggttcctgatgtcggtgcaggagctgaaggtgagtggagtgctgccaagaatatgcccgactccccatgacaagacagaactttgtaacaaacagtaccaatttattttggccgtgggtttttgctttttttccagttgatgactttgtgaacattcccaggtattggagcctctgtggccttaaatgtggctcagtggagggagacccagcatagccaggccagtatggagcacctcacgcacagctctcagaagctgcaggcggacgaacatctgaccaaagaggtgtggtcgaggctcctgaaagagaaagggcctgctggtctcatcctctgcttcctttgcctttaccctatacctctctgcacgtcccaccccgttttgctgtgtgctcacccccaggatgtgtacccggttgtagtaggagctgaaatccatgctgagctgtaccaggaacttgcatatctagagacagagactgagtcactggcccatctctttgctcttgtgccccaggccagaataaagaatagagtgtagaggtcaaaaaaaaaa

SEQ ID NO: 413 - protein, 1121 aa, Homo sapiens
MDALEDYVWPRATSELILLPVTGLECVGDRLLAGEGPDVLVYSLDFGGHLRMIKRVQNLLGHYLIHGFRVRPEPNGDLDLEAMVAVFGSKGLRVVKISWGQGHFWELWRSGLWNMSDWIWDARWLEGNIALALGHNSVVLYDPVVGCILQEVPCTDRCTLSSACLIGDAWKELTIVAGAVSNQLLVWYPATALADNKPVAPDRRISGHVGIIFSMSYLESKGLLATASEDRSVRIWKVGDLRVPGGRVQNIGHCFGHSARVWQVKLLENYLISAGEDCVCLVWSHEGEILQAFRGHQGRGIRAIAAHERQAWVITGGDDSGIRLWHLVGRGYRGLGVSALCFKSRSRPGTLKAVTLAGSWRLLAVTDTGALYLYDVEVKCWEQLLEDKHFQSYCLLEAAPGPEGFGLCAMANGEGRVKVVPINTPTAAVDQTLFPGKVHSLSWALRGYEELLLLASGPGGVVACLEISAAPSGKAIFVKERCRYLLPPSKQRWHTCSAFLPPGDFLVCGDRRGSVLLFPSRPGLLKDPGVGGKARAGAGAPVVGSGSSGGGNAFTGLGPVSTLPSLHGKQGVTSVTCHGGYVYTTGRDGAYYQLFVRDGQLQPVLRQKSCRGMNWLAGLRIVPDGSMVILGFHANEFVVWNPRSHEKLHIVNCGGGHRSWAFSDTEAAMAFAYLKDGDVMLYRALGGCTRPHVILREGLHGREITCVKRVGTITLGPEYGVPSFMQPDDLEPGSEGPDLTDIVITCSEDTTVCVLALPTTTGSAHALTAVCNHISSVRAVAVWGIGTPGGPQDPQPGLTAHVVSAGGRAEMHCFSIMVTPDPSTPSRLACHVMHLSSHRLDEYWDRQRNRHRMVKVDPETRYMSLAVCELDQPGLGPLVAAACSDGAVRLFLLQDSGRILQLLAETFHHKRCVLKVHSFTHEAPNQRRRLLLCSAATDGSLAFWDLTTMLDHDSTVLEPPVDPGLPYRLGTPSLTLQAHSCGINSLHTLPTREGHHLVASGSEDGSLHVFVLAVEMLQLEEAVGEAGLVPQLRVLEEYSVPCAHAAHVTGLKILSPSIMVSASIDQRLTFWRLGHGEPTFMNSTVFHVPDVADMDCWPVSPEFGHRCALGGQGLEVYNWYD

SEQ ID NO: 414 - DNA, 2238 bp, Homo sapiens
gcttactccttccggtcaccatggcgaccaggcgccttggggtcggggagacgctgggggccctcaacgcggccctggggccaggcggtccggtgtggatcaaggagacgcgcacccgccacctgcgttcccgagactttctggcaccgcaccgcgcgctgcaggcgcgcttcgatgacggccaggttccggagcatttgctccatgccctcgcctgcctgcagggccccggtgtggccccggtgctgcgctgcgcgccgacccccgcgggtctgtctctccaactgcagcggtccgccgtcttcgagcgcgtcctcagcgccgtggccgcctatgccacgcccgcctcgcctgcctcgctgggccagcgcgtcttactacactgcccagcactgcgcagctccccctgcgcactccgcttgagccagctgcgtacggtgctcgtggccgatcacctggcgcgagccctgcgcgctcacggggtgtgcgtgcgcctagtgccagctgtgcgggatccgcacatgctgaccttcctgcagcaactgcgggtggactggcccgctgcctcggagagagcttcctcccacaccctgaggagccacgcccttgaagaacttacctctgctaatgacgggaggacactgtcccctggcatcctaggcagactgtgtctgaaggagctggtggaagaacagggccgcacagctggctatgaccccaacctggacaactgtctggtgactgaggatctcctctctgtgctggctgagctgcaagaggctctatggcattggcccgaggacagccacccaggcctggctggggcctcagatactggtacaggcggctgcctggttgtacatgttgttagctgtgaggaggagttccagcaacagaagttggacctgctttggcagaagttggttgacaaggctccactcagacagaagcacctcatctgtggccctgtgaaagtagctggtgcacctggcactctgatgactgcccctgagtactacgagttccggcatacccaggtgtgcaaggcctcagcactgaagcatggtggggatctggcacaagacccagcctggacagagatctttggtgttctctctgtggccaccatcaagtttgagatgctgagcacagccccacagagtcagctcttcctggctctggctgacagcagtatctccacgaagggcacaaagagtggcacctttgtcatgtataattgtgcccgtcttgccacactctttgagagttacaagtgtagtatggaacaaggtctgtaccccacttttcctcctgtgagcagtctggacttctcactgctacatgatgagggtgagtggttgttgctcttcaacagtatcctcccctttccggatctgctgagccggacagcagtgctggactgcacagccccggggctccacattgctgtacgcacagagatgatatgcaagttcctggtacagctcagcatggatttcagctcctactacaaccgggtacacatcctgggggagcctcgaccacacctctttggtcagatgttcgtccgcctgcagcttctgagagctgtgcgtgaggtgctccatactggcctggctatgctgggtctccctccactgagccacatttaaggccacagaggctccaatacctgggaatgttcacaaagtcatcaactggaaaaaaagcaaaaacccacggccaaaataaattggtactgtttgttacaaagttctgtcttgtcatggggagtcgggcatattcttggcagcactccactcaccttcagctcctgcaccgacatcaggaacccacggccaccacctcctcccctcaaggcatgctgagcatgggcacagacagcccatccctgctccatgctgtctgtgagcaggccccatgcccagcacgccagccaccgcaggatacctcagtcataccagttgtaaacctcaagcccctgacccccaagggcacaacggtggccaaactcagggctcacaggccagcagtccatgtcagccacatcaggcacatggaacacagtgctattcatgaaggtgggttcaccatgccccagacgccagaaggtcagccgttgatcaatggaggctgagaccatgatgcttgggcttaggatcttgaggcctgtcacatgggcagcatgtgcacaggggacagagtattcctctagcacacgcagctggggtaccagcc

SEQ ID NO: 415 - protein, 543 aa, Homo sapiens
MATRRLGVGETLGALNAALGPGGPVWIKETRTRHLRSRDFLAPHRALQARFDDGQVPEHLLHALACLQGPGVAPVLRCAPTPAGLSLQLQRSAVFERVLSAVAAYATPASPASLGQRVLLHCPALRSSPCALRLSQLRTVLVADHLARALRAHGVCVRLVPAVRDPHMLTFLQQLRVDWPAASERASSHTLRSHALEELTSANDGRTLSPGILGRLCLKELVEEQGRTAGYDPNLDNCLVTEDLLSVLAELQEALWHWPEDSHPGLAGASDTGTGGCLVVHVVSCEEEFQQQKLDLLWQKLVDKAPLRQKHLICGPVKVAGAPGTLMTAPEYYEFRHTQVCKASALKHGGDLAQDPAWTEIFGVLSVATIKFEMLSTAPQSQLFLALADSSISTKGTKSGTFVMYNCARLATLFESYKCSMEQGLYPTFPPVSSLDFSLLHDEGEWLLLFNSILPFPDLLSRTAVLDCTAPGLHIAVRTEMICKFLVQLSMDFSSYYNRVHILGEPRPHLFGQMFVRLQLLRAVREVLHTGLAMLGLPPLSHI

SEQ ID NO: 416 - DNA, 2242 bp, Homo sapiens
ttcctctccggccccacgggcgcgcttccctcctgacggattccgaagcccgccccaccaccgtcaccgcaccagtggcccaggcttcgtgggaccaacagggctaatcctgccccacggatctaatccggatcgggacccggtcccaggggaggcccccacctccccttctattgttctgtggcccaggttccggagcatttgctccatgccctcgcctgcctgcagggccccggtgtggccccggtgctgcgctgcgcgccgacccccgcgggtctgtctctccaactgcagcggtccgccgtcttcgagcgcgtcctcagcgccgtggccgcctatgccacgcccgcctcgcctgcctcgctgggccagcgcgtcttactacactgcccagcactgcgcagctccccctgcgcactccgcttgagccagctgcgtacggtgctcgtggccgatcacctggcgcgagccctgcgcgctcacggggtgtgcgtgcgcctagtgccagctgtgcgggatccgcacatgctgaccttcctgcagcaactgcgggtggactggcccgctgcctcggagagagcttcctcccacaccctgaggagccacgcccttgaagaacttacctctgctaatgacgggaggacactgtcccctggcatcctaggcagactgtgtctgaaggagctggtggaagaacagggccgcacagctggctatgaccccaacctggacaactgtctggtgactgaggatctcctctctgtgctggctgagctgcaagaggctctatggcattggcccgaggacagccacccaggcctggctggggcctcagatactggtacaggcggctgcctggttgtacatgttgttagctgtgaggaggagttccagcaacagaagttggacctgctttggcagaagttggttgacaaggctccactcagacagaagcacctcatctgtggccctgtgaaagtagctggtgcacctggcactctgatgactgcccctgagtactacgagttccggcatacccaggtgtgcaaggcctcagcactgaagcatggtggggatctggcacaagacccagcctggacagagatctttggtgttctctctgtggccaccatcaagtttgagatgctgagcacagccccacagagtcagctcttcctggctctggctgacagcagtatctccacgaagggcacaaagagtggcacctttgtcatgtataattgtgcccgtcttgccacactctttgagagttacaagtgtagtatggaacaaggtctgtaccccacttttcctcctgtgagcagtctggacttctcactgctacatgatgagggtgagtggttgttgctcttcaacagtatcctcccctttccggatctgctgagccggacagcagtgctggactgcacagccccggggctccacattgctgtacgcacagagatgatatgcaagttcctggtacagctcagcatggatttcagctcctactacaaccgggtacacatcctgggggagcctcgaccacacctctttggtcagatgttcgtccgcctgcagcttctgagagctgtgcgtgaggtgctccatactggcctggctatgctgggtctccctccactgagccacatttaaggccacagaggctccaatacctgggaatgttcacaaagtcatcaactggaaaaaaagcaaaaacccacggccaaaataaattggtactgtttgttacaaagttctgtcttgtcatggggagtcgggcatattcttggcagcactccactcaccttcagctcctgcaccgacatcaggaacccacggccaccacctcctcccctcaaggcatgctgagcatgggcacagacagcccatccctgctccatgctgtctgtgagcaggccccatgcccagcacgccagccaccgcaggatacctcagtcataccagttgtaaacctcaagcccctgacccccaagggcacaacggtggccaaactcagggctcacaggccagcagtccatgtcagccacatcaggcacatggaacacagtgctattcatgaaggtgggttcaccatgccccagacgccagaaggtcagccgttgatcaatggaggctgagaccatgatgcttgggcttaggatcttgaggcctgtcacatgggcagcatgtgcacaggggacagagtattcctctagcacacgcagctggggtaccagcc

SEQ ID NO: 417 - protein, 376 aa, Homo sapiens
MLTFLQQLRVDWPAASERASSHTLRSHALEELTSANDGRTLSPGILGRLCLKELVEEQGRTAGYDPNLDNCLVTEDLLSVLAELQEALWHWPEDSHPGLAGASDTGTGGCLVVHVVSCEEEFQQQKLDLLWQKLVDKAPLRQKHLICGPVKVAGAPGTLMTAPEYYEFRHTQVCKASALKHGGDLAQDPAWTEIFGVLSVATIKFEMLSTAPQSQLFLALADSSISTKGTKSGTFVMYNCARLATLFESYKCSMEQGLYPTFPPVSSLDFSLLHDEGEWLLLFNSILPFPDLLSRTAVLDCTAPGLHIAVRTEMICKFLVQLSMDFSSYYNRVHILGEPRPHLFGQMFVRLQLLRAVREVLHTGLAMLGLPPLSHI

SEQ ID NO: 418 - DNA, 1387 bp, Homo sapiens
ggttagggcggggcgtgcttccgcgtctagccggagaaacttgagccggctgccccgcccacggtgcccgaagccccaaaggctggaattaggggctagaagtctggcacccaccgcctggccaggtgttcgggacgcgaccaggtgggcggtcgccccgccccgggagcgcggcttaatagctgagagcccgggggccaggccgcggctgcggcccaggcaacgccctgagggtggccacgctgccaggtgttccactcccccgggactatgggcaagggcccggggcggggagggcggcaggtgctgacactggagctgcgccggaggtcggggaactcggcctcctaagactgaggacactcgcctgctgggccggtcgagctgtgcggtgccctccgggacgcagggggcgctgcagccacgctgggtcaggctccgcagggccctcccaacccggggactaacggcgccggtgacgacttcgccgcgcgttggtcagccatggccaccgctctcgcgctacgtagcttgtaccgagcgcgaccctcgctgcgctgtccgcccgttgagcttccctgggccccgcggcgagggcatcggctctcgccggcggatgacgagctgtatcagcggacgcgcatctctctgctgcaacgcgaggccgctcaggcaatgtacatcgacagctacaacagccgcggcttcatgataaacggaaaccgcgtgctcggcccctgcgctctgctcccgcactcggtggtgcagtggaacgtgggatcccaccaggacatcaccgaagacagcttttccctcttctggttgctggagccccggatagagatcgtggtggtggggactggagaccggaccgagaggctgcagtcccaggtgcttcaagccatgaggcagcggggcattgctgtggaagtgcaggacacgcccaatgcctgtgccaccttcaacttcctgtgtcatgaaggccgagtaactggagctgctctcatccctccaccaggagggacttcacttacatctttgggccaagctgctcaatgaaccgccaggaactgacctgctgactgcactctgccaggcttcccaatgctttcactcttatctaccctttggcacttatcttgcttatcaacataataatttatacacttctcccattttgtatcaggtgtgttgctggccaggagctgatggctcactgggctcttggaggggaatgtgaagaaaccaaggagtcactttttcatctagattacttaggattccttgacttttcagaagtcgggaagcagtatgtttgcctgttgtagacctacttgctcacatgcagatttgagaggacctcaacggcttttctcacaaaaaaaaa

SEQ ID NO: 419 - protein, 184 aa, Homo sapiens
MATALALRSLYRARPSLRCPPVELPWAPRRGHRLSPADDELYQRTRISLLQREAAQAMYIDSYNSRGFMINGNRVLGPCALLPHSVVQWNVGSHQDITEDSFSLFWLLEPRIEIVVVGTGDRTERLQSQVLQAMRQRGIAVEVQDTPNACATFNFLCHEGRVTGAALIPPPGGTSLTSLGQAAQ

SEQ ID NO: 420 - DNA, 950 bp, Homo sapiens
ggttagggcggggcgtgcttccgcgtctagccggagaaacttgagccggctgccccgcccacggtgcccgaagccccaaaggctggaattaggggctagaagtctggcacccaccgcctggccaggtgttcgggacgcgaccagggccccgcggcgagggcatcggctctcgccggcggatgacgagctgtatcagcggacgcgcatctctctgctgcaacgcgaggccgctcaggcaatgtacatcgacagctacaacagccgcggcttcatgataaacggaaaccgcgtgctcggcccctgcgctctgctcccgcactcggtggtgcagtggaacgtgggatcccaccaggacatcaccgaagacagcttttccctcttctggttgctggagccccggatagagatcgtggtggtggggactggagaccggaccgagaggctgcagtcccaggtgcttcaagccatgaggcagcggggcattgctgtggaagtgcaggacacgcccaatgcctgtgccaccttcaacttcctgtgtcatgaaggccgagtaactggagctgctctcatccctccaccaggagggacttcacttacatctttgggccaagctgctcaatgaaccgccaggaactgacctgctgactgcactctgccaggcttcccaatgctttcactcttatctaccctttggcacttatcttgcttatcaacataataatttatacacttctcccattttgtatcaggtgtgttgctggccaggagctgatggctcactgggctcttggaggggaatgtgaagaaaccaaggagtcactttttcatctagattacttaggattccttgacttttcagaagtcgggaagcagtatgtttgcctgttgtagacctacttgctcacatgcagatttgagaggacctcaacggcttttctcacaaaaaaaaa

SEQ ID NO: 421 - protein, 127 aa, Homo sapiens
MYIDSYNSRGFMINGNRVLGPCALLPHSVVQWNVGSHQDITEDSFSLFWLLEPRIEIVVVGTGDRTERLQSQVLQAMRQRGIAVEVQDTPNACATFNFLCHEGRVTGAALIPPPGGTSLTSLGQAAQ

SEQ ID NO: 422 - DNA, 1021 bp, Homo sapiens
caccaccaggctcccactgtgccgagcttcccgctcgcccggccccgcgggtagcgaaagcgacaatgttcccctgaggccacgacagagccggcgtgccgagatgcccaaaccccgcgcgggggccagcgactctcgcgccagtaggcccttgacttggatcaagacgggggacgggggactcccaggacgcgagcagagtgaacgaggacaagggccccgcggcgagggcatcggctctcgccggcggatgacgagctgtatcagcggacgcgcatctctctgctgcaacgcgaggccgctcaggcaatgtacatcgacagctacaacagccgcggcttcatgataaacggaaaccgcgtgctcggcccctgcgctctgctcccgcactcggtggtgcagtggaacgtgggatcccaccaggacatcaccgaagacagcttttccctcttctggttgctggagccccggatagagatcgtggtggtggggactggagaccggaccgagaggctgcagtcccaggtgcttcaagccatgaggcagcggggcattgctgtggaagtgcaggacacgcccaatgcctgtgccaccttcaacttcctgtgtcatgaaggccgagtaactggagctgctctcatccctccaccaggagggacttcacttacatctttgggccaagctgctcaatgaaccgccaggaactgacctgctgactgcactctgccaggcttcccaatgctttcactcttatctaccctttggcacttatcttgcttatcaacataataatttatacacttctcccattttgtatcaggtgtgttgctggccaggagctgatggctcactgggctcttggaggggaatgtgaagaaaccaaggagtcactttttcatctagattacttaggattccttgacttttcagaagtcgggaagcagtatgtttgcctgttgtagacctacttgctcacatgcagatttgagaggacctcaacggcttttctcacaaaaaaaaa

SEQ ID NO: 423 - protein, 127 aa, Homo sapiens; identical to SEQ ID NO: 421

SEQ ID NO: 424 - DNA, 902 bp, Homo sapiens
agatggccaccagcctcggctctcccacgtctacacccatcacctccagcctgagggcgcaactgagaggaactgagacccaagcagctcagtaaaggccccgcggcgagggcatcggctctcgccggcggatgacgagctgtatcagcggacgcgcatctctctgctgcaacgcgaggccgctcaggcaatgtacatcgacagctacaacagccgcggcttcatgataaacggaaaccgcgtgctcggcccctgcgctctgctcccgcactcggtggtgcagtggaacgtgggatcccaccaggacatcaccgaagacagcttttccctcttctggttgctggagccccggatagagatcgtggtggtggggactggagaccggaccgagaggctgcagtcccaggtgcttcaagccatgaggcagcggggcattgctgtggaagtgcaggacacgcccaatgcctgtgccaccttcaacttcctgtgtcatgaaggccgagtaactggagctgctctcatccctccaccaggagggacttcacttacatctttgggccaagctgctcaatgaaccgccaggaactgacctgctgactgcactctgccaggcttcccaatgctttcactcttatctaccctttggcacttatcttgcttatcaacataataatttatacacttctcccattttgtatcaggtgtgttgctggccaggagctgatggctcactgggctcttggaggggaatgtgaagaaaccaaggagtcactttttcatctagattacttaggattccttgacttttcagaagtcgggaagcagtatgtttgcctgttgtagacctacttgctcacatgcagatttgagaggacctcaacggcttttctcacaaaaaaaaa

SEQ ID NO: 425 - protein, 127 aa, Homo sapiens; identical to SEQ ID NO: 421

SEQ ID NO: 426 - DNA, 1511 bp, Homo sapiens
ggttagggcggggcgtgcttccgcgtctagccggagaaacttgagccggctgccccgcccacggtgcccgaagccccaaaggctggaattaggggctagaagtctggcacccaccgcctggccaggtgttcgggacgcgaccaggtgggcggtcgccccgccccgggagcgcggcttaatagctgagagcccgggggccaggccgcggctgcggcccaggcaacgccctgagggtggccacgctgccaggtgttccactcccccgggactatgggcaagggcccggggcggggagggcggcaggtgctgacactggagctgcgccggaggtcggggaactcggcctcctaagactgaggacactcgcctgctgggccggtcgagctgtgcggtgccctccgggacgcagggggcgctgcagccacgctgggtcaggctccgcagggccctcccaacccggggactaacggcgccggtgacgacttcgccgcgcgttggtcagccatggccaccgctctcgcgctacgtagcttgtaccgagcgcgaccctcgctgcgctgtccgcccgttgagcttccctggtgagcttggaccccgcgccctcgaccatccagccccctagggccggcgactgccagcccagcaccttccggcctctcgggctgcccggcccggccccgcgcccctgaccctttccctccgcagggccccgcggcgagggcatcggctctcgccggcggatgacgagctgtatcagcggacgcgcatctctctgctgcaacgcgaggccgctcaggcaatgtacatcgacagctacaacagccgcggcttcatgataaacggaaaccgcgtgctcggcccctgcgctctgctcccgcactcggtggtgcagtggaacgtgggatcccaccaggacatcaccgaagacagcttttccctcttctggttgctggagccccggatagagatcgtggtggtggggactggagaccggaccgagaggctgcagtcccaggtgcttcaagccatgaggcagcggggcattgctgtggaagtgcaggacacgcccaatgcctgtgccaccttcaacttcctgtgtcatgaaggccgagtaactggagctgctctcatccctccaccaggagggacttcacttacatctttgggccaagctgctcaatgaaccgccaggaactgacctgctgactgcactctgccaggcttcccaatgctttcactcttatctaccctttggcacttatcttgcttatcaacataataatttatacacttctcccattttgtatcaggtgtgttgctggccaggagctgatggctcactgggctcttggaggggaatgtgaagaaaccaaggagtcactttttcatctagattacttaggattccttgacttttcagaagtcgggaagcagtatgtttgcctgttgtagacctacttgctcacatgcagatttgagaggacctcaacggcttttctcacaaaaaaaaa

SEQ ID NO: 427 - protein, 127 aa, Homo sapiens; identical to SEQ ID NO: 421

SEQ ID NO: 428 - DNA, 1712 bp, Homo sapiens
cgaaatcggctggtttatattggcgcggcccagacggcagaggtctctgcggcgcggtcctcggagacacgcggcggtgtcctgtgttggccatggccgactacctgattagtgggggcacgtcctacgtgccagacgacggactcacagcacagcagctcttcaactgcggagacggcctcacctacaatgactttctcattctccctgggtacatcgacttcactgcagaccaggtggacctgacttctgctctgaccaagaaaatcactcttaagaccccactggtttcctctcccatggacacagtcacagaggctgggatggccatagcaatggcgcttacaggcggtattggcttcatccaccacaactgtacacctgaattccaggccaatgaagttcggaaagtgaagaaatatgaacagggattcatcacagaccctgtggtcctcagccccaaggatcgcgtgcgggatgtttttgaggccaaggcccggcatggtttctgcggtatcccaatcacagacacaggccggatggggagccgcttggtgggcatcatctcctccagggacattgattttctcaaagaggaggaacatgactgtttcttggaagagataatgacaaagagggaagacttggtggtagcccctgcaggcatcacactgaaggaggcaaatgaaattctgcagcgcagcaagaagggaaagttgcccattgtaaatgaagatgatgagcttgtggccatcattgcccggacagacctgaagaagaatcgggactacccactagcctccaaagatgccaagaaacagctgctgtgtggggcagccattggcactcatgaggatgacaagtataggctggacttgctcgcccaggctggtgtggatgtagtggttttggactcttcccagggaaattccatcttccagatcaatatgatcaagtacatcaaagacaaataccctaatctccaagtcattggaggcaatgtggtcactgctgcccaggccaagaacctcattgatgcaggtgtggatgccctgcgggtgggcatgggaagtggctccatctgcattacgcaggaagtgctggcctgtgggcggccccaagcaacagcagtgtacaaggtgtcagagtatgcacggcgctttggtgttccggtcattgctgatggaggaatccaaaatgtgggtcatattgcgaaagccttggcccttggggcctccacagtcatgatgggctctctcctggctgccaccactgaggcccctggtgaatacttcttttccgatgggatccggctaaagaaatatcgcggtatgggttctctcgatgccatggacaagcacctcagcagccagaacagatatttcagtgaagctgacaaaatcaaagtggcccagggagtgtctggtgctgtgcaggacaaagggtcaatccacaaatttgtcccttacctgattgctggcatccaacactcatgccaggacattggtgccaagagcttgacccaagtccgagccatgatgtactctggggagcttaagtttgagaagagaacgtcctcagcccaggtggaaggtggcgtccatagcctccattcgtatgagaagcggcttttctgaaaagggatccagcacacctcctcggtttttttttcaataaaagtttagaaagaaaaaaaaaaaaaaaaaaaaaaa

SEQ ID NO: 429 - protein, 514 aa, Homo sapiens
MADYLISGGTSYVPDDGLTAQQLFNCGDGLTYNDFLILPGYIDFTADQVDLTSALTKKITLKTPLVSSPMDTVTEAGMAIAMALTGGIGFIHHNCTPEFQANEVRKVKKYEQGFITDPVVLSPKDRVRDVFEAKARHGFCGIPITDTGRMGSRLVGIISSRDIDFLKEEEHDCFLEEIMTKREDLVVAPAGITLKEANEILQRSKKGKLPIVNEDDELVAIIARTDLKKNRDYPLASKDAKKQLLCGAAIGTHEDDKYRLDLLAQAGVDVVVLDSSQGNSIFQINMIKYIKDKYPNLQVIGGNVVTAAQAKNLIDAGVDALRVGMGSGSICITQEVLACGRPQATAVYKVSEYARRFGVPVIADGGIQNVGHIAKALALGASTVMMGSLLAATTEAPGEYFFSDGIRLKKYRGMGSLDAMDKHLSSQNRYFSEADKIKVAQGVSGAVQDKGSIHKFVPYLIAGIQHSCQDIGAKSLTQVRAMMYSGELKFEKRTSSAQVEGGVHSLHSYEKRLF

SEQ ID NO: 430 - DNA, 3331 bp, Homo sapiens
attggctgtgagggttgaatgtaagatggcgcccagggagctgtgaggagaaaaccctgtcggtcttggagcgacgacggcagaaccagggtccctggcggtgcggcggggccggcgggtgcagcggaggcggcggcggcggcggcagtgacgtcgccggaatattagaagtcttaagaactcaggacaagcagcagaaatacatgcaacatggtgactggaaccctaaggactctgcaatatgaataattccctagagaacaccatctcctttgaagagtacatccgagtaaaggcacggtctgtcccgcaacacaggatgaaggaatttctggactcactggcctctaaggggccagaagcccttcaggagttccagcagacagccaccactaccatggtgtaccaacagggtgggaactgcatatacacagacagcactgaagtggctgggtctttgcttgaacttgcctgtccagtcaccaccagtgttcagccacaaacccagcaagaacagcagatccaggttcagcagccgcagcaggttcaggtccaggtgcaggtacagcagtctccgcaacaggtctcggctcagctctccccacaactcaccgttcaccagcctactgagcaacccatccaggtccaggtgcagatccaaggccaggcaccacagtcagcagccccctccattcagaccccgtctctgcagagtcccagtccctcgcagctgcaagcagctcagatccaggtgcagcacgtgcaagcagcccagcagatccaggctgcagaaatcccggaggagcacatcccacatcagcaaatccaggctcagctggtggctggccagtctcttgctggtggtcagcagatccaaatccagaccgtgggtgccctttccccaccaccatcccagcagggctcaccccgggaaggggagcggcgggttggcacggccagtgtcctccaaccagtgaagaagcgcaaagtggacatgcccatcactgtgtcctacgccatctcagggcagccggtggccaccgtgctggccattccacagggccagcagcagagttatgtgtctttgaggccagacttactgacagtagacagtgcccacctgtacagtgccactgggaccattactagccctacaggagaaacctggaccatccctgtttattctgcccagccccggggggaccctcagcagcagagcattacccacattgccattccccaggaagcctacaacgcagttcacgtcagtggctcacccacagccctggcagctgttaagctggaggatgacaaggagaagatggtgggcaccacatctgtagtgaaaaactcccatgaagaggtagtgcagacccttgcaaactctctctttccagcacagttcatgaatggcaacatccacattccagtggctgtgcaggctgtggcaggcacgtaccagaatacggctcaaactgtccatatatgggacccccaacagcagccgcagcagcaaactccccaggaacagacaccaccaccacagcagcagcagcagcaactccaagttacttgttcagctcaaactgtccaggttgctgaagttgaaccacagtcacagccacagccttccccagaacttctgcttccaaattctttgaagccagaagaagggcttgaagtatggaaaaactgggcccagaccaagaatgctgaactagagaaggatgctcagaacagattggcacccattgggaggcgccaactgctgcgattccaggaagatctcatctcctctgctgtggcagagttgaattatgggctctgtctaatgacacgggaagctcgaaatggagaaggtgaaccctatgacccagatgtgctctactatattttcctgtgtattcaaaagtatctttttgaaaatggaagggtagatgacattttctccgatctttattatgttcggttcacggagtggctacatgaagttctgaaggatgttcagccccgggtcactccacttggctatgtcttgcccagccacgtgactgaggagatgctatgggagtgcaagcagcttggggctcactccccctccaccttgctgaccaccctcatgttctttaataccaagtacttcctattgaagacagtggaccagcacatgaagctggccttctccaaggtcttgcgacagacaaagaagaacccctctaatcccaaggataaaagcacgagtatccggtacttgaaggcccttggaatacaccagactggccagaaagttacagatgacatgtatgcagaacagacggaaaatccagagaatccattgagatgtcccatcaagctctatgatttctacctcttcaaatgcccccagagtgtgaaaggccggaatgacaccttttacctgacacctgagccagtggtggcccccaacagcccaatctggtactcagtccagcctatcagcagagagcagatgggacaaatgctgacgcggatcctggtgataagagaaattcaggaggccatcgcagtggccaatgcaagcactatgcactgagatgccttggccatggcacaagagaaaccagccaggaaaaaccagacagactttcacactaaagaagaggcctccatttttttttttcttttttttattggtgtagttacgaagcctttcaggctgcttctgtttaaaatataaaagaaaactttgccccctttgcatcttcataaacctgctgcggcagactcctcagccgatggtggctctgggtttccttgagtgtcatatgtcctagaaagttgctggctgactcttttttgtctggggcctggggaaagggcttggactgtgaaaagaaatgtggcccctttccatcttcaagagagatggaattaatgatggatggaccctggagggaatctccccagccgacttccactgggctgacagactttgctgaccacaggggaacgatgttcttttctttcttcatgatcagacataaacttagcatcttaatggaagaaaaatgaggggaacttcaattatgatttattaaagacaatttctattacaccctcctttatgacaagtgacattttagatgtaaaagtaaaaactttaccatgccttttttttttttgttggcctaacattgaggccttaaaacctgaggctcctgtgcctgatggaattcttgtaacatacacttgtgtatcatataaagataccactctgtttctcttatgtattcttactctagttgtttattaagaatgacaagcacgtcttttcaaaaaaaaaaaaaaaaaa

SEQ ID NO: 431 - protein, 776 aa, Homo sapiens
MNNSLENTISFEEYIRVKARSVPQHRMKEFLDSLASKGPEALQEFQQTATTTMVYQQGGNCIYTDSTEVAGSLLELACPVTTSVQPQTQQEQQIQVQQPQQVQVQVQVQQSPQQVSAQLSPQLTVHQPTEQPIQVQVQIQGQAPQSAAPSIQTPSLQSPSPSQLQAAQIQVQHVQAAQQIQAAEIPEEHIPHQQIQAQLVAGQSLAGGQQIQIQTVGALSPPPSQQGSPREGERRVGTASVLQPVKKRKVDMPITVSYAISGQPVATVLAIPQGQQQSYVSLRPDLLTVDSAHLYSATGTITSPTGETWTIPVYSAQPRGDPQQQSITHIAIPQEAYNAVHVSGSPTALAAVKLEDDKEKMVGTTSVVKNSHEEVVQTLANSLFPAQFMNGNIHIPVAVQAVAGTYQNTAQTVHIWDPQQQPQQQTPQEQTPPPQQQQQQLQVTCSAQTVQVAEVEPQSQPQPSPELLLPNSLKPEEGLEVWKNWAQTKNAELEKDAQNRLAPIGRRQLLRFQEDLISSAVAELNYGLCLMTREARNGEGEPYDPDVLYYIFLCIQKYLFENGRVDDIFSDLYYVRFTEWLHEVLKDVQPRVTPLGYVLPSHVTEEMLWECKQLGAHSPSTLLTTLMFFNTKYFLLKTVDQHMKLAFSKVLRQTKKNPSNPKDKSTSIRYLKALGIHQTGQKVTDDMYAEQTENPENPLRCPIKLYDFYLFKCPQSVKGRNDTFYLTPEPVVAPNSPIWYSVQPISREQMGQMLTRILVIREIQEAIAVANASTMH

SEQ ID NO: 432 - DNA, 3271 bp, Homo sapiens
attggctgtgagggttgaatgtaagatggcgcccagggagctgtgaggagaaaaccctgtcggtcttggagcgacgacggcagaaccagggtccctggcggtgcggcggggccggcgggtgcagcggaggcggcggcggcggcggcagtgacgtcgccgggaaccctaaggactctgcaatatgaataattccctagagaacaccatctcctttgaagagtacatccgagtaaaggcacggtctgtcccgcaacacaggatgaaggaatttctggactcactggcctctaaggggccagaagcccttcaggagttccagcagacagccaccactaccatggtgtaccaacagggtgggaactgcatatacacagacagcactgaagtggctgggtctttgcttgaacttgcctgtccagtcaccaccagtgttcagccacaaacccagcaagaacagcagatccaggttcagcagccgcagcaggttcaggtccaggtgcaggtacagcagtctccgcaacaggtctcggctcagctctccccacaactcaccgttcaccagcctactgagcaacccatccaggtccaggtgcagatccaaggccaggcaccacagtcagcagccccctccattcagaccccgtctctgcagagtcccagtccctcgcagctgcaagcagctcagatccaggtgcagcacgtgcaagcagcccagcagatccaggctgcagaaatcccggaggagcacatcccacatcagcaaatccaggctcagctggtggctggccagtctcttgctggtggtcagcagatccaaatccagaccgtgggtgccctttccccaccaccatcccagcagggctcaccccgggaaggggagcggcgggttggcacggccagtgtcctccaaccagtgaagaagcgcaaagtggacatgcccatcactgtgtcctacgccatctcagggcagccggtggccaccgtgctggccattccacagggccagcagcagagttatgtgtctttgaggccagacttactgacagtagacagtgcccacctgtacagtgccactgggaccattactagccctacaggagaaacctggaccatccctgtttattctgcccagccccggggggaccctcagcagcagagcattacccacattgccattccccaggaagcctacaacgcagttcacgtcagtggctcacccacagccctggcagctgttaagctggaggatgacaaggagaagatggtgggcaccacatctgtagtgaaaaactcccatgaagaggtagtgcagacccttgcaaactctctctttccagcacagttcatgaatggcaacatccacattccagtggctgtgcaggctgtggcaggcacgtaccagaatacggctcaaactgtccatatatgggacccccaacagcagccgcagcagcaaactccccaggaacagacaccaccaccacagcagcagcagcagcaactccaagttacttgttcagctcaaactgtccaggttgctgaagttgaaccacagtcacagccacagccttccccagaacttctgcttccaaattctttgaagccagaagaagggcttgaagtatggaaaaactgggcccagaccaagaatgctgaactagagaaggatgctcagaacagattggcacccattgggaggcgccaactgctgcgattccaggaagatctcatctcctctgctgtggcagagttgaattatgggctctgtctaatgacacgggaagctcgaaatggagaaggtgaaccctatgacccagatgtgctctactatattttcctgtgtattcaaaagtatctttttgaaaatggaagggtagatgacattttctccgatctttattatgttcggttcacggagtggctacatgaagttctgaaggatgttcagccccgggtcactccacttggctatgtcttgcccagccacgtgactgaggagatgctatgggagtgcaagcagcttggggctcactccccctccaccttgctgaccaccctcatgttctttaataccaagtacttcctattgaagacagtggaccagcacatgaagctggccttctccaaggtcttgcgacagacaaagaagaacccctctaatcccaaggataaaagcacgagtatccggtacttgaaggcccttggaatacaccagactggccagaaagttacagatgacatgtatgcagaacagacggaaaatccagagaatccattgagatgtcccatcaagctctatgatttctacctcttcaaatgcccccagagtgtgaaaggccggaatgacaccttttacctgacacctgagccagtggtggcccccaacagcccaatctggtactcagtccagcctatcagcagagagcagatgggacaaatgctgacgcggatcctggtgataagagaaattcaggaggccatcgcagtggccaatgcaagcactatgcactgagatgccttggccatggcacaagagaaaccagccaggaaaaaccagacagactttcacactaaagaagaggcctccatttttttttttcttttttttattggtgtagttacgaagcctttcaggctgcttctgtttaaaatataaaagaaaactttgccccctttgcatcttcataaacctgctgcggcagactcctcagccgatggtggctctgggtttccttgagtgtcatatgtcctagaaagttgctggctgactcttttttgtctggggcctggggaaagggcttggactgtgaaaagaaatgtggcccctttccatcttcaagagagatggaattaatgatggatggaccctggagggaatctccccagccgacttccactgggctgacagactttgctgaccacaggggaacgatgttcttttctttcttcatgatcagacataaacttagcatcttaatggaagaaaaatgaggggaacttcaattatgatttattaaagacaatttctattacaccctcctttatgacaagtgacattttagatgtaaaagtaaaaactttaccatgccttttttttttttgttggcctaacattgaggccttaaaacctgaggctcctgtgcctgatggaattcttgtaacatacacttgtgtatcatataaagataccactctgtttctcttatgtattcttactctagttgtttattaagaatgacaagcacgtcttttcaaaaaaaaaaaaaaaaaa

SEQ ID NO: 433 - protein, 776 aa, Homo sapiens; identical to SEQ ID NO: 431

SEQ ID NO: 434 - DNA, 2437 bp, Homo sapiens
ctgcaatggcggctctagactccctgtcgctcttcactagcctcggcctgagcgagcagaaggcccgcgagacgctcaagaactcggctctgagcgcgcagctgcgcgaggccgctactcaggctcagcagaccctgggttccaccattgacaaagctaccgggatcctgttatatggcttggcctcccgactcagggatacccggcgtctctccttccttgtaagctacatagccagtaagaagatccacactgagccccagctaagcgctgcccttgagtatgtgcggagtcaccccttggaccccatcgacactgtggacttcgagcgggaatgtggcgtgggtgtcattgtgaccccagagcagattgaggaggctgtggaggctgctattaacaggcaccggccccagctcctggtggaacgttaccatttcaacatggggctgctgatgggagaggctcgggctgtgctgaagtgggcagatggcaaaatgatcaagaatgaagtggacatgcaggtcctccaccttctgggccccaagttggaggctgatctggagaagaagttcaaggtggcaaaagctcggctagaagaaacagaccggaggacggcaaaggatgtggtggagaatggcgagactgctgaccagaccctgtctctgatggagcagctccggggggaggcccttaagttccacaagcctggtgagaactacaagaccccaggctatgtggtcactccacacaccatgaatctactaaagcagcacctggagattactggtgggcaggtacgtacccggttcccgccagaacccaatggaatcctgcatattggacatgccaaagccatcaatttcaactttggctatgccaaggccaacaatggcatctgttttctgcgttttgatgacaccaaccctgagaaggaggaagcaaagttcttcacggccatctgtgacatggtagcctggctaggctacacaccttacaaagtcacatatgcgtctgactattttgaccagctatatgcgtgggctgtggagctcatccgcaggggtctggcttatgtgtgccaccagcgaggagaggagctcaaaggccataatactctgccttcaccctggagagaccgtcccatggaggagtcactgctgctctttgaggcaatgcgcaagggcaagttttcagagggcgaggccacactacggatgaagctggtgatggaggatggcaagatggaccctgtagcctatcgagtcaagtatacaccacaccaccgcacaggggacaaatggtgcatctatcccacctacgactacacacactgcctctgtgactccatcgagcacatcactcactcactctgcaccaaggaattccaggcccgacgctcttcctacttctggctttgcaatgcactggacgtctattgccctgtgcagtgggagtatggccgcctcaacctgcactatgctgttgtctctaagaggaagatcctccagcttgtagcaactggtgctgtgcgggactgggatgacccacggctctttacactcacggccctgcgacggcggggcttcccacctgaggccatcaacaacttctgtgcccgggtgggagtgactgtggcacaaaccacaatggagccacatcttctagaagcctgtgtgcgtgatgtgctgaatgacacagccccacgagccatggctgtgctggagtcactacgggtcatcatcaccaactttcctgctgccaagtccttggacatccaggtgcccaacttcccagctgatgagaccaaaggcttccatcaggttccctttgcacccattgtcttcattgagaggactgacttcaaggaggagccagagccaggatttaagcgcctggcttggggccagcctgtgggcctgaggcatacaggctacgtcattgagctgcagcatgttgtcaagggccccagtggttgtgtagagagtctggaggtgacctgcagacgggcagatgctggagagaagccaaaggcctttattcactgggtgtcacagcctttgatgtgtgaggttcgcctctatgagcgactattccagcacaagaaccctgaagatcctactgaggtgcctggtggatttttaagtgacctgaacctggcatcactacacgtggtggatgcagcattagtggactgctctgtggccctggcaaaacccttcgacaagttccagtttgagcgtcttggatatttctccgtggatccagacagccatcagggaaagcttgtctttaaccgaactgtcacactgaaggaagacccaggaaaggtgtgagctggaagcactgaacctacctcatcctcctggagggtgtggctaccctcgccaccccaaattccatgtcaataaagaacagctaaattctcctagaaaaaaaa

SEQ ID NO: 435 - protein, 775 aa, Homo sapiens
MAALDSLSLFTSLGLSEQKARETLKNSALSAQLREAATQAQQTLGSTIDKATGILLYGLASRLRDTRRLSFLVSYIASKKIHTEPQLSAALEYVRSHPLDPIDTVDFERECGVGVIVTPEQIEEAVEAAINRHRPQLLVERYHFNMGLLMGEARAVLKWADGKMIKNEVDMQVLHLLGPKLEADLEKKFKVAKARLEETDRRTAKDVVENGETADQTLSLMEQLRGEALKFHKPGENYKTPGYVVTPHTMNLLKQHLEITGGQVRTRFPPEPNGILHIGHAKAINFNFGYAKANNGICFLRFDDTNPEKEEAKFFTAICDMVAWLGYTPYKVTYASDYFDQLYAWAVELIRRGLAYVCHQRGEELKGHNTLPSPWRDRPMEESLLLFEAMRKGKFSEGEATLRMKLVMEDGKMDPVAYRVKYTPHHRTGDKWCIYPTYDYTHCLCDSIEHITHSLCTKEFQARRSSYFWLCNALDVYCPVQWEYGRLNLHYAVVSKRKILQLVATGAVRDWDDPRLFTLTALRRRGFPPEAINNFCARVGVTVAQTTMEPHLLEACVRDVLNDTAPRAMAVLESLRVIITNFPAAKSLDIQVPNFPADETKGFHQVPFAPIVFIERTDFKEEPEPGFKRLAWGQPVGLRHTGYVIELQHVVKGPSGCVESLEVTCRRADAGEKPKAFIHWVSQPLMCEVRLYERLFQHKNPEDPTEVPGGFLSDLNLASLHVVDAALVDCSVALAKPFDKFQFERLGYFSVDPDSHQGKLVFNRTVTLKEDPGKV

SEQ ID NO: 436 - DNA, 7193 bp, Homo sapiens
agaataagggcagggaccgcggctcctatctcttggtgatccccttccccattccgcccccgcctcaacgcccagcacagtgccctgcacacagtagtcgctcaataaatgttcgtggatgatgatgatgatgatgatgaaaaaaatgcagcatcaacggcagcagcaagcggaccacgcgaacgaggcaaactatgcaagaggcaccagacttcctctttctggtgaaggaccaacttctcagccgaatagctccaagcaaactgtcctgtcttggcaagctgcaatcgatgctgctagacaggccaaggctgcccaaactatgagcacctctgcacccccacctgtaggatctctctcccaaagaaaacgtcagcaatacgccaagagcaaaaaacagggtaactcgtccaacagccgacctgcccgcgcccttttctgtttatcactcaataaccccatccgaagagcctgcattagtatagtggaatggaaaccatttgacatatttatattattggctatttttgccaattgtgtggccttagctatttacatcccattccctgaagatgattctaattcaacaaatcataacttggaaaaagtagaatatgccttcctgattatttttacagtcgagacatttttgaagattatagcgtatggattattgctacatcctaatgcttatgttaggaatggatggaatttactggattttgttatagtaatagtaggattgtttagtgtaattttggaacaattaaccaaagaaacagaaggcgggaaccactcaagcggcaaatctggaggctttgatgtcaaagccctccgtgcctttcgagtgttgcgaccacttcgactagtgtcaggggtgcccagtttacaagttgtcctgaactccattataaaagccatggttcccctccttcacatagcccttttggtattatttgtaatcataatctatgctattataggattggaactttttattggaaaaatgcacaaaacatgtttttttgctgactcagatatcgtagctgaagaggacccagctccatgtgcgttctcagggaatggacgccagtgtactgccaatggcacggaatgtaggagtggctgggttggcccgaacggaggcatcaccaactttgataactttgcctttgccatgcttactgtgtttcagtgcatcaccatggagggctggacagacgtgctctactgggtaaatgatgcgataggatgggaatggccatgggtgtattttgttagtctgatcatccttggctcatttttcgtccttaacctggttcttggtgtccttagtggagaattctcaaaggaaagagagaaggcaaaagcacggggagatttccagaagctccgggagaagcagcagctggaggaggatctaaagggctacttggattggatcacccaagctgaggacatcgatccggagaatgaggaagaaggaggagaggaaggcaaacgaaatactagcatgcccaccagcgagactgagtctgtgaacacagagaacgtcagcggtgaaggcgagaaccgaggctgctgtggaagtctctggtgctggtggagacggagaggcgcggccaaggcggggccctctgggtgtcggcggtggggtcaagccatctcaaaatccaaactcagccgacgctggcgtcgctggaaccgattcaatcgcagaagatgtagggccgccgtgaagtctgtcacgttttactggctggttatcgtcctggtgtttctgaacaccttaaccatttcctctgagcactacaatcagccagattggttgacacagattcaagatattgccaacaaagtcctcttggctctgttcacctgcgagatgctggtaaaaatgtacagcttgggcctccaagcatatttcgtctctcttttcaaccggtttgattgcttcgtggtgtgtggtggaatcactgagacgatcctggtggaactggaaatcatgtctcccctggggatctctgtgtttcggtgtgtgcgcctcttaagaatcttcaaagtgaccaggcactggacttccctgagcaacttagtggcatccttattaaactccatgaagtccatcgcttcgctgttgcttctgctttttctcttcattatcatcttttccttgcttgggatgcagctgtttggcggcaagtttaattttgatgaaacgcaaaccaagcggagcacctttgacaatttccctcaagcacttctcacagtgttccagatcctgacaggcgaagactggaatgctgtgatgtacgatggcatcatggcttacgggggcccatcctcttcaggaatgatcgtctgcatctacttcatcatcctcttcatttgtggtaactatattctactgaatgtcttcttggccatcgctgtagacaatttggctgatgctgaaagtctgaacactgctcagaaagaagaagcggaagaaaaggagaggaaaaagattgccagaaaagagagcctagaaaataaaaagaacaacaaaccagaagtcaaccagatagccaacagtgacaacaaggttacaattgatgactatagagaagaggatgaagacaaggacccctatccgccttgcgatgtgccagtaggggaagaggaagaggaagaggaggaggatgaacctgaggttcctgccggaccccgtcctcgaaggatctcggagttgaacatgaaggaaaaaattgcccccatccctgaagggagcgctttcttcattcttagcaagaccaacccgatccgcgtaggctgccacaagctcatcaaccaccacatcttcaccaacctcatccttgtcttcatcatgctgagcagcgctgccctggccgcagaggaccccatccgcagccactccttccggaacacgatactgggttactttgactatgccttcacagccatctttactgttgagatcctgttgaagatgacaacttttggagctttcctccacaaaggggccttctgcaggaactacttcaatttgctggatatgctggtggttggggtgtctctggtgtcatttgggattcaatccagtgccatctccgttgtgaagattctgagggtcttaagggtcctgcgtcccctcagggccatcaacagagcaaaaggacttaagcacgtggtccagtgcgtcttcgtggccatccggaccatcggcaacatcatgatcgtcactaccctcctgcagttcatgtttgcctgtatcggggtccagttgttcaaggggaagttctatcgctgtacggatgaagccaaaagtaaccctgaagaatgcaggggacttttcatcctctacaaggatggggatgttgacagtcctgtggtccgtgaacggatctggcaaaacagtgatttcaacttcgacaacgtcctctctgctatgatggcgctcttcacagtctccacgtttgagggctggcctgcgttgctgtataaagccatcgactcgaatggagagaacatcggcccaatctacaaccaccgcgtggagatctccatcttcttcatcatctacatcatcattgtagctttcttcatgatgaacatctttgtgggctttgtcatcgttacatttcaggaacaaggagaaaaagagtataagaactgtgagctggacaaaaatcagcgtcagtgtgttgaatacgccttgaaagcacgtcccttgcggagatacatccccaaaaacccctaccagtacaagttctggtacgtggtgaactcttcgcctttcgaatacatgatgtttgtcctcatcatgctcaacacactctgcttggccatgcagcactacgagcagtccaagatgttcaatgatgccatggacattctgaacatggtcttcaccggggtgttcaccgtcgagatggttttgaaagtcatcgcatttaagcctaaggggtattttagtgacgcctggaacacgtttgactccctcatcgtaatcggcagcattatagacgtggccctcagcgaagcggacccaactgaaagtgaaaatgtccctgtcccaactgctacacctgggaactctgaagagagcaatagaatctccatcacctttttccgtcttttccgagtgatgcgattggtgaagcttctcagcaggggggaaggcatccggacattgctgtggacttttattaagtcctttcaggcgctcccgtatgtggccctcctcatagccatgctgttcttcatctatgcggtcattggcatgcagatgtttgggaaagttgccatgagagataacaaccagatcaataggaacaataacttccagacgtttccccaggcggtgctgctgctcttcaggtgtgcaacaggtgaggcctggcaggagatcatgctggcctgtctcccagggaagctctgtgaccctgagtcagattacaaccccggggaggagtatacatgtgggagcaactttgccattgtctatttcatcagtttttacatgctctgtgcatttctgatcatcaatctgtttgtggctgtcatcatggataatttcgactatctgacccgggactggtctattttggggcctcaccatttagatgaattcaaaagaatatggtcagaatatgaccctgaggcaaagggaaggataaaacaccttgatgtggtcactctgcttcgacgcatccagcctcccctggggtttgggaagttatgtccacacagggtagcgtgcaagagattagttgccatgaacatgcctctcaacagtgacgggacagtcatgtttaatgcaaccctgtttgctttggttcgaacggctcttaagatcaagaccgaagggaacctggagcaagctaatgaagaacttcgggctgtgataaagaaaatttggaagaaaaccagcatgaaattacttgaccaagttgtccctccagctggtgatgatgaggtaaccgtggggaagttctatgccactttcctgatacaggactactttaggaaattcaagaaacggaaagaacaaggactggtgggaaagtaccctgcgaagaacaccacaattgccctacaggcgggattaaggacactgcatgacattgggccagaaatccggcgtgctatatcgtgtgatttgcaagatgacgagcctgaggaaacaaaacgagaagaagaagatgatgtgttcaaaagaaatggtgccctgcttggaaaccatgtcaatcatgttaatagtgataggagagattcccttcagcagaccaataccacccaccgtcccctgcatgtccaaaggccttcaattccacctgcaagtgatactgagaaaccgctgtttcctccagcaggaaattcggtgtgtcataaccatcataaccataattccataggaaagcaagttcccacctcaacaaatgccaatctcaataatgccaatatgtccaaagctgcccatggaaagcggcccagcattgggaaccttgagcatgtgtctgaaaatgggcatcattcttcccacaagcatgaccgggagcctcagagaaggtccagtgtgaaaagaacccgctattatgaaacttacattaggtccgactcaggagatgaacagctcccaactatttgccgggaagacccagagatacatggctatttcagggacccccactgcttgggggagcaggagtatttcagtagtgaggaatgctacgaggatgacagctcgcccacctggagcaggcaaaactatggctactacagcagatacccaggcagaaacatcgactctgagaggccccgaggctaccatcatccccaaggattcttggaggacgatgactcgcccgtttgctatgattcacggagatctccaaggagacgcctactacctcccaccccagcatcccaccggagatcctccttcaactttgagtgcctgcgccggcagagcagccaggaagaggtcccgtcgtctcccatcttcccccatcgcacggccctgcctctgcatctaatgcagcaacagatcatggcagttgccggcctagattcaagtaaagcccagaagtactcaccgagtcactcgacccggtcgtgggccacccctccagcaacccctccctaccgggactggacaccgtgctacacccccctgatccaagtggagcagtcagaggccctggaccaggtgaacggcagcctgccgtccctgcaccgcagctcctggtacacagacgagcccgacatctcctaccggactttcacaccagccagcctgactgtccccagcagcttccggaacaaaaacagcgacaagcagaggagtgcggacagcttggtggaggcagtcctgatatccgaaggcttgggacgctatgcaagggacccaaaatttgtgtcagcaacaaaacacgaaatcgctgatgcctgtgacctcaccatcgacgagatggagagtgcagccagcaccctgcttaatgggaacgtgcgtccccgagccaacggggatgtgggccccctctcacaccggcaggactatgagctacaggactttggtcctggctacagcgacgaagagccagaccctgggagggatgaggaggacctggcggatgaaatgatatgcatcaccaccttgtagcccccagcgaggggcagactggctctggcctcaggtggggcgcaggagagccaggggaaaagtgcctcatagttaggaaagtttaggcactagttgggagtaatattcaattaattagacttttgtataagagatgtcatgcctcaagaaagccataaacctggtaggaacaggtcccaagcggttgagcctggcagagtaccatgcgctcggccccagctgcaggaaacagcaggccccgccctctcacagaggatgggtgaggaggccagacctgccctgccccattgtccagatgggcactgctgtggagtctgcttctcccatgtaccagggcaccaggcccacccaactgaaggcatggcggcggggtgcaggggaaagttaaaggtgatgacgatcatcacacctcgtgtcgttacctcagccatcggtctagcatatcagtcactgggcccaacatatccatttttaaaccctttcccccaaatacactgcgtcctggttcctgtttagctgttctgaaata

SEQ ID NO: 437 - protein, 2181 aa, Homo sapiens
MMMMMMMKKMQHQRQQQADHANEANYARGTRLPLSGEGPTSQPNSSKQTVLSWQAAIDAARQAKAAQTMSTSAPPPVGSLSQRKRQQYAKSKKQGNSSNSRPARALFCLSLNNPIRRACISIVEWKPFDIFILLAIFANCVALAIYIPFPEDDSNSTNHNLEKVEYAFLIIFTVETFLKIIAYGLLLHPNAYVRNGWNLLDFVIVIVGLFSVILEQLTKETEGGNHSSGKSGGFDVKALRAFRVLRPLRLVSGVPSLQVVLNSIIKAMVPLLHIALLVLFVIIIYAIIGLELFIGKMHKTCFFADSDIVAEEDPAPCAFSGNGRQCTANGTECRSGWVGPNGGITNFDNFAFAMLTVFQCITMEGWTDVLYWVNDAIGWEWPWVYFVSLIILGSFFVLNLVLGVLSGEFSKEREKAKARGDFQKLREKQQLEEDLKGYLDWITQAEDIDPENEEEGGEEGKRNTSMPTSETESVNTENVSGEGENRGCCGSLWCWWRRRGAAKAGPSGCRRWGQAISKSKLSRRWRRWNRFNRRRCRAAVKSVTFYWLVIVLVFLNTLTISSEHYNQPDWLTQIQDIANKVLLALFTCEMLVKMYSLGLQAYFVSLFNRFDCFVVCGGITETILVELEIMSPLGISVFRCVRLLRIFKVTRHWTSLSNLVASLLNSMKSIASLLLLLFLFIIIFSLLGMQLFGGKFNFDETQTKRSTFDNFPQALLTVFQILTGEDWNAVMYDGIMAYGGPSSSGMIVCIYFIILFICGNYILLNVFLAIAVDNLADAESLNTAQKEEAEEKERKKIARKESLENKKNNKPEVNQIANSDNKVTIDDYREEDEDKDPYPPCDVPVGEEEEEEEEDEPEVPAGPRPRRISELNMKEKIAPIPEGSAFFILSKTNPIRVGCHKLINHHIFTNLILVFIMLSSAALAAEDPIRSHSFRNTILGYFDYAFTAIFTVEILLKMTTFGAFLHKGAFCRNYFNLLDMLVVGVSLVSFGIQSSAISVVKILRVLRVLRPLRAINRAKGLKHVVQCVFVAIRTIGNIMIVTTLLQFMFACIGVQLFKGKFYRCTDEAKSNPEECRGLFILYKDGDVDSPVVRERIWQNSDFNFDNVLSAMMALFTVSTFEGWPALLYKAIDSNGENIGPIYNHRVEISIFFIIYIIIVAFFMMNIFVGFVIVTFQEQGEKEYKNCELDKNQRQCVEYALKARPLRRYIPKNPYQYKFWYVVNSSPFEYMMFVLIMLNTLCLAMQHYEQSKMFNDAMDILNMVFTGVFTVEMVLKVIAFKPKGYFSDAWNTFDSLIVIGSIIDVALSEADPTESENVPVPTATPGNSEESNRISITFFRLFRVMRLVKLLSRGEGIRTLLWTFIKSFQALPYVALLIAMLFFIYAVIGMQMFGKVAMRDNNQINRNNNFQTFPQAVLLLFRCATGEAWQEIMLACLPGKLCDPESDYNPGEEYTCGSNFAIVYFISFYMLCAFLIINLFVAVIMDNFDYLTRDWSILGPHHLDEFKRIWSEYDPEAKGRIKHLDVVTLLRRIQPPLGFGKLCPHRVACKRLVAMNMPLNSDGTVMFNATLFALVRTALKIKTEGNLEQANEELRAVIKKIWKKTSMKLLDQVVPPAGDDEVTVGKFYATFLIQDYFRKFKKRKEQGLVGKYPAKNTTIALQAGLRTLHDIGPEIRRAISCDLQDDEPEETKREEEDDVFKRNGALLGNHVNHVNSDRRDSLQQTNTTHRPLHVQRPSIPPASDTEKPLFPPAGNSVCHNHHNHNSIGKQVPTSTNANLNNANMSKAAHGKRPSIGNLEHVSENGHHSSHKHDREPQRRSSVKRTRYYETYIRSDSGDEQLPTICREDPEIHGYFRDPHCLGEQEYFSSEECYEDDSSPTWSRQNYGYYSRYPGRNIDSERPRGYHHPQGFLEDDDSPVCYDSRRSPRRRLLPPTPASHRRSSFNFECLRRQSSQEEVPSSPIFPHRTALPLHLMQQQIMAVAGLDSSKAQKYSPSHSTRSWATPPATPPYRDWTPCYTPLIQVEQSEALDQVNGSLPSLHRSSWYTDEPDISYRTFTPASLTVPSSFRNKNSDKQRSADSLVEAVLISEGLGRYARDPKFVSATKHEIADACDLTIDEMESAASTLLNGNVRPRANGDVGPLSHRQDYELQDFGPGYSDEEPDPGRDEEDLADEMICITTL

SEQ ID NO: 438 - DNA, 2553 bp, Homo sapiens
ttttttcctaggccagcgggcggttgtctgtggctccgcgactgggcgccccgtcacggaggtgcatttgttgaaattttcagtgctcaaggaaaaaatcctggagcaaaatggaagatccttggtagtccatctgtgatttggaaagagtttgataaagaagttaaaagttttgtgtttgtcctggaaggcagcagccaaacaaacaaaattcagttaccaaaggagaataagcaaagccttggattgatccagaggtttcttgtacttcagatttacgtacccctgggacaagacttctccactgaattgctaattactgatttagggaacatcaaaagaagattatatttatcaacggtccataaggaactatcctccacccctcttcatgcaaaaattccactcttcatgatcaaacgtaaaatttggtgcaatctatgcattgacttagtagcattcaccagtgaaatattcaagggggcagttttccagtcattggatggaattgttgtctcagctaactgtaagctacggaagatcttcaccttaaaatcaaagccacaagacactgctgataaggatgctgtctatggtgttcccttttcaacagatgagcctacagatattataccacgaagctgtcaactaatgacagatgttccacatgtcacacagctgctaaacatgactaaacttcgccaaactgaaataaaattcggaggccatcctctaagatcagcagaatcagatcagttcattaacagaggaacaagtattacacggaacagtaaaaatcaagatgtttgtcatatcgcatttggatccaaagttcttgggccacctccactctctggcagaaggaataacatgaagatatccagcgagacagtgagatccgttgggtccaaaaataaccgatcatgccagccgtccactgtagagaagtgtgttaatggtacagaaatgtcagccttgctgatacctgagtctgaggaacaaggaaataaagaaaatattcaccaaataaagcagactgtacctattcatgcagccaatctacatattatgcatccgcatccccctcaagaaccatcagcagataagaataataacagaagaagattacggttaaaaagtaccagcagagaaaggacagagacacccagcggtagctcttcaggaaataataggattgaagataaagcatcaactatcctcaccactgtgtcccaacaaggagcagagctgttgaactccggcactctaggaccccagtctcctgatcaatcagatgagtggatttttcctgaaaatgctgatcacatttcatatctggcatccagcagacagtctctacttctgggtgatgactcctgcaacccatcacacctgtggctggaagccagcaaagagagtgaacacgaccagcaggcagaggaatcccagagtgttccaaaggacattttcactttttcatcaagaccacgatcagcacctcatggaaagactcagactatgtccccagaggagctctcatttattttggatctaaaagaggataacagtgtgacaagcagagacacccaatcagaggatgatttttacggcggcgacagcagtgaagaggaatatgactggcgaaactatcagccaagccagatgagtgaatccgagttacagatgctagcaagcctacggtggcaacaaaatgaagaactggaggatgctgggacctcccatggcctgagtgcctcccaggtggacaactgtaatgtcagcataagtaccagcagtgacgacacaaccacctggaactcctgcctgccaccccctgtcaaccagggtcgccactatcagaaagaaatgaacccaccttctccttctaatccccgggactggttaaatatgttgagcccaccaatcgttcctcccagtcaacagccggctgagcagcgtccagattcctgtgaaagtttgagtgttcaaggtgaagaagacctcagtgtggaagaggacgaggaagtactgactttgttgtatgacccttgtctgaactgttactttgacccccaaacagggaaatactatgagttggtataatgcctccttccggggcagagagcaggcactcccagctggagcagaatagcagttcagggtcgcttaaggagtcaccacaacttatgtgttgggtgaccacaaaatcaacagtaactgagagaaacgaattcattttgtaaataatgttcaacgttaagaatacctatattccttttgtagatgagtatgattttgaaactgaagaaattaatacagaggcaagattttaggagtttgaattggttcttgtttgttctcattctacatataattttgtttatttcagataattttatgtaaacaaattaagagttattcattcaaattttttgcagtgttaatctgtaaatgatggcttgatgtacagaaaatgtatttttgcttaaaagatgcctgggtaccttttattttatggcatttgtattaaaaataaagtatgatggtaagaag

SEQ ID NO: 439 - protein, 563 aa, Homo sapiens
MIKRKIWCNLCIDLVAFTSEIFKGAVFQSLDGIVVSANCKLRKIFTLKSKPQDTADKDAVYGVPFSTDEPTDIIPRSCQLMTDVPHVTQLLNMTKLRQTEIKFGGHPLRSAESDQFINRGTSITRNSKNQDVCHIAFGSKVLGPPPLSGRRNNMKISSETVRSVGSKNNRSCQPSTVEKCVNGTEMSALLIPESEEQGNKENIHQIKQTVPIHAANLHIMHPHPPQEPSADKNNNRRRLRLKSTSRERTETPSGSSSGNNRIEDKASTILTTVSQQGAELLNSGTLGPQSPDQSDEWIFPENADHISYLASSRQSLLLGDDSCNPSHLWLEASKESEHDQQAEESQSVPKDIFTFSSRPRSAPHGKTQTMSPEELSFILDLKEDNSVTSRDTQSEDDFYGGDSSEEEYDWRNYQPSQMSESELQMLASLRWQQNEELEDAGTSHGLSASQVDNCNVSISTSSDDTTTWNSCLPPPVNQGRHYQKEMNPPSPSNPRDWLNMLSPPIVPPSQQPAEQRPDSCESLSVQGEEDLSVEEDEEVLTLLYDPCLNCYFDPQTGKYYELV

SEQ ID NO: 440 - DNA, 1095 bp, Homo sapiens
tccccgctctgctctgtccggtcacaggactttttgccctctgttcccgggtccctcaggcggccacccagtgggcacactcccaggcggcgctccggccccgcgctccctccctctgcctttcattcccagctgtcaacatcctggaagctttgaagctcaggaaagaagagaaatccactgagaacagtctgtaaaggtccgtagtgctatctacatccagacggtggaagggagagaaagagaaagaaggtatcctaggaatacctgcctgcttagaccctctataaaagctctgtgcatcctgccactgaggactccgaagaggtagcagtcttctgaaagacttcaactgtgaggacatgtcgttcagatttggccaacatctcatcaagccctctgtagtgtttctcaaaacagaactgtccttcgctcttgtgaataggaaacctgtggtaccaggacatgtccttgtgtgcccgctgcggccagtggagcgcttccatgacctgcgtcctgatgaagtggccgatttgtttcagacgacccagagagtcgggacagtggtggaaaaacatttccatgggacctctctcaccttttccatgcaggatggccccgaagccggacagactgtgaagcacgttcacgtccatgttcttcccaggaaggctggagactttcacaggaatgacagcatctatgaggagctccagaaacatgacaaggaggactttcctgcctcttggagatcagaggaggaaatggcagcagaagccgcagctctgcgggtctactttcagtgacacagatgtttttcagatcctgaattccagcaaaagagctattgccaaccagtttgaagaccgcccccccgcctctccccaagaggaactgaatcagcatgaaaatgcagtttcttcatctcaccatcctgtattcttcaaccagtgatcccccacctcggtcactccaactcccttaaaatacctagacctaaacggctcagacaggcagatttgaggtttccccctgtctccttattcggcagccttatgattaaacttccttctctgctgcaaaaaaaaaaaaaaa

SEQ ID NO: 441 - protein, 147 aa, Homo sapiens
MSFRFGQHLIKPSVVFLKTELSFALVNRKPVVPGHVLVCPLRPVERFHDLRPDEVADLFQTTQRVGTVVEKHFHGTSLTFSMQDGPEAGQTVKHVHVHVLPRKAGDFHRNDSIYEELQKHDKEDFPASWRSEEEMAAEAAALRVYFQ

SEQ ID NO: 442 - DNA, 3275 bp, Homo sapiens
atggccactgcctcaccaaagtcagatactactaataaccacagtggaaggttgcagttacaggtaactgtttctagtgccaaacttaagagaagaaagaactggttcggaacagcaatatatacagaagtagttgtagatgaggaaattaggaaaacagcaaaatccagtagttcttctaatctaaaatgggatgaacagctaactgtaaatgttacgccacagactacattggaatttcgagtttggagtcatcacactttaaaagcagatgcttaattaggaaatgcaacgacagatctgaaacaagctctgttgatacacaatagaaaactggaaagagtgaaagaacaattaaaactttccttagaaaacaagaatggcatagcacaaactggtgaattgacagttgtgcttgatggattggtgattgagcaagaaaatataacaaactgcagctcaactccagccatagaaatacagcaaaatggtgatgccttacatgaaaatggagagccttcagcaaggacaactgccaggttggctattgaaggcacgaatggaatagataatcatgtacctacaagcactctagtccaaaactcatgctgctcgtatgtagttaatggagacaacataccttcatctccatctcaggttgctgccagacccaaaaatacaccagccccaaaactactcacatctgagcctgccgatgacactgttaatggagaatcatcctcatttgcaccaactgataatgcttctgtcatgggtattccagtagtgtctgaagaaaatgccttgtctccaaattgcactagtactactgttgaagatcctccagttcaagaaatactgacttcctcagaaaacaatgaatgcattccttctaccagtgcagaattgggatctgaatctagaagtatattagaccctgacacctctaattctggaagtagttctgcttttgaaacagccaaatcaagacagccagatgggtgtatggatccagtatagcaggagtctgggaatgccaacacagaaaccttgccatcagggtgggaacaaagaaaatatcctcatggtagaacctattatgtggatcataatactcaaactaccacacgggagagaccacaacctttaccttcaggttgggaaagaagagttgatgatcgtggaagagcttattatgtggatcataacaccagaagaacaacatggcagcggcctaccatggaatgggtcagaaattttgaacagtggcaatctcagcagaaccaacctcagggagctatgcaacagtttaaccaatgatacctctattcagcttcaatgttagccgcagaaaatgaccctcatggacctttgccaccaggccgggaaaaaagagtggattcaacagacagggtttactttgtgaatcgtaatacaaaaacaacccagtgggaagatccaagaactcaaggcttacagaatgaagaacctctgccagaaggctgggaaataagatatactcgtgaaggtgtaaggtactttgttaatcacaatgcaagaacaacaacattcaaagatccttgcaatgggaagtcatccataactaaaggtggtccacaaattgattatgaacacagctttaggcggaaacttgctcacttccgttatttgtgccagtctaatgcactacccagtcatgtaaagatcaatgtgtcccggcagacattgtttgaagattccttccaacagattatggcattaaaaccttatgacttgaggaggtgcttatatgtaatatttagaggagaagaaggacttgattatggtggcctagcaagagaatggcttttcttgctttcacatgaagttttgaacccaatgtaatgcttatttgagtatgtggggaagaacaactattctctgcagataaatccagcatcaaccattaatccagaccatctttcatactactgtttcattggtcgttttattgccatggcactatttcatggaaagcttatagatactggtttctctttaccattctacaagcatatgttaagtaaaaaacttactattaaggatttggaatctattgatactgaattttataactcccttatctggataagagataacaacattgaagaatgtggcttagaactgtacttttctgttgacatggagagttggggaaaagttacttcacatgacctgaagttgggagtttccaatattctggtgactgaggagaacaaagatgaatatattggtttaatgacagaatggcatttttctcgaggagtacaagaacagaccaaagctttccttgatggttttaatggagttgttcctcatcagtggctacagtacttcaatgaaaaagaattagaggttacgttgtgtggcacacagcaggttgacttggcagattggcagagaaatactgtttatcaacattatacaagaaacagcaagcaaatcattcggttctggcagtttgtgaaagagacagacaatgaagtaagaatgctactattgcagttcgtcactggaacctgccgtttatctctaggaggatttgctgagctcatgggaagtaatgggcctcaaaagttttgcattgaaaaagttggcaaagatacttggttaccaagaagccatacatgttttaatctcttggatctaccaccatataagagttatgaacaactaaaggaaaaacttctttttgcaatagaagagacagagggatgtggacaagaatgaatgtggcttcttattttggaggatctcttgcattcaaataccccagccaagaaaaattgcacatagtgtatataagctgttcattctgtacagtgaattttctgaacctctcaaagtatgttttccattcttccacagcaatatgcaaaacatatttcatccttttctactttatttgttgtcctttgaaatgattgaccaggaaaaagatcatccttaaattttgaagcaagtgagagactttattaaaaatacatatgtatctatataagcatatgtgatagtggctctagttttatagagttgcaagtgtattaaacatgacagctgttcattcataaagatctggatttgctttaccttgttaatattatctaggcgaaaaagtgcaaattgctccatgttcttctctcccttgtgtaacatctcctgagggtgtttatttgtatgtctgttcaggaaggtattaagggcttaggccaaatcttactttgagtatgttaaaa

SEQ ID NO: 443 - DNA, 2107 bp, Homo sapiens
gagcctgagactccgggcagggctgctccctcctctgctcccccgccagatccgcggggaaggaatcgtgcccgcgccgcccctggcccgcgccaccttcctttggtttctgccggcctcgggcttctgcggcccgatgtggcaggcgccgcgagagaggcagcagccggctggagcagcggcccctcaggtctcggagcccggtgcgcctctgcggtcgtcgctcctgggcctcggcgggtcactcttgccggccggcttcgctgcgggtttgcactgcccggcatttgcaagtgaggaagcagcacaaccctgggttttagataatttctaacagagaggccccagcaattcagcaggcagcgtcctgagtctttggcagcctggtccctctttcgcaaattctccacctttgcgaacagagggtctttaggacacagattcttaaaagtgcaggtgagccagccatgagagggtatcttgtggccatattcctgagtgctgtcttcctctattatgtactgcattgcatattatggggaacgaatgtctattgggtggcacctgtggaaatgaaacggagaaataagatccagccttgtttatcaaagccagcttttgcctctctgctgaggtttcatcagtttcacccttttctgtgtgcggctgattttagaaagattgcttccttgtatggtagcgataagtttgatttgccctatgggatgagaacatcagcggaatattttcgacttgctctttcaaaactgcagagttgtgatctctttgatgagtttgacaacataccctgtaaaaagtgtgtggtggttggtaatggaggagttttgaagaataagacattaggagaaaaaatcgactcctatgatgtaataataagaatgaataatggtcctgttttaggacatgaagaagaagttgggagaaggacaaccttccgacttttttatccagaatctgttttttcagatcctattcacaatgaccctaatacgacagtgattctcactgcttttaagccacatgatttaaggtggctgttggaattgttgatgggtgacaaaataaacactaatggtttttggaagaaaccagccttaaacctgatttataaaccttatcaaatccgaatattagatcctttcattatcagaacagcagcttatgaactgcttcattttccaaaagtgtttcccaaaaatcagaaacctaaacacccaacaacaggaattattgccatcacattggcgttttacatatgtcacgaagttcacctagctggttttaaatacaacttttctgacctcaagagtcctttgcactactatgggaatgccaccatgtctttgatgaataagaacgcgtatcacaatgtgactgcagagcagctctttttgaaggacattatagaaaaaaacctcgtaatcaacttgactcaagattgactctacagactcagaagatgatgctaacagtgttagttttatttttgtactgcaatttttagtttaaaatatgttggatgcactcgtcaaataattatgtatactgtctgttgctgcctggtgattcataaccaccagcttaatttctgtgaatactgtatatttaacttatgaaaaccaagaaatgtaaagataacaggaaaataagttttgattgcaatgtttttaaaataagctagttttctgaggtgttttcacacgtctttttatagttacttcatcttagatttttgaagggatatgacttcctactaaggatttagtttaccacaacaattctgactacaataagacattttgaggaggatatttggctactgtaaacatggctggtggaaaatcacgattgtggcttgatgtggcaagccgaaaccacttggctctggaaatctaagttcatactggtttaattaagctctctcctgacaacccccagaattaaatgaaccatgattgtgaagagtaatttggtacaatgaaggcagtgtttgtttttaagttaaaggaaatgggctaaacataaagttcttattagataagtaaataactaaagaaagaatacaattactaaaaaaaaaaaaaaa

SEQ ID NO: 444 - protein, 331 aa, Homo sapiens
MRGYLVAIFLSAVFLYYVLHCILWGTNVYWVAPVEMKRRNKIQPCLSKPAFASLLRFHQFHPFLCAADFRKIASLYGSDKFDLPYGMRTSAEYFRLALSKLQSCDLFDEFDNIPCKKCVVVGNGGVLKNKTLGEKIDSYDVIIRMNNGPVLGHEEEVGRRTTFRLFYPESVFSDPIHNDPNTTVILTAFKPHDLRWLLELLMGDKINTNGFWKKPALNLIYKPYQIRILDPFIIRTAAYELLHFPKVFPKNQKPKHPTTGIIAITLAFYICHEVHLAGFKYNFSDLKSPLHYYGNATMSLMNKNAYHNVTAEQLFLKDIIEKNLVINLTQD

SEQ ID NO: 445 - DNA, 4533 bp, Homo sapiens
cactgggagacagtccacttaaatgcagctccagggttgcgaggcacccaccagcatcattccccatgcgaggtggcaaatgcaacatgctctccagtttggggtgtctacttctctgtggaagtattacactagccctgggaaatgcacagaaattgccaaaaggtaaaaggccaaacctcaaagtccacatcaataccacaagtgactccatcctcttgaagttcttgcgtccaagtccaaatgtaaagcttgaaggtcttctcctgggatatggcagcaatgtatcaccaaaccagtacttccctcttcccgctgaagggaaattcacagaagctatagttgatgcagagccgaaatatctgatagttgtgcgacctgctccacctccaagtcaaaagaagtcatgttcaggtaaaactcgttctcgcaaacctctgcagctggtggttggcactctgacaccgagctcagtcttcctgtcctggggtttcctcatcaacccacaccatgactggacattgccaagtcactgtcccaatgacagattttatacaattcgctatcgagaaaaggataaagaaaagaagtggatttttcaaatctgtccagccactgaaacaattgtggaaaacctaaagcccaacacagtttatgaatttggagtgaaagacaatgtggaaggtggaatttggagtaagattttcaatcacaagactgttgttggaagtaaaaaagtaaatgggaaaatccaaagtacctatgaccaagaccacacagtgccagcatatgtcccaaggaaactaatcccaataacaatcatcaagcaagtgattcagaatgttactcacaaggattcagctaaatccccagaaaaagctccactgggaggagtgatactagtccaccttattattccaggtcttaatgaaactactgtaaaacttcctgcatccctaatgtttgagatttcagatgcactcaagacacaattagctaagaatgaaaccttggcattacctgccgaatctaaaacaccagaggttgaaaaaatctcagcacgacccacaacagtgactcctgaaacagttccaagaagcactaaacccactacgtctagtgcattagatgtttcagaaacaacactggcttcaagtgaaaagccatggattgtgcctacagctaaaatatctgaagattccaaagttctgcagcctcaaactgcaacttatgatgttttctcaagccctacaacatcagatgagcctgagatatcagattcctacacagcaacaagtgatcgtattctggattctatcccacctaaaacttctagaactcttgaacagccaagggcaacactggctccaagtgaaacaccatttgttcctcaaaaactggaaatctttaccagtccagaaatgcagcctacgacacctgctccccagcaaactacatctatcccttctacacctaaacgacgcccccggcccaaaccgccaagaaccaaacctgaaagaaccacaagtgccggaacaattacacctaaaatttctaaaagccctgaacctacatggacaacaccggctcccggtaaaacacaatttatttctctgaaacctaaaatccctctcagcccagaagtgacacacaccaaacctgctcccaagcagacaccacgtgctcctcctaagccaaaaacatcaccacgcccaagaatcccacaaacacaaccagttcctaaggtgccccagcgtgttactgcaaaaccaaaaacgtcaccaagtccagaagtgtcatacaccacacctgctccaaaagatgtgctccttcctcataaaccataccctgaggtctctcagagcgaacctgctcctctagagacacgaggcatcccttttatacccatgatttccccaagtcctagtcaagaggaactacagaccactctggaagaaacagaccaatccacccaagaacctttcacaactaagattccacgaacaactgaactagcaaagacaactcaggcgccacacagattttatactactgtgaggcccagaacatctgacaagccacacatcagacctggggtcaagcaagcacccaggccatcaggtgctgatagaaatgtatcagtggactctacccaccccactaaaaagccagggactcgccgcccacccttgccacccagacctacacacccacgaagaaaacctttaccaccaaataatgtcactggaaagccaggaagtgcaggaatcatttcatcaggcccaataactacaccacccctgaggtcaacacccaggcctactggaactcccttggagagaatagagacagatataaagcaaccaacagttcctgcctctggagaagaactggaaaatataactgactttagctcaagcccaacaagagaaactgatcctcttgggaagccaagattcaaaggacctcatgtgcgatacatccaaaagcctgacaacagtccctgctccattactgactctgtcaaacggttccccaaagaggaggccacagaggggaatgccaccagcccaccacagaacccacccaccaacctcactgtggtcaccgtggaagggtgcccctcatttgtcatcttggactgggaaaagccactaaatgacactgtcactgaatatgaagttatatccagagaaaatgggtcattcagtgggaagaacaagtccattcaaatgacaaatcagacattttccacagtagaaaatctgaaaccaaacacgagttatgaattccaggtgaaacccaaaaacccgcttggtgaaggcccggtcagcaacacagtggcattcagtactgaatcagcggacccaagagtgagtgagccagtttctgcaggaagagatgccatctggactgaaagaccctttaattcagactcttactcagagtgtaagggcaaacaatatgtcaaaaggacatggtataaaaaatttgtaggagtgcagctgtgcaactctctcagatacaagatttacttgagcgactccctcacaggaaaattttataacataggtgatcagaggggccatggagaagatcactgccagtttgtggattcatttttagatggacgcactgggcagcaactcacttctgaccagttaccaatcaaagaaggttatttcagagcagttcgccaggaacctgtccaatttggagaaataggtggtcacacccaaatcaattatgttcagtggtatgaatgtgggactacaattcctggaaaatggtagatgctgcacaaagttaccttctgtttcatcattgcaaacaaaaatcattgaaaatactatgccgcattcatttaaagctattttgtttactatgtataaaagtctacaatctaattaatagcaatactagatgtttattattagaaaagattgctgagagtatttatcaggttttacaaagtcattttaagaaagcaagatactgatgttaacagaataacatttttggggaagctggctccctattcatggtattttaagagatcatttgtatattatttatcacactgttgtaatgatgttttgagatacttttataacaaaattaacatcaaaaaggtatatactttttaaaaaaaatttacttttattgatgtgtactcttcctattgatgagttaattccataaatctctacttagtttaacttattggatcaaattatcttcagcatgtatatctggggaaaaaaggtccgaattttcacatttatatttaaacttcaattttttatatttaaacttcaattttttagcaacagctgaatagctttgcggaggagtttaatagttacacattcatgctaatatacatttcctttaaacatccacaaattcttaaaaagattgaatcagtaaatttcatttcagctaaaaatggagtctaatatattgtttcaaaagatacatttttacccaccataaatgttacaatatctgaatatgctttgtcaaactatccctttatgcaatcgtcttcatattgtttttatgattctaatcaagctgtatgtagagactgaatgtgaagtcaagtctgagcacaaaaagataatgcacaatgagattgcctaccattttataggatatttactatgtatttatacgttaagacctctatgaatgaatgtatcagagaatgtctttgtaactaactgtttaattcaatctgtaataaaaatctaactaactaactcatttatttctattaaaaaggtattgtcctttaggcggggaatgggaatccttgctgcactgttgcagtcattctgaaaggacctttccctgtacttacctttcaacatgcttcaatcttatcaacgctacattttgtatttttcaaacaggtataaattctgcaataaagagatgtagtttttttttaaaaaaaaaaaaaaaaaaaaaaaaaaaaaaaaaaaaaaaaaaaaaaaaaaaaaaaaaaaaaaaaaaaaaaaaaaaaaa

SEQ ID NO: 446 - protein, 1075 aa, Homo sapiens
MRGGKCNMLSSLGCLLLCGSITLALGNAQKLPKGKRPNLKVHINTTSDSILLKFLRPSPNVKLEGLLLGYGSNVSPNQYFPLPAEGKFTEAIVDAEPKYLIVVRPAPPPSQKKSCSGKTRSRKPLQLVVGTLTPSSVFLSWGFLINPHHDWTLPSHCPNDRFYTIRYREKDKEKKWIFQICPATETIVENLKPNTVYEFGVKDNVEGGIWSKIFNHKTVVGSKKVNGKIQSTYDQDHTVPAYVPRKLIPITIIKQVIQNVTHKDSAKSPEKAPLGGVILVHLIIPGLNETTVKLPASLMFEISDALKTQLAKNETLALPAESKTPEVEKISARPTTVTPETVPRSTKPTTSSALDVSETTLASSEKPWIVPTAKISEDSKVLQPQTATYDVFSSPTTSDEPEISDSYTATSDRILDSIPPKTSRTLEQPRATLAPSETPFVPQKLEIFTSPEMQPTTPAPQQTTSIPSTPKRRPRPKPPRTKPERTTSAGTITPKISKSPEPTWTTPAPGKTQFISLKPKIPLSPEVTHTKPAPKQTPRAPPKPKTSPRPRIPQTQPVPKVPQRVTAKPKTSPSPEVSYTTPAPKDVLLPHKPYPEVSQSEPAPLETRGIPFIPMISPSPSQEELQTTLEETDQSTQEPFTTKIPRTTELAKTTQAPHRFYTTVRPRTSDKPHIRPGVKQAPRPSGADRNVSVDSTHPTKKPGTRRPPLPPRPTHPRRKPLPPNNVTGKPGSAGIISSGPITTPPLRSTPRPTGTPLERIETDIKQPTVPASGEELENITDFSSSPTRETDPLGKPRFKGPHVRYIQKPDNSPCSITDSVKRFPKEEATEGNATSPPQNPPTNLTVVTVEGCPSFVILDWEKPLNDTVTEYEVISRENGSFSGKNKSIQMTNQTFSTVENLKPNTSYEFQVKPKNPLGEGPVSNTVAFSTESADPRVSEPVSAGRDAIWTERPFNSDSYSECKGKQYVKRTWYKKFVGVQLCNSLRYKIYLSDSLTGKFYNIGDQRGHGEDHCQFVDSFLDGRTGQQLTSDQLPIKEGYFRAVRQEPVQFGEIGGHTQINYVQWYECGTTIPGKW

SEQ ID NO: 447 - DNA, 4293 bp, Homo sapiens
gtttctcatagttggcgtcttctaaaggaaaaacactaaaatgaggaactcagcggaccgggagcgacgcagcttgagggaagcatccctagctgttggcgcagaggggcgaggctgaagccgagtggcccgaggtgtctgaggggctggggcaaaggtgaaagagtttcagaacaagcttcctggaacccatgacccatgaagtcttgtcgacatttataccgtctgagggtagcagctcgaaagtagaagaagtggagtgttgccagggacggcagtatctctttgtgtgaccctggcggcttatgggacgttggcttcagacctttgtgatacaccatgctgcgtgggacgatgacggcgtggagaggaatgaggcctgaggtcacactggcttgcctcctcctagccacagcaggctgctttgctgacttgaacgaggtccctcaggtcaccgtccagcctgcgtccaccgtccagaagcccggaggcactgtgatcttgggctgcgtggtggaacctccaaggatgaatgtaacctggcgcctgaatggaaaggagctgaatggctcggatgatgctctgggtgtcctcatcacccacgggaccctcgtcatcactgcccttaacaaccacactgtgggacggtaccagtgtgtggcccggatgcctgcgggggctgtggccagcgtgccagccactgtgacactagccaatctccaggacttcaagttagatgtgcagcacgtgattgaagtggatgagggaaacacagcagtcattgcctgccacctgcctgagagccaccccaaagcccaggtccggtacagcgtcaaacaagagtggctggaggcctccagaggtaactacctgatcatgccctcagggaacctccagattgtgaatgccagccaggaggacgagggcatgtacaagtgtgcagcctacaacccagtgacccaggaagtgaaaacctccggctccagcgacaggctacgtgtgcgccgctccaccgctgaggctgcccgcatcatctaccccccagaggcccaaaccatcatcgtcaccaaaggccagagtctcattctggagtgtgtggccagtggaatcccacccccacgggtcacctgggccaaggatgggtccagtgtcaccggctacaacaagacgcgcttcctgctgagcaacctcctcatcgacaccaccagcgaggaggactcaggcacctaccgctgcatggccgacaatggggttgggcagcccggggcagcggtcatcctctacaatgtccaggtgtttgaaccccctgaggtcaccatggagctatcccagctggtcatcccctggggccagagtgccaagcttacctgtgaggtgcgtgggaaccccccgccctccgtgctgtggctgaggaatgctgtgcccctcatctccagccagcgcctccggctctcccgcagggccctgcgcgtgctcagcatggggcctgaggacgaaggcgtctaccagtgcatggccgagaacgaggttgggagcgcccatgccgtagtccagctgcggacctccaggccaagcataaccccaaggctatggcaggatgctgagctggctactggcacacctcctgtatcaccctccaaactcggcaaccctgagcagatgctgagggggcaaccggcgctccccagacccccaacgtcagtggggcctgcttccccgcagtgtccaggagagaaggggcagggggctcccgccgaggctcccatcatcctcagctcgccccgcacctccaagacagactcatatgaactggtgtggcggcctcggcatgagggcagtggccgggcgccaatcctctactatgtggtgaaacaccgcaaggtcacaaattcctctgacgattggaccatctctggcattccagccaaccagcaccgcctgaccctcaccagacttgaccccgggagcttgtatgaagtggagatggcagcttacaactgtgcgggagagggccagacagccatggtcaccttccgaactggacggcggcccaaacccgagatcatggccagcaaagagcagcagatccagagagacgaccctggagccagtccccagagcagcagccagccagaccacggccgcctctcccccccagaagctcccgacaggcccaccatctccacggcctccgagacctcagtgtacgtgacctggattccccgtgggaatggtgggttcccaatccagtccttccgtgtggagtacaagaagctaaagaaagtgggagactggattctggccaccagcgccatccccccatcgcggctgtccgtggagatcacgggcctagagaaaggcacctcctacaagtttcgagtccgggctctgaacatgctgggggagagcgagcccagcgccccctctcggccctacgtggtgtcgggctacagcggtcgcgtgtacgagaggcccgtggcaggtccttatatcaccttcacggatgcggtcaatgagaccaccatcatgctcaagtggatgtacatcccagcaagtaacaacaacaccccaatccatggcttttatatctattatcgacccacagacagtgacaatgatagtgactacaagaaggatatggtggaaggggacaagtactggcactccatcagccacctgcagccagagacctcctacgacattaagatgcagtgcttcaatgaaggaggggagagcgagttcagcaacgtgatgatctgtgagaccaaagctcggaagtcttctggccagcctggtcgactgccacccccaactctggccccaccacagccgccccttcctgaaaccatagagcggccggtgggcactggggccatggtggctcgctccagcgacctgccctatctgattgtcggggtcgtcctgggctccatcgttctcatcatcgtcaccttcatccccttctgcttgtggagggcctggtctaagcaaaaacatacaacagacctgggttttcctcgaagtgcccttccaccctcctgcccgtatactatggtgccattgggaggactcccaggccaccaggccagtggacagccctacctcagtggcatcagtggacgggcctgtgctaatgggatccacatgaataggggctgcccctcggctgcagtgggctacccgggcatgaagccccagcagcactgcccaggcgagcttcagcagcagagtgacaccagcagcctgctgaggcagacccatcttggcaatggatatgacccccaaagtcaccagatcacgaggggtcccaagtctagcccggacgagggctctttcttatacacactgcccgacgactccactcaccagctgctgcagccccatcacgactgctgccaacgccaggagcagcctgctgctgtgggccagtcaggggtgaggagagcccccgacagtcctgtcctggaagcagtgtgggaccctccatttcactcagggcccccatgctgcttgggccttgtgccagttgaagaggtggacagtcctgactcctgccaagtgagtggaggagactggtgtccccagcaccccgtaggggcctacgtaggacaggaacctggaatgcagctctccccggggccactggtgcgtgtgtcttttgaaacaccacctctcacaatttaggcagaagctgatatcccagaaagactatatattgttttttttttaaaaaaaaaaagaagaaaaaagagacagagaaaattggtatttatttttctattatagccatatttatatatttatgcacttgtaaataaatgtatatgttttataattctggagagacataaggagtcctacccgttgaggttggagagggaaaataaagaagctgccacctaacaggagtcacccaggaaagcaccgcacaggctggcgcgggacagactcctaacctggggcctctgcagtggcaggcgaggctgcaggaggcccacagataagctggcaagaggaaggatcccaggcacatggttcatcacgagcatgagggaacagcaaggggcacggtatcacagcctggagacacccacacagatggctggatccggtgctacgggaaacattttcctaagatgcccatgagaacagaccaagatgtgtacagcactatgagcattaaaaaaccttccagaatcaataatccgtggcaacatatctctgtaaaaacaaacactgtaacttctaaataaatgtttagtcttccctgtaaccttcaaaaaaaaaaaaaaa

SEQ ID NO: 448 - protein, 1114 aa, Homo sapiens
MLRGTMTAWRGMRPEVTLACLLLATAGCFADLNEVPQVTVQPASTVQKPGGTVILGCVVEPPRMNVTWRLNGKELNGSDDALGVLITHGTLVITALNNHTVGRYQCVARMPAGAVASVPATVTLANLQDFKLDVQHVIEVDEGNTAVIACHLPESHPKAQVRYSVKQEWLEASRGNYLIMPSGNLQIVNASQEDEGMYKCAAYNPVTQEVKTSGSSDRLRVRRSTAEAARIIYPPEAQTIIVTKGQSLILECVASGIPPPRVTWAKDGSSVTGYNKTRFLLSNLLIDTTSEEDSGTYRCMADNGVGQPGAAVILYNVQVFEPPEVTMELSQLVIPWGQSAKLTCEVRGNPPPSVLWLRNAVPLISSQRLRLSRRALRVLSMGPEDEGVYQCMAENEVGSAHAVVQLRTSRPSITPRLWQDAELATGTPPVSPSKLGNPEQMLRGQPALPRPPTSVGPASPQCPGEKGQGAPAEAPIILSSPRTSKTDSYELVWRPRHEGSGRAPILYYVVKHRKVTNSSDDWTISGIPANQHRLTLTRLDPGSLYEVEMAAYNCAGEGQTAMVTFRTGRRPKPEIMASKEQQIQRDDPGASPQSSSQPDHGRLSPPEAPDRPTISTASETSVYVTWIPRGNGGFPIQSFRVEYKKLKKVGDWILATSAIPPSRLSVEITGLEKGTSYKFRVRALNMLGESEPSAPSRPYVVSGYSGRVYERPVAGPYITFTDAVNETTIMLKWMYIPASNNNTPIHGFYIYYRPTDSDNDSDYKKDMVEGDKYWHSISHLQPETSYDIKMQCFNEGGESEFSNVMICETKARKSSGQPGRLPPPTLAPPQPPLPETIERPVGTGAMVARSSDLPYLIVGVVLGSIVLIIVTFIPFCLWRAWSKQKHTTDLGFPRSALPPSCPYTMVPLGGLPGHQASGQPYLSGISGRACANGIHMNRGCPSAAVGYPGMKPQQHCPGELQQQSDTSSLLRQTHLGNGYDPQSHQITRGPKSSPDEGSFLYTLPDDSTHQLLQPHHDCCQRQEQPAAVGQSGVRRAPDSPVLEAVWDPPFHSGPPCCLGLVPVEEVDSPDSCQVSGGDWCPQHPVGAYVGQEPGMQLSPGPLVRVSFETPPLTI

SEQ ID NO: 449 - DNA, 3996 bp, Homo sapiens
gcctcgtgggagtggtggttcgacggtgtcctatgcctgctttccttgcgggcggaggaactacaattcccagcgtgacccggaggcagcccgggcagaagggcggttgctgcagctttggccgaggttcgggctcgaacttggaaaatgctcctggcgcctcagggaaggtccttctcaaagaaaaggatggggctgaatcgctggaaacggttcacaaggaagccgagtcccaagcctacttttggtcctgacagtgtggaacactggataaagagagtggagaaagcctcagagtttgcagtgtcaaatgcattttttactagaaattcagatttacctagaagtccctggggccaaatcacagatttgaaaacatctgagcaaatagaggatcatgatgaaatctatgcagaagctcaggagctggtcaatgactggttagacaccaaacttaagcaagaattagcaagtgaggaagaaggtgatgctaaaaacactgtgtcaagtgtcactattatgccggaagccaatggccatttgaaatatgacaagtttgatgatttatgtggctatttggaggaagaagaggaaagtaccaccgttcaaaaatttatagaccatctgctccataaaaatgtggtagattctgcaatgatggaagatcttggaaggaaggaaaaccaagacaagaagcagcagaaggatcctcgtcttaccatggagatgagacataagcaggtaaaagaaaatcgcttaagacgtgagaaagaactggagtaccagagaatagaaaagaccctgaaaaaatcggccttcttggaggctcagtgtctggtgcaagaagagaagaaaaggaaggctctggaggccaagaaagaggaagaggagattcaaagggagatggtgaagctgcggagggagataattgagaggagacgcactgtgaaagcagcatggaaaatagagaagaaaaggcaagaagagaattctcaaaatagttcagaaaaagtcatgtttcaaagtactcacattcttccagatgaggaaaaaatggtgaaggaaagaaaaaggaaattgaaagaagtattaatccaaactttcaaagaaaatcaacagtgtcaaaaacggtatttcgctgcctggcacaagctgattcttgatcataggattaagctggggaaagctgggaccctgtctgactggaagattcagctgaaggtcctgcgggcctggagagactacacaagattccagaagttggagcgggagactcaagccttggaaaatgatcttagggaagaaaacagaaaacaacaactggccactgagtataaccggaaacaagttctccgacactgctttacagaatggcagcattggcatggcgccgagctcctgaagagagagctggctctcacaaaagaggaaactaggaagaagatggatgcactgctgcaggcagcatcactggggaaactcagtgccaatgggttatcaggcatcagtctacctgaggaggcaacagccatggtgggtccaccagtaaaaaatggacaggagactgctgtgccccctttgtgggaaaagcctcccttgggaagcagtggttgtatgctcagtcctcccctgggaagaacaacaacaggcaacttgcagggttcccttcagaatgtctctctgagtgcacctggcaataagcagcacaagaccctgggtgctgaaccctctcaacagcctggcagcaacgagacactcagaactaccagccagaaagcagaaccgctttgcttgggtcatttccacaaccgccatgtcttccagcaacagctgattgagaagcaaaagaagaaacttcaggaacagcagaaaacaattctcgagctgaagaaaaacctgcagctggcagaggctcagtgggcagcagagcatgccttagcagtcacagaagcacagagccacctgctgtcaaagcccagagaagaggaaccaagaacctgccagatgcttgtgaattcacctgttgcttcccctgggactgaaggcagaagtgactcccgaaattctctttctggactcagaaggaaaccaaagcaattgatgacaccgcatcccatactaaaagctatggaagagagagcaattcaacgagctgaatgtaggcggatcttggcagagaagaagaaaaaacaagaagaagaaaaattggcccagttaaaggcccaagaggaggaacgtcagaaaagggaggcagaagaaaaggaggcacagcttgaaagaaaacgagaagagaagagactgaagaaaatgaaagaacttgagaagcagaagagaattaagaggaaccagcagctggaagcaatagccaaagaacattatgaaagggtcttgctaaggaaaaaaggtctagagccttggaagagattgagaatgcaaagcaaacaaaacatccaggtggcagaagaacattactctttgttcctgcagaggaaatacatgctgacgtggttccagcgtagtcaggaaagtctggctagaaagatggcccaggctgatcaattttattcccaaatactgcttaagagagtcatccagagctggctacagtacgtgattgatctgcaggaagaagtaagaaaattttgtgtacattttcttcaaaagaagattttcagggcctggtttaacatggtcagggaggtgaagatcgattctcagggcaagcatgagattgcagcggagcacagtgacaggaggatcctctggatcacccttcggacatggaagaagtttgtaaaatttatgaaagaggaaagagtaaaagaagaaaggcgacagcaacttcgtaggaaggtagttgaaattcttccagacttccaggtacctggaaggtaccacgagctatatcagcaatcagatacttggtccttgagtaagacaagtctggtgaacgaatgagccagattagtgtaatatttaggacaggaagctcgactagtctgtatgtgtgttatctccacccacccacacacatacatacatacacctggtttattctctacgagctacttcttagatcaaaggaattattttgagaatttttattcccttctttgacttttcctggattgctagtcattcactatagcatttatcacagtgggatcatccaaaggaacattctagagatcgtctgttcaaatatatcctatatatttttagcatagtaaactttaaaaaggacaagtgtttgcctgactgagcctgtgaagaaaatgtgtccgtatagcacgacaggagttgctgatgtgaccttaatgaaacagaaataaacaggggtgagtgctcggaaaggaagggcgggccaaggcactcagccttctagtgcagtagcatcagtgacacgcaccccaccagacctcgtccactttcaccacccctgaaggcagaccatgtatgaaaaggttctctacacagctgctgcagaggacagcagcttatcctgatttcagagaaactgaggcaccagagatgcttctcttccgtgcaccttgataagcatgaaggacattccaaaaggtaataactctatcatgacagtccagcaattcattaaattatctgttcatgctcccacctgcaactgctgaataatacactcagtttgtcttctagtactcagctcagtttgatctagatattgagatacctatcttgaattcaaagaatgttttcatctttaagatgctataaagactgataaaatgctctcttctatgaattgtgttagagaattacctgctagaaaaataatttttcattataaaatacacatttattatataacaaattcaagtagtccataaatgcatatggtaaaatgagaaagtcctgtgcagtcctgagatgattactcttatttggtgtgctgaaaatttgagttgacaaaataaaattctgtggttttttaagtgaaaaaaaaaaaaaaaaaaaaaa

SEQ ID NO: 450 - protein, 936 aa, Homo sapiens
MLLAPQGRSFSKKRMGLNRWKRFTRKPSPKPTFGPDSVEHWIKRVEKASEFAVSNAFFTRNSDLPRSPWGQITDLKTSEQIEDHDEIYAEAQELVNDWLDTKLKQELASEEEGDAKNTVSSVTIMPEANGHLKYDKFDDLCGYLEEEEESTTVQKFIDHLLHKNVVDSAMMEDLGRKENQDKKQQKDPRLTMEMRHKQVKENRLRREKELEYQRIEKTLKKSAFLEAQCLVQEEKKRKALEAKKEEEEIQREMVKLRREIIERRRTVKAAWKIEKKRQEENSQNSSEKVMFQSTHILPDEEKMVKERKRKLKEVLIQTFKENQQCQKRYFAAWHKLILDHRIKLGKAGTLSDWKIQLKVLRAWRDYTRFQKLERETQALENDLREENRKQQLATEYNRKQVLRHCFTEWQHWHGAELLKRELALTKEETRKKMDALLQAASLGKLSANGLSGISLPEEATAMVGPPVKNGQETAVPPLWEKPPLGSSGCMLSPPLGRTTTGNLQGSLQNVSLSAPGNKQHKTLGAEPSQQPGSNETLRTTSQKAEPLCLGHFHNRHVFQQQLIEKQKKKLQEQQKTILELKKNLQLAEAQWAAEHALAVTEAQSHLLSKPREEEPRTCQMLVNSPVASPGTEGRSDSRNSLSGLRRKPKQLMTPHPILKAMEERAIQRAECRRILAEKKKKQEEEKLAQLKAQEEERQKREAEEKEAQLERKREEKRLKKMKELEKQKRIKRNQQLEAIAKEHYERVLLRKKGLEPWKRLRMQSKQNIQVAEEHYSLFLQRKYMLTWFQRSQESLARKMAQADQFYSQILLKRVIQSWLQYVIDLQEEVRKFCVHFLQKKIFRAWFNMVREVKIDSQGKHEIAAEHSDRRILWITLRTWKKFVKFMKEERVKEERRQQLRRKVVEILPDFQVPGRYHELYQQSDTWSLSKTSLVNE

SEQ ID NO: 451 - DNA, 4008 bp, Homo sapiens
aggcagtgattttggggcagagaattttgcaacacgtggtagtgaactgtgaggagtttgaggggtctgaagactgaaagagtcgaatggtttgttggcagggtgtcctggtggattggtttctgtaagttcagattctcataaatcgtgtgagcgtcgccgacacctctgagataaaagggcccctttcgactagcctctgctgaaaggacctagaagaatcccttaggatgaagctgagtcttaccaaggtagttaatggctgtcgcctaggaaaaataaaaaacctgggcaaaacaggggaccacaccatggatattccaggctgccttctgtataccaagactggctccgccccacacctcacccatcacacgctgcataatatccacggggttcctgccatggctcagcttacgctgtcatccctagcagaacatcatgaagtcttgacagaatataaagaaggagttggaaagtttataggcatgccagaatcactcttgtactgctccctgcacgatccagtcagcccctgcccggctggttatgtaacaaacaagtctgtgtctgtgtggagtgttgcaggacgagtggaaatgactgtttccaagttcatggcaattcagaaggcccttcagccagactggttccagtgcctctccgatggagaagtatcttgtaaggaagcaacttccataaaaagggtcagaaagtctgttgaccgatcacttcttttcttggataactgtctgcggctgcaggaagagtcagaggttcttcagaagagtgtgatcattggagtgattgaaggtggagatgtgatggaagagaggctgaggtcagcacgagagacagccaagcggcctgtgggtggcttccttctggatggttttcaaggaaatccaacaaccctggaggctagactacgcttgctgtcatcagtcactgcagagctgccggaggacaagccaaggctcatatctggtgttagtcggccagatgaggtgctcgagtgtattgaaagaggagtggacttatttgagagttttttcccttatcaagtaacagagcggggatgtgccctgactttcagttttgattaccagccgaatcctgaagagacactactacaacaaaatggaacacaagaagaaataaaatgtatggatcaaataaagaaaattgaaacaactggttgcaaccaagaaataacatcatttgaaattaatctgaaggaaaaaaagtaccaggaggactttaacccgctggtgagaggatgttcctgttactgctgtaagaatcacactcgggcatacatccaccatctgctggtgaccaatgagctgctggccggagtcctgcttatgatgcacaactttgaacactactttgggtttttccattacatccgggaagcactaaaaagtgacaaactggcacagttgaaagagctcatccacaggcaagcatcttgagatcttgcaaatacaagtctcactcttcacactgagcctgtaccactgttgtaacatgggaagacgtgaagaagaaataatctgagctttaattatttatatttggatataaggtctgcttaaataaagaatctttgtaccaaactgcccacatgagggtgaagagatttcctcaaaagacttaaatgacctggattgatcagagagaattgaactgtgacctttaagacttctagactaattcttttagttgatagagattcatttagtcaaagacaaaagctttaactgtgagggcacagccttgaagtgggagtgatgagattctgagggacccatgaattggattgaggcttgaggggaaatggtgtgagacgaatgggctctggacatatgcctgttgatttgagaagaaatctggctggtttgagggtttcctttagttcaccctcatactctcaggagactcttctggatacttttgtcttccaccctgccctggcagtgcagccaatcagaaatggctcttgtgacttaactgggcttggatatccctggaatgtggggcttgaacattgctcctgtgatgatcatctgtcccaggtcacactccttcatttgaccacatggcctatttgcaacttctttttagagccaatgtaattgcctgttaggagccagaagtttgcccagctgctttcttctggttgtacagatccattgtggtctgccttccaggctcattaatagtctaactacgtaataactgaagacctatctcttgtgaagattcattctcaatgtgttcacttggacagagccctgcctggcctaacgattagagggttagtctccatcctgctcagatatgactcctgggcaattcacttaacttctccatggctgcttcctgctgaataaatagggacaggcataatggataggaatgaatgaacttttaagatactgtctagctctaaaattggaagaacaaaaagttttagattagagtcatagccttaatagccctagttgtcatcctgggagacaggcaacagtagagatatttgagagcctaaagagaggtttggcctgtgggtttttaagtggttattgaattggtatcaggagatcctgaggctggtaggggaaggtaattctttctaagttacctctgtatttttcaagttttctataaggaatacacatacacccacatgcacacaccatagtttttatacaaacagcaataacaaaaccaaaaagatgcccctttttttgtagggataagaaatacatttgttttatacttctatgctatattttgctattcaaaatttagtgggcattacttaacattgtttctaattattttgtggctgctgtatgttttatgtgttgggagcccattgtattaggccgttcttggattgctataaagaaatacctgagactgggtaatttggttttttggttttttggggttttttttgagacggagccttgctctgtcgcccaggctggagtgcagtggcgcgatctcggctctatgcaacctccacctcctgggttcatgccattctcctgcctcagcctcccgtgtagctgggactacaggcgcccgccaccatgcctggctaattttttatatttttagtagagatggggtttcaccgtatgagccaggatggtctcgatctcctgacctcatgatccacaagactgggtaatctgtaaagaaaagaggtttaattggctcatggctctgcaggctttacaggaagcatggtactggcatctgcttggtttctggggaggcctccggaagcttatagtcatgacagaaggtgaagggggagcaggcacatcacatgacaaaagcaggaacaagactcagagcaagaagtcacttatcaccaaggggatggcccaggccattcatgagggatccacctttgtgctccaaacacctcccaccaggccccacctccagtattggggattacatttcaacttgaggtttgggcgggaacaaatagtcaaattatattacccatctacatggttttctttttcttagtatgggagtgtccatgaataaattcatgggcatcctcataactcttccatgaatggcaaggggtacttatggaaaacagttttccaaagatctgattgttttgaaatgtgttagattggacttgttcaaatgttcatatttttgttctatgctaaatgcatcgttaggggagtagtggtaaatattccagaatccatatgaaattcatgagtttatttatgtctaaaacactgaaaactgtgtccaatatcgttcagtttcctgggtctttttcttattagcacatttgagaaaaatattcctttcctttattgtagtaaatctattaaaggcaatagccaataaaacatttttaattttaaaaatttactgtgtttggctttctgtaaatgtagtaggtctgttaaacaaaatattaaatttccatagtaccagaaaaaaaaaaaaaaa

SEQ ID NO: 452 - protein, 415 aa, Homo sapiens
MKLSLTKVVNGCRLGKIKNLGKTGDHTMDIPGCLLYTKTGSAPHLTHHTLHNIHGVPAMAQLTLSSLAEHHEVLTEYKEGVGKFIGMPESLLYCSLHDPVSPCPAGYVTNKSVSVWSVAGRVEMTVSKFMAIQKALQPDWFQCLSDGEVSCKEATSIKRVRKSVDRSLLFLDNCLRLQEESEVLQKSVIIGVIEGGDVMEERLRSARETAKRPVGGFLLDGFQGNPTTLEARLRLLSSVTAELPEDKPRLISGVSRPDEVLECIERGVDLFESFFPYQVTERGCALTFSFDYQPNPEETLLQQNGTQEEIKCMDQIKKIETTGCNQEITSFEINLKEKKYQEDFNPLVRGCSCYCCKNHTRAYIHHLLVTNELLAGVLLMMHNFEHYFGFFHYIREALKSDKLAQLKELIHRQAS

SEQ ID NO: 453 - DNA, 443 bp, Homo sapiens
atggagggcgtggagacaagggcggggcttgctcaagagttgcagaggaagtgcgccctcgacatgccagagccaacaaagtccgctcctgatcccaattagggctccaagaggtgggtgactacggcgcagaagaaggacggcaagaaaccaagcgcagccgcaaggcgagctactccgtgtacttgcacaaggtgctgaagcaggtccactctgacaccggcatctcctctaaggccatggggatcatgaactccttcgtcaacgacatctttgagcacgtcgcgggcgaggcttcccgcctggcgcattacaacaagcgctcgaccatcacctccagggagatccagacggccgagcgcctgctgctgcccgaggaggtggccaagcacgccgtgtccgagggcaccaaggccatcaccaagtataccagcgctaagtaa

SEQ ID NO: 454 - DNA, 1640 bp, Homo sapiens
gatagagagacaaagaggaaaagagagcgaggtagaaaacggatactgcctatgcctactccatccctctttcagcaccaaggacagaacctctgagcggctgacccaagcaacgctcagtttagggtccctcccaaatcctctaaagaaaacggatacattcgaaagcagctatgaaacatgcactaaggtctaatagggaagctggaaaagcagcactcaagtaatttcaccttagaggcaaaaatgggtgatttctttctgttcatttcatagtttctgagtcctgagaaaggcaaagtttgctttgcttgggtatgtctgctgtcagtaaatggctgcaggagccgaagtggtaaactcctcggtctccagaaatcagaagaaaattttagggaagccccttggcatcacgcacctccctctgggctatggcatctctgagccagctgagtggccacctgaactacacctgtggggcagagaactccacaggtgccagccaggcccgcccacatgcctactatgccctctcctactgcgcgctcatcctggccatcgtcttcggcaatggcctggtgtgcatggctgtgctgaaggagcgggccctgcagactaccaccaactacttagtagtgagcctggctgtggcagacttgctggtggccaccttggtgatgccctgggtggtatacctggaggtgacaggtggagtctggaatttcagccgcatttgctgtgatgtttttgtcaccctggatgtcatgatgtgtacagccagcatccttaatctctgtgccatcagcatagacaggtacactgcagtggtcatgcccgttcactaccagcatggcacgggacagagctcctgtcggcgcgtggccctcatgatcacggccgtctgggtactggcctttgctgtgtcctgccctcttctgtttggctttaataccacaggggaccccactgtctgctccatctccaaccctgattttgtcatctactcttcagtggtgtccttctacctgccctttggagtgactgtccttgtctatgccagaatctatgtggtgctgaaacaaaggagacggaaaaggatcctcactcgacagaacagtcagtgcaacagtgtcaggcctggcttcccccagcaaaccctctctcctgacccggcacatctggagctgaagcgttactacagcatctgccaggacactgccttgggtggaccaggcttccaagaaagaggaggagagttgaaaagagaggagaagactcggaattccctgagtcccaccatagcgcccaagctcagcttagaagttcgaaaactcagcaatggcagattatcgacatctttgaagctggggcccctgcaacctcggggagtgccacttcgggagaagaaggcaacccaaatggtggccattgtgcttggggccttcattgtctgctggctgcccttcttcttgacccatgttctcaatacccactgccagacatgccacgtgtccccagagctttacagtgccacgacatggctgggctacgtgaatagcgccctcaaccctgtgatctataccaccttcaatatcgagttccggaaagccttcctcaagatcctgtcttgctgagggagc

SEQ ID NO: 455 - protein, 400 aa, Homo sapiens
MASLSQLSGHLNYTCGAENSTGASQARPHAYYALSYCALILAIVFGNGLVCMAVLKERALQTTTNYLVVSLAVADLLVATLVMPWVVYLEVTGGVWNFSRICCDVFVTLDVMMCTASILNLCAISIDRYTAVVMPVHYQHGTGQSSCRRVALMITAVWVLAFAVSCPLLFGFNTTGDPTVCSISNPDFVIYSSVVSFYLPFGVTVLVYARIYVVLKQRRRKRILTRQNSQCNSVRPGFPQQTLSPDPAHLELKRYYSICQDTALGGPGFQERGGELKREEKTRNSLSPTIAPKLSLEVRKLSNGRLSTSLKLGPLQPRGVPLREKKATQMVAIVLGAFIVCWLPFFLTHVLNTHCQTCHVSPELYSATTWLGYVNSALNPVIYTTFNIEFRKAFLKILSC

SEQ ID NO: 456 - DNA, 1541 bp, Homo sapiens
gatagagagacaaagaggaaaagagagcgaggtagaaaacggatactgcctatgcctactccatccctctttcagcaccaaggacagaacctctgagcggctgacccaagcaacgctcagtttagggtccctcccaaatcctctaaagaaaacggatacattcgaaagcagctatgaaacatgcactaaggtctaatagggaagctggaaaagcagcactcaagtaatttcaccttagaggcaaaaatgggtgatttctttctgttcatttcatagtttctgagtcctgagaaaggcaaagtttgctttgcttgggtatgtctgctgtcagtaaatggctgcaggagccgaagtggtaaactcctcggtctccagaaatcagaagaaaattttagggaagccccttggcatcacgcacctccctctgggctatggcatctctgagccagctgagtggccacctgaactacacctgtggggcagagaactccacaggtgccagccaggcccgcccacatgcctactatgccctctcctactgcgcgctcatcctggccatcgtcttcggcaatggcctggtgtgcatggctgtgctgaaggagcgggccctgcagactaccaccaactacttagtagtgagcctggctgtggcagacttgctggtggccaccttggtgatgccctgggtggtatacctggaggtgacaggtggagtctggaatttcagccgcatttgctgtgatgtttttgtcaccctggatgtcatgatgtgtacagccagcatccttaatctctgtgccatcagcatagacaggtacactgcagtggtcatgcccgttcactaccagcatggcacgggacagagctcctgtcggcgcgtggccctcatgatcacggccgtctgggtactggcctttgctgtgtcctgccctcttctgtttggctttaataccacaggggaccccactgtctgctccatctccaaccctgattttgtcatctactcttcagtggtgtccttctacctgccctttggagtgactgtccttgtctatgccagaatctatgtggtgctgaaacaaaggagacggaaaaggatcctcactcgacagaacagtcagtgcaacagtgtcaggcctggcttcccccagcaaaccctctctcctgacccggcacatctggagctgaagcgttactacagcatctgccaggacactgccttgggtggaccaggcttccaagaaagaggaggagagttgaaaagagaggagaagactcggaattccctgatgccacttcgggagaagaaggcaacccaaatggtggccattgtgcttggggccttcattgtctgctggctgcccttcttcttgacccatgttctcaatacccactgccagacatgccacgtgtccccagagctttacagtgccacgacatggctgggctacgtgaatagcgccctcaaccctgtgatctataccaccttcaatatcgagttccggaaagccttcctcaagatcctgtcttgctgagggagc

SEQ ID NO: 457 - protein, 367 aa, Homo sapiens
MASLSQLSGHLNYTCGAENSTGASQARPHAYYALSYCALILAIVFGNGLVCMAVLKERALQTTTNYLVVSLAVADLLVATLVMPWVVYLEVTGGVWNFSRICCDVFVTLDVMMCTASILNLCAISIDRYTAVVMPVHYQHGTGQSSCRRVALMITAVWVLAFAVSCPLLFGFNTTGDPTVCSISNPDFVIYSSVVSFYLPFGVTVLVYARIYVVLKQRRRKRILTRQNSQCNSVRPGFPQQTLSPDPAHLELKRYYSICQDTALGGPGFQERGGELKREEKTRNSLMPLREKKATQMVAIVLGAFIVCWLPFFLTHVLNTHCQTCHVSPELYSATTWLGYVNSALNPVIYTTFNIEFRKAFLKILSC

SEQ ID NO: 458 - DNA, 1656 bp, Homo sapiens
atgcaggcagagctgtctccatcctcagagccagaggctggcccttcacagcctccagtcaggcagggggccctccggggtggcctgctcatggactacagcccagcaagtggggggggggcagggggcagtgacatcccccaggctctaccaggtatttatcttttcccctccagctggtgcctctgagcttcacagggcccagaagcgaccagccccacccactaagggtcctcaggagctggagaggggccctgggctgggggccagagagggactaccccctgaagaaccatcttctgtagggctattgggcccagggggactggggctgggagtaggtgtgtccagccaccatttctcccaccgtggcctctgtgttgtggaacagggaagtagtgccacctcttcttggacttcaggggcctggagtccctcctggccccgatcatatgcttcctgaaatactttacacaccagagactaggctttcccagacccagggggacaggggtccctaggggagtccccagggccagccctctgggccagctacacacgctggacactgatttgcagttttgcacaaataaggggtaagagcccagtggctagggtgggcaagagggggagcctctggcctagggagtcccctggcattgacagtgggcacagtcccaagcacacacccccagccctggacctccaggcccctgccccaccaagcaaaggctgcttctgctggagaagccccaaatgtcagttctaaggaagagggtccagccctttggacgtgccagggaaccctgggccaccctactgctaccaacagttctgatgctcaaaccacacccatctggagccacctgctgcctgggcccaaggagcctgttttggacccaacagactgcagtcccatggggcggaggctgacaggtgcccatcacctgaagctgagcccactttgaagcctctggaaggggccaggcctgctgagcccccgtagtgcctcccctgttcctacccctgctatcagctgtaccctgctgggcaactttgaggaatcattgctgcaaggacgctttgcaccatctggccacattgagggcttcacagcagagactggagctagtgggtcctactgcccccaccatgtcacactgcctgtcactgtcaccttctttgaggtttctgagcaaaatgcccccacccacttcctgggctttgtggatctgaacctcctggggaggaagagttacagcgtgcccaaagtgggcaccacacaagtaacatttaaccccaaccagactgtggtgaagatgttcctggtgacctttgacttcttggacatggctgctgccacatgcccttattgtgccattgcctctttttggtgcctgtgggtgaggagaaaaatgctaaccccacctactgcctcctctgctactcgctgcaccttgggttctggagctcccgctcaggcctcttaagcctgaatggagatctctgccagcttttttcctgctagagcctggagctggacgcagggctcccctgcgaacttcaggctgtgactggggcccctcttaacccacgttattcacttttgccctgattgccattactctgaaccaatgtggatcaatgacctgccca

SEQ ID NO: 459 - DNA, 2560 bp, Homo sapiens
gccggagccagcagtggcaacccgctggggtccctttccacactgtggaagctttgttctttcgctctttgcaataaatcttgctacttctcactctttgggtccacactgcttttaccagctgtaacactcaccgcaaacgtctgcagcttcactcctgaagccagcgagaccacgagcccaccgggaggaacgaacaactccagacgcgccgccttaagccttaagagctgtaacactcaccacgaaggtctgcagcttcactcctgagccagcgagaccacgaacccgccagaaggaagaaactccgaacacatccgaacatcagaaggaacaaactctagacgcgccaccttaagagctgtaacactcaccacaagggtccgcggcttcattcttgaagtcagtgagaccaagaacccaccaattccggacacagttggaaatgcagaagggcacttgagtttggctgcagtctcccacacggagaccttctggaggaagatgagccctaaacgcgatgggttggggacaggtgatggtctgcactcacaggttttacaggagcaggtctccacaggagacaatctccatgaatgtgactcccagggaccaagtaaagacactttggttcgtgaggggaagacctacaaatgcaaggaatgtgggagcgtgtttaacaaaaacagcctccttgttcgacatcagcagattcacactggggtgaagccttatgaatgccaggagtgtggaaaagcctttcctgaaaaggtcgacttcgttcgacccatgaggattcacacaggggagaagccctgtaagtgcgtggagtgcgggaaggtcttcaaccgcaggtcgcacctcctgtgctaccgccagattcacactggagagaagccctatgagtgcagcgagtgtggaaagaccttcagctatcactctgtcttcatccagcatcgtgtgacccacactggagaaaaactctttgggtgcaaagaatgtggaaaaaccttttactacaactcttccttaacccggcacatgaagattcacactggagagaagccctgcaagtgcagtgagtgcgggaagaccttcacctaccgctctgttttcttccgacatagtatgacccacactgcaggaaagccctacgagtgcaaagaatgtgggaaaggtttttactacagctattccctcactcgacatacaaggagtcacactggagagaaaccttatgagtgccttgaacatagaaaggactttggctaccactctgcttttgcccaacagagtaagatccactctggaggaaaaaacctttgagtgcaaatgatgtgggaatttgtgggttttctttttttttttttctttgatacatagagagccacactgaggagaagcactctgaattcagtggcagtaggaaagctgtgacctgcagctcatcctcacttggcattgaagaattccttccagagataaactctatgagatatgtgggaaggccttttgcaagtgggcccacatcagtcaacgtcagagaacttaaactgcgaaaagacattttgacaaaaactagtgaagaaaatcttttggccacaggaaatatcttcctcagcatctgagaatttttccaggagggagacctgttggttattgtgcacttaaaagaaccacccacacctctctccatagtttatatcactaagccacttcaggattttttttttttaagtaagaagggaactgtaaaagagaaaaaaagaaattcatgcatagcttctgtcagacttctctgaaagccatgcctatcaaaatttgaattcagttcttcattttgcagatggctgaaagggacgagagaatgatggtgaagctgtgttgctttcccaggtgagccttgattatttcctctgtgctttctcagcttctttggccttctgtaagaggggcttctccaagagcatgtcactagttttctagaagttaaacaagagctaagacaaacaaaacaaaacacagcttatctaatctaatgagaaactcagaaaaaaatgttttgatgaatacaatgtattaaaatataaaacatgtagatcctttgacatgttaattcaattctagaaatcctcagaaatgtttttatattatgcagagatgtgcgtgcaaagaataatcgctgcagttttgtttttatgtgtgaaacgttgagaacaatctaaatgtttatcagttggaagtaagttatggtacatctgttctatgaaatactgtgaaacaataaggtatctctgtatgtactgatatcaaaacatctctaagatacagtatttagtaaaagagaaagtttcaggaaataaaactacatctagaagtataagcataaaactgttaatagtggttttctgcaggaaatgggatggaccagggttatatgcaatgttcagtttttacttttatacttaagtattgtttatgtttgaaaaataaaaagcatttattgtttttgcaataaatgtttaaaatatttcaataaagatagcatgttagaataaaa

SEQ ID NO: 460 - protein, 273 aa, Homo sapiens
MSPKRDGLGTGDGLHSQVLQEQVSTGDNLHECDSQGPSKDTLVREGKTYKCKECGSVFNKNSLLVRHQQIHTGVKPYECQECGKAFPEKVDFVRPMRIHTGEKPCKCVECGKVFNRRSHLLCYRQIHTGEKPYECSECGKTFSYHSVFIQHRVTHTGEKLFGCKECGKTFYYNSSLTRHMKIHTGEKPCKCSECGKTFTYRSVFFRHSMTHTAGKPYECKECGKGFYYSYSLTRHTRSHTGEKPYECLEHRKDFGYHSAFAQQSKIHSGGKNL

SEQ ID NO: 461 - DNA, 2139 bp, Homo sapiens
acatctgcttcctgtaggccctctgggcagaagcatgcgctggtgtctcctcctgatctgggcccaggggctgaggcaggctcccctcgcctcaggaatgatgacaggcacaatagaaacaacggggaacatttctgcagagaaaggtggctctatcatcttacaatgtcacctctcctccaccacggcacaagtgacccaggtcaactgggagcagcaggaccagcttctggccatttgtaatgctgacttggggtggcacatctccccatccttcaaggatcgagtggccccaggtcccggcctgggccttaccctccagtcgctgaccgtgaacgatacaggggagtacttctgcatctatcacacctaccctgatggggcgtacactgggagaatcttcctggaggtcctagaaagctcagtggctgagcacggtgccaggttccagattccattgcttggagccatggccgcgacgctggtggtcatctgcacagcagtcatcgtggtggtcgcgttgactagaaagaagaaagccctcagaatccattctgtggaaggtgacctcaggagaaaatcagctggacaggaggaatggagccccagtgctccctcacccccaggaagctgtgtccaggcagaagctgcacctgctgggctctgtggagagcagcggggagaggactgtgccgagctgcatgactacttcaatgtcctgagttacagaagcctgggtaactgcagcttcttcacagagactggttagcaaccagaggcatcttctggaagatacacttttgtctttgctattatagatgaatatataagcagctgcactctccatcagtgctgcgtgtgtgtgtgtgtgtgtatgtgtgtgtgtgttcagttgagtgaataaatgtcatcctcttctccatcttcatttccttggccttttcgttctattccattttgcattatggcaggcctagggtgagtaacgtggatcttgatcataaatgcaaaattaaaaaatatcttgacctggttttaaatctggcagtttgagcagatcctatgtctctgagagacacattcctcataatggccagcattttgggctacaaggttttgtggttgatgatgaggatggcatgactgcagagccatcctcatctcattttttcacgtcattttcagtaactttcactcattcaaaggcaggttataagtaagtcctggtagcagcctctatggggagatttgagagtgactaaatcttggtatctgccctcaagaacttacagttaaatggggagacaatgttgtcatgaaaaggtattatagtaaggagagaaggagacatacacaggccttcaggaagagacgacagtttggggtgaggtagttggcataggcttatctgtgatgaagtggcctgggagcaccaaggggatgttgaggctagtctgggaggagcaggagttttgtctagggaacttgtaggaaattcttggagctgaaagtcccacaaagaaggccctggcaccaagggagtcagcaaacttcagattttattctctgggcaggcatttcaagtttccttttgctgtgacatactcatccattagacagcctgatacaggcctgtagcctcttccggccgtgtgtgctggggaagccccaggaaacgcacatgcccacacagggagccaagtcgtagcatttgggccttgatctaccttttctgcatcaatacactcttgagcctttgaaaaaagaacgtttcccactaaaaagaaaatgtggatttttaaaatagggactcttcctaggggaaaaaggggggctgggagtgatagagggtttaaaaaataaacaccttcaaactaacttcttcgaacccttttattcactccctgacgactttgtgctggggttggggtaactgaactgcttatttctgtttaattgcattcaggctggatcttagaagacttttatccttccaccatctctctcagaggaatgagcggggaggttggatttactggtgactgattttctttcatgggccaaggaactgaaagagaatgtgaagcaaggttgtgtcttgcgcatggttaaaaataaagcattgtcctgcttcctaag

SEQ ID NO: 462 - protein, 244 aa, Homo sapiens
MRWCLLLIWAQGLRQAPLASGMMTGTIETTGNISAEKGGSIILQCHLSSTTAQVTQVNWEQQDQLLAICNADLGWHISPSFKDRVAPGPGLGLTLQSLTVNDTGEYFCIYHTYPDGAYTGRIFLEVLESSVAEHGARFQIPLLGAMAATLVVICTAVIVVVALTRKKKALRIHSVEGDLRRKSAGQEEWSPSAPSPPGSCVQAEAAPAGLCGEQRGEDCAELHDYFNVLSYRSLGNCSFFTETG

SEQ ID NO: 463 - DNA, 2976 bp, Homo sapiens
ggaagaagtaggggcggggggaagtttaggagttgaggaaagaagattaaagagcgcgaggagacaaataaaaagaagtgttaagaattgcctttgggactctgaaggctgaagaattgatgaattgcaagtttgtgccccatagctgcacagactgcctgaagttacatttagagactgaaatcactgcaccttaaaaacaaaagattgagctgcactgtattcctaatgtttcatcattactaacaggatattcctcatgacattgctgtctgatctttgaccatcagtctgtgacctgccccttctctttacatgcagccgctctctgctccctgccccaatgaacatctgcactaggcccaagccttggagtaatttacctgaagagtgacaccattgattttgaaactactgaagaaacccaagacagctgaaaaccagaaggcatctgaggagaatgagattactcagccgggtggatccagcgccaagccgggccttccctgcctgaactttgaagctgttttgtctccagacccagccctcatccactcaacacattcactgacaaactctcacgctcacaccgggtcatctgattgtgacatcagttgcaaggggatgaccgagcgcattcacagcatcaaccttcacaacttcagcaattccgtgctcgagaccctcaacgagcagcgcaaccgtggccacttctgtgacgtaacggtgcgcatccacgggagcatgctgcgcgcacaccgctgcgtgctggcagccggcagccccttcttccaggacaaactgctgcttggctacagcgacatcgagatcccgtcggtggtgtcagtgcagtcagtgcaaaagctcattgacttcatgtacagcggcgtgctacgggtctcgcagtcggaagctctgcagatcctcacggccgccagcatcctgcagatcaaaacagtcatcgacgagtgcacgcgcatcgtgtcacagaacgtgggcgatgtgttcccggggatccaggactcgggccaggacacgccgcggggcactcccgagtcaggcacgtcaggccagagcagcgacacggagtcgggctacctgcagagccacccacagcacagcgtggacaggatctactcggcactctacgcgtgctccatgcagaatggcagcggcgagcgctctttttacagcggcgcagtggtcagccaccacgagactgcgctcggcctgccccgcgaccaccacatggaagaccccagctggatcacacgcatccatgagcgctcgcagcagatggagcgctacctgtccaccacccccgagaccacgcactgccgcaagcagccccggcctgtgcgtatccagaccctagtgggcaacatccacatcaagcaggggatggaggacgattacgactactacgggcagcaaagggtgcagatcctggaacgcaacgaatccgaggagtgcacggaagacacagaccaggccgagggcaccgagagtgagcccaaaggtgaaagcttcgactcgggcgtcagctcctccataggcaccgagcctgactcggtggagcagcagtttgggcctggggcggcgcgggacagccaggctgaacccacccaacccgagcaggctgcagaagcccccgctgagggtggtccgcagacaaaccagctagaaacaggtgcttcctctccggagagaagcaatgaagtggagatggacagcactgttatcactgtcagcaacagctccgacaagagcgtcctacaacagccttcggtcaacacgtccatcgggcagccattgccaagtacccagctctacttacgccagacagaaaccctcaccagcaacctgaggatgcctctgaccttgaccagcaacacgcaggtcattggcacagctggcaacacctacctgccagccctcttcactacccagcccgcgggcagtggccccaagcctttcctcttcagcctgccacagcccctggcaggccagcagacccagtttgtgacagtgtcccagcccggtctgtcgacctttactgcacagctgccagcgccacagcccctggcctcatccgcaggccacagcacagccagtgggcaaggcgaaaaaaagccttatgagtgcactctctgcaacaagactttcaccgccaaacagaactacgtcaagcacatgttcgtacacacaggtgagaagccccaccaatgcagcatctgttggcgctccttctccttaaaggattaccttatcaagcacatggtgacacacacaggagtgagggcataccagtgtagtatctgcaacaagcgcttcacccagaagagctccctcaacgtgcacatgcgcctccaccggggagagaagtcctacgagtgctacatctgcaaaaagaagttctctcacaagaccctcctggagcgacacgtggccctgcacagtgccagcaatgggaccccccctgcaggcacacccccaggtgcccgcgctggccccccaggcgtggtggcctgcacggaggggaccacttacgtctgctccgtctgcccagcaaagtttgaccaaatcgagcagttcaacgaccacatgaggatgcatgtgtctgacggataagtagtatctttctctctttcttatgaacaaaacaaaacaacaacaaaaaacaaacaaacaaaaaagctatggcactagaatttaagaaatgttttggtttcatttttactttctgtttttgtttttgtttcgtttcattttgtactacatgaagaactgttttttgcctgctggtacattacatttccggaggcttgggtgaataatagttttcccagtctccctcggatggtggccttaaggcctggtagtgcttcaagaggtccactggttggatctctagctactggcctctaaatacaacccttctttacaaaaaaatcttttaaaaaaaaaaaaaaaaaa

SEQ ID NO: 464 - protein, 668 aa, Homo sapiens
MTERIHSINLHNFSNSVLETLNEQRNRGHFCDVTVRIHGSMLRAHRCVLAAGSPFFQDKLLLGYSDIEIPSVVSVQSVQKLIDFMYSGVLRVSQSEALQILTAASILQIKTVIDECTRIVSQNVGDVFPGIQDSGQDTPRGTPESGTSGQSSDTESGYLQSHPQHSVDRIYSALYACSMQNGSGERSFYSGAVVSHHETALGLPRDHHMEDPSWITRIHERSQQMERYLSTTPETTHCRKQPRPVRIQTLVGNIHIKQGMEDDYDYYGQQRVQILERNESEECTEDTDQAEGTESEPKGESFDSGVSSSIGTEPDSVEQQFGPGAARDSQAEPTQPEQAAEAPAEGGPQTNQLETGASSPERSNEVEMDSTVITVSNSSDKSVLQQPSVNTSIGQPLPSTQLYLRQTETLTSNLRMPLTLTSNTQVIGTAGNTYLPALFTTQPAGSGPKPFLFSLPQPLAGQQTQFVTVSQPGLSTFTAQLPAPQPLASSAGHSTASGQGEKKPYECTLCNKTFTAKQNYVKHMFVHTGEKPHQCSICWRSFSLKDYLIKHMVTHTGVRAYQCSICNKRFTQKSSLNVHMRLHRGEKSYECYICKKKFSHKTLLERHVALHSASNGTPPAGTPPGARAGPPGVVACTEGTTYVCSVCPAKFDQIEQFNDHMRMHVSDG

SEQ ID NO: 465 - DNA, 2029 bp, Homo sapiens
gtggacgcgaggagccgggcgcttagaacagaggcttgcacaggtggagatgtggaagtctgtagtgggccatgatgtgtctgtttccgtggagacccagggtgatgattgggacacagatcctgactttgtgaatgacatctctgaaaaggagcaacgatggggagccaagaccatcgaggggtctggacgcacagaacacatcaacatccaccagctgaggaacaaagtatcagaggagcatgatgttctcaggaagaaagagatggagtcagggcccaaagcatcccatggctatggaggtcggtttggagtagaaagagaccgaatggacaagagtgcagtgggccatgagtatgttgccgaggtggagaagcactcttctcagacggatgctgccaaaggctttgggggcaagtacggagttgagagggacagggcagacaagtcagcagtcggctttgattataaaggagaagtggagaagcatacatctcagaaagattactctcgtggctttggtggccggtacggggtggagaaggataaatgggacaaagcagctctgggatatgactacaagggagagacggagaaacacgagtcccagagagattatgccaagggctttggtggccagtatggaatccagaaggaccgagtggataagagcgctgtcggcttcaatgaaatggaggccccgaccacagcttataagaagacgacgcccatagaagccgcttctagtggtgcccgtgggctgaaggcgaaatttgagtccatggctgaggagaagaggaagcgagaggaagaggagaaggcacagcaggtggccaggaggcaacaggagcgaaaggctgtgacaaagaggagccctgaggctccacagccagtgatagctatggaagagccagcagtaccggccccactgcccaagaaaatctcctcagaggcctggcctccagttgggactcctccatcatcagagtctgagcctgtgagaaccagcagggaacacccagtgcccttgctgcccattaggcagactctcccggaggacaatgaggagcccccagctctgccccctaggactctggaaggcctccaggtggaggaagagccagtgtacgaagcagagcctgagcctgagcccgagcctgagcccgagcctgagaatgactatgaggacgttgaggagatggacaggcatgagcaggaggatgaaccagagggggactatgaggaggtgctcgagcctgaagattcttctttttcttctgctctggctggatcatcaggctgcccggctggggctggggctggggctgtggctctggggatctcagctgtggctctatatgattaccaaggagagggaagtgatgagctttcctttgatccggacgacgtaatcactgacattgagatggtggacgagggctggtggcggggacgttgccatggccactttggactcttccctgcaaattatgtcaagcttctggagtgactagagctcactgtctactgcaactgtgatttcccatgtccaaagtggctctgcctccaccccctccctattcctgatgcaaatgtctaaccagatgagtttctggacagacttccctctcctgcttcattaagggcttggggcagagacagcatggggaaggaggtccccttccccaagagtcctctctatcctggatgagctcatgaacatttctcttgtgttcctgactccttcccaatgaacacctctctgccaccccaagctctgctctcctcctctgtgagctctgggcttcccagtttgtttacccgggaaagtacgtctagattgtgtggtttgcctcattgtgctatttgcccactttccttccctgaagaaatatctgtgaaccttctttctgttcagtcctaaaattcgaaataaagtgagactatggttcacctgtaaaaaaaaaaaaaaaaaaaaaaaaaaaaaaaaaaaaaaaaaaaaaaaaaaaaaaaaaaaaaaaaaaaaaaa

SEQ ID NO: 466 - protein, 486 aa, Homo sapiens [sequence omitted]

SEQ ID NO: 467 - DNA, 2942 bp, Homo sapiens
cggctcggggctgtgagcggctcggggccgggggtgggcggcggtgcggcgggcggccgacgctcctcttcggcggcggcggcggcggccatgcgtggggcggcgcggctggggcggccgggccggagttgcctcccgggggcccgcggcctgagggccccgccgccgccgccgctgctgcttctgcttgcgctgttgccgctgctgcccgcgcctggcgctgccgccgcccccgccccgcggcccccggagctgcagtcggcttccgcggggcccagcgtgagtctctacctgagcgaggacgaggtgcgccggctgatcggtcttgatgcagaactttattatgtgagaaatgaccttattagtcactacgctctatcctttagtctgttagtacccagtgagacaaatttcctgcacttcacctggcatgcgaagtccaaggttgaatataagctgggattccaagtggacaatgttttggcaatggatatgccccaggtcaacatttctgttcagggggaagttccacgcactttatcagtgtttcgggtagagctttcctgtactggcaaagtagattctgaagttatgatactaatgcagctcaacttgacagtaaattcttcaaaaaattttaccgtcttaaattttaaacgaaggaaaatgtgctacaaaaaacttgaagaagtaaaaacttcagccttggacaaaaacactagcagaactatttatgatcctgtacatgcagctccaaccacttctacgcgtgtgttttatattagtgtaggggtttgttgtgcagtaatatttctcgtagcaataatattagctgttttgcaccttcatagtatgaaaaggattgaactggatgacagcattagtgccagcagtagttcccaagggctgtctcagccatccacccagacgactcagtatctgagagcagacacgcccaacaatgcaactcctatcaccagctccttaggttatcctaccttgcggatagagaagaacgacttgagaagtgtcactcttttggaggccaaaggcaaggtgaaggatatagcaatatccagagagaggataactctaaaagatgtactccaagaaggtacttttgggcgtattttccatgggattttaatagatgaaaaagatccaaataaagaaaaacaagcatttgtcaaaacagttaaagatcaagcttctgaaattcaggtgacaatgatgctcactgaaagttgtaagctgcgaggtcttcatcacagaaatcttcttcctattactcatgtgtgtatagaagaaggagaaaagcccatggtgatattgccttacatgaattgggggaatcttaaattgtttttacgacagtgcaagttagtagaggccaataatccacaggcaatttctcagcaagacctggtacacatggctattcagattgcctgtggaatgagctacctggccagaagggaagtcatccacaaagacctggctgccaggaactgtgtcattgatgacacacttcaagttaagatcacagacaatgccctctccagagacttgttccccatggactatcactgtctgggggacaatgaaaacaggccagttcgttggatggctcttgaaagtctggttaataacgagttctctagcgctagtgatgtgtgggcctttggagtgacgctgtgggaactcatgactctgggccagactccctacgtggacattgaccccttcgagatggccgcatacctgaaagatggttaccgaatagcccagccaatcaactgtcctgatgaattatttgctgtgatggcctgttgctgggccttagatccagaggagaggcccaagtttcagcagctggtacagtgcctaacagagtttcatgcagccctgggggcctacgtctgactcctctccaatcccacaccatcaggaagaaggtgcctgtcggggctcacttgaagcctgtcagggatgctttgtatctaacacaacgccaacagaagcacatttgtcttccagaacaccgtgccttagaaatgctttagaatctgaactttttaagacagacttaataatgtggcatattttctagatatcacttttattaggttgaactgaaagggtttttgtaaattttttggccaaaattttttaaaacatacttactttggactaggggtacattcttacaaaataaataaacagtttttaaaattgtttagacacagatatttggaattagctatcttagtgccaactgctttttatttttttacttcatcaaggtgatgtaagtgactcacctttaaagtttttttagtgttattttttatcactactctgggaaatggtttgtcttcaagatgcaatacttttcttagtaaaggaaaaacagcataaaaagatacctggtctgccttgtacaagaaaaggcaatattagaggaagaaaatttaaagaaaagctagaggaaaaaaaaatttttttaaaaatacttattagaagcaaactgcccttgcatggaaaactgtttatttttttcagtgaaaaggaattctgctttcgtgtttttgggaaagcaggaactgagttcattacatctttaatttggcagaaattagcctttctgtgaaccagatgtggtttggggcagatctgtagtaaacaatggtgattttatttatttttactctctggaaaaggagataatacaattccagaaagtgaactcatatttctaaggttaagattcccttttattgcacctagaatagtgctatgcacagagcgggtgcttgagttgttgtcgttttttgtttgttttttaaatgtaaactggtaaattttgtgcttatcttcaaggctggcttaagtataaaattgttttttaaacacttgaaaaattaaaggatttgttttatatt

SEQ ID NO: 468 - protein, 610 aa, Homo sapiens
MRGAARLGRPGRSCLPGARGLRAPPPPPLLLLLALLPLLPAPGAAAAPAPRPPELQSASAGPSVSLYLSEDEVRRLIGLDAELYYVRNDLISHYALSFSLLVPSETNFLHFTWHAKSKVEYKLGFQVDNVLAMDMPQVNISVQGEVPRTLSVFRVELSCTGKVDSEVMILMQLNLTVNSSKNFTVLNFKRRKMCYKKLEEVKTSALDKNTSRTIYDPVHAAPTTSTRVFYISVGVCCAVIFLVAIILAVLHLHSMKRIELDDSISASSSSQGLSQPSTQTTQYLRADTPNNATPITSSLGYPTLRIEKNDLRSVTLLEAKGKVKDIAISRERITLKDVLQEGTFGRIFHGILIDEKDPNKEKQAFVKTVKDQASEIQVTMMLTESCKLRGLHHRNLLPITHVCIEEGEKPMVILPYMNWGNLKLFLRQCKLVEANNPQAISQQDLVHMAIQIACGMSYLARREVIHKDLAARNCVIDDTLQVKITDNALSRDLFPMDYHCLGDNENRPVRWMALESLVNNEFSSASDVWAFGVTLWELMTLGQTPYVDIDPFEMAAYLKDGYRIAQPINCPDELFAVMACCWALDPEERPKFQQLVQCLTEFHAALGAYV

SEQ ID NO: 469 - DNA, 2933 bp, Homo sapiens
cggctcggggctgtgagcggctcggggccgggggtgggcggcggtgcggcgggcggccgacgctcctcttcggcggcggcggcggcggccatgcgtggggcggcgcggctggggcggccgggccggagttgcctcccgggggcccgcggcctgagggccccgccgccgccgccgctgctgcttctgcttgcgctgttgccgctgctgcccgcgcctggcgctgccgccgcccccgccccgcggcccccggagctgcagtcggcttccgcggggcccagcgtgagtctctacctgagcgaggacgaggtgcgccggctgatcggtcttgatgcagaactttattatgtgagaaatgaccttattagtcactacgctctatcctttagtctgttagtacccagtgagacaaatttcctgcacttcacctggcatgcgaagtccaaggttgaatataagctgggattccaagtggacaatgttttggcaatggatatgccccaggtcaacatttctgttcagggggaagttccacgcactttatcagtgtttcgggtagagctttcctgtactggcaaagtagattctgaagttatgatactaatgcagctcaacttgacagtaaattcttcaaaaaattttaccgtcttaaattttaaacgaaggaaaatgtgctacaaaaaacttgaagaagtaaaaacttcagccttggacaaaaacactagcagaactatttatgatcctgtacatgcagctccaaccacttctacgcgtgtgttttatattagtgtaggggtttgttgtgcagtaatatttctcgtagcaataatattagctgttttgcaccttcatagtatgaaaaggattgaactggatgacagcattagtgccagcagtagttcccaagggctgtctcagccatccacccagacgactcagtatctgagagcagacacgcccaacaatgcaactcctatcaccagttatcctaccttgcggatagagaagaacgacttgagaagtgtcactcttttggaggccaaaggcaaggtgaaggatatagcaatatccagagagaggataactctaaaagatgtactccaagaaggtacttttgggcgtattttccatgggattttaatagatgaaaaagatccaaataaagaaaaacaagcatttgtcaaaacagttaaagatcaagcttctgaaattcaggtgacaatgatgctcactgaaagttgtaagctgcgaggtcttcatcacagaaatcttcttcctattactcatgtgtgtatagaagaaggagaaaagcccatggtgatattgccttacatgaattgggggaatcttaaattgtttttacgacagtgcaagttagtagaggccaataatccacaggcaatttctcagcaagacctggtacacatggctattcagattgcctgtggaatgagctacctggccagaagggaagtcatccacaaagacctggctgccaggaactgtgtcattgatgacacacttcaagttaagatcacagacaatgccctctccagagacttgttccccatggactatcactgtctgggggacaatgaaaacaggccagttcgttggatggctcttgaaagtctggttaataacgagttctctagcgctagtgatgtgtgggcctttggagtgacgctgtgggaactcatgactctgggccagactccctacgtggacattgaccccttcgagatggccgcatacctgaaagatggttaccgaatagcccagccaatcaactgtcctgatgaattatttgctgtgatggcctgttgctgggccttagatccagaggagaggcccaagtttcagcagctggtacagtgcctaacagagtttcatgcagccctgggggcctacgtctgactcctctccaatcccacaccatcaggaagaaggtgcctgtcggggctcacttgaagcctgtcagggatgctttgtatctaacacaacgccaacagaagcacatttgtcttccagaacaccgtgccttagaaatgctttagaatctgaactttttaagacagacttaataatgtggcatattttctagatatcacttttattaggttgaactgaaagggtttttgtaaattttttggccaaaattttttaaaacatacttactttggactaggggtacattcttacaaaataaataaacagtttttaaaattgtttagacacagatatttggaattagctatcttagtgccaactgctttttatttttttacttcatcaaggtgatgtaagtgactcacctttaaagtttttttagtgttattttttatcactactctgggaaatggtttgtcttcaagatgcaatacttttcttagtaaaggaaaaacagcataaaaagatacctggtctgccttgtacaagaaaaggcaatattagaggaagaaaatttaaagaaaagctagaggaaaaaaaaatttttttaaaaatacttattagaagcaaactgcccttgcatggaaaactgtttatttttttcagtgaaaaggaattctgctttcgtgtttttgggaaagcaggaactgagttcattacatctttaatttggcagaaattagcctttctgtgaaccagatgtggtttggggcagatctgtagtaaacaatggtgattttatttatttttactctctggaaaaggagataatacaattccagaaagtgaactcatatttctaaggttaagattcccttttattgcacctagaatagtgctatgcacagagcgggtgcttgagttgttgtcgttttttgtttgttttttaaatgtaaactggtaaattttgtgcttatcttcaaggctggcttaagtataaaattgttttttaaacacttgaaaaattaaaggatttgttttatatt

SEQ ID NO: 470 - protein, 607 aa, Homo sapiens
MRGAARLGRPGRSCLPGARGLRAPPPPPLLLLLALLPLLPAPGAAAAPAPRPPELQSASAGPSVSLYLSEDEVRRLIGLDAELYYVRNDLISHYALSFSLLVPSETNFLHFTWHAKSKVEYKLGFQVDNVLAMDMPQVNISVQGEVPRTLSVFRVELSCTGKVDSEVMILMQLNLTVNSSKNFTVLNFKRRKMCYKKLEEVKTSALDKNTSRTIYDPVHAAPTTSTRVFYISVGVCCAVIFLVAIILAVLHLHSMKRIELDDSISASSSSQGLSQPSTQTTQYLRADTPNNATPITSYPTLRIEKNDLRSVTLLEAKGKVKDIAISRERITLKDVLQEGTFGRIFHGILIDEKDPNKEKQAFVKTVKDQASEIQVTMMLTESCKLRGLHHRNLLPITHVCIEEGEKPMVILPYMNWGNLKLFLRQCKLVEANNPQAISQQDLVHMAIQIACGMSYLARREVIHKDLAARNCVIDDTLQVKITDNALSRDLFPMDYHCLGDNENRPVRWMALESLVNNEFSSASDVWAFGVTLWELMTLGQTPYVDIDPFEMAAYLKDGYRIAQPINCPDELFAVMACCWALDPEERPKFQQLVQCLTEFHAALGAYV

SEQ ID NO: 471 - DNA, 4536 bp, Homo sapiens
gaattccacatgcacacccacacccacgcgcgcccgcaccgccccacgcgcacacactcctgcccacgcccacgcagcgctccgggaagtccggtccgggcgagagcgcgaaaggataccgagaagccacccgcggagagcgcagcggcgccctgggacgcggcgctctcccggcgctgctgcctcggcttggtctcggcctgcgggccgtcggccggcgatggccctggattatctactactgctcctcctggcatccgcagtggctgcgatggaagaaacgttaatggacaccagaacggctactgcagagctgggctggacggccaatcctgcgtccgggtgggaagaagtcagtggctacgatgaaaacctgaacaccatccgcacctaccaggtgtgcaatgtcttcgagcccaaccagaacaattggctgctcaccaccttcatcaaccggcggggggcccatcgcatctacacagagatgcgcttcactgtgagagactgcagcagcctccctaatgtcccaggatcctgcaaggagaccttcaacttgtattactatgagactgactctgtcattgccaccaagaagtcagccttctggtctgaggccccctacctcaaagtagacaccattgctgcagatgagagcttctcccaggtggactttgggggaaggctgatgaaggtaaacacagaagtcaggagctttgggcctcttactcggaatggtttttacctcgcttttcaggattatggagcctgtatgtctcttctttctgtccgtgtcttcttcaaaaagtgtcccagcattgtgcaaaattttgcagtgtttccagagactatgacaggggcagagagcacatctctggtgattgctcggggcacatgcatccccaacgcagaggaagtggacgtgcccatcaaactctactgcaacggggatggggaatggatggtgcctattgggcgatgcacctgcaagcctggctatgagcctgagaacagcgtggcatgcaaggcttgccctgcagggacattcaaggccagccaggaagctgaaggctgctcccactgcccctccaacagccgctcccctgcagaggcgtctcccatctgcacctgtcggaccggttattaccgagcggactttgaccctccagaagtggcatgcactagcgtcccatcaggtccccgcaatgttatctccatcgtcaatgagacgtccatcattctggagtggcaccctccaagggagacaggtgggcgggatgatgtgacctacaacatcatctgcaaaaagtgccgggcagaccgccggagctgctcccgctgtgacgacaatgtggagtttgtgcccaggcagctgggcctgacggagtgccgcgtctccatcagcagcctgtgggcccacaccccctacacctttgacatccaggccatcaatggagtctccagcaagagtcccttccccccacagcacgtctctgtcaacatcaccacaaaccaagccgccccctccaccgttcccatcatgcaccaagtcagtgccactatgaggagcatcaccttgtcatggccacagccggagcagcccaatggcatcatcctggactatgagatccggtactatgagaaggaacacaatgagttcaactcctccatggccaggagtcagaccaacacagcaaggattgatgggctgcggcctggcatggtatatgtggtacaggtgcgtgcccgcactgttgctggctacggcaagttcagtggcaagatgtgcttccagactctgactgacgatgattacaagtcagagctgagggagcagctgcccctgattgctggctcggcagcggccggggtcgtgttcgttgtgtccttggtggccatctctatcgtctgtagcaggaaacgggcttatagcaaagaggctgtgtacagcgataagctccagcattacagcacaggccgaggctccccagggatgaagatctacattgaccccttcacttacgaggatcccaacgaagctgtccgggagtttgccaaggagattgatgtatcttttgtgaaaattgaagaggtcatcggagcaggggagtttggagaagtgtacaaggggcgtttgaaactgccaggcaagagggaaatctacgtggccatcaagaccctgaaggcagggtactcggagaagcagcgtcgggactttctgagtgaggcgagcatcatgggccagttcgaccatcctaacatcattcgcctggagggtgtggtcaccaagagtcggcctgtcatgatcatcacagagttcatggagaatggtgcattggattctttcctcaggcaaaatgacgggcagttcaccgtgatccagcttgtgggtatgctcaggggcatcgctgctggcatgaagtacctggctgagatgaattatgtgcatcgggacctggctgctaggaacattctggtcaacagtaacctggtgtgcaaggtgtccgactttggcctctcccgctacctccaggatgacacctcagatcccacctacaccagctccttgggagggaagatccctgtgagatggacagctccagaggccatcgcctaccgcaagttcacttcagccagcgacgtttggagctatgggatcgtcatgtgggaagtcatgtcatttggagagagaccctattgggatatgtccaaccaagatgtcatcaatgccatcgagcaggactaccggctgcccccacccatggactgtccagctgctctacaccagctcatgctggactgttggcagaaggaccggaacagccggccccggtttgcggagattgtcaacaccctagataagatgatccggaacccggcaagtctcaagactgtggcaaccatcaccgccgtgccttcccagcccctgctcgaccgctccatcccagacttcacggcctttaccaccgtggatgactggctcagcgccatcaaaatggtccagtacagggacagcttcctcactgctggcttcacctccctccagctggtcacccagatgacatcagaagacctcctgagaataggcatcaccttggcaggccatcagaagaagatcctgaacagcattcattctatgagggtccagataagtcagtcaccaacggcaatggcatgagaactcttgtttcttggggaaggagaggagggaaaaggaccagggtcaagggggaccagaggttgaccactgtggaatgtactggagagactggcttctcagctgaggaatgcatttccatcagtgaagaatcaaccggacctgttgctagcaggcaatctccatttctcagtgacagaagcatgtttgagatgccgtgggaaaccaaatatataataataaaaatataaaaaggtgatgttcaacagaagtgaagacaaaacaatatgcatcaggagaacaagagtaaacccagctcccactctcagtgggctgcagttgcccaaccacaggaagaaagggaaggaggtagagggaagaaacagaagcagtgttccattttcttcctcaccaatgacattcttttcttttctcctttcgtactcctccctgagagtcccctcccttctcccacactcgtttccctttgctcatgactcctgtagggaagtttcttcaaacaaaacccagctcctgagtctccagatgttgttctgtcagttgccaaaggactttgctgaccactgcatggggatccaaccaattcaattaatgtcttcatattgaagaagagatgtaccttcaattgaaaacctcgtttttcttttgtttgcattttctgcaaaaaggaaaaagaaaccacaaattggggaaaaaaaaagaagaaaaacctgtttccgtgtgcaaaagcacacatatgtatgtctgtgttataaaatgactgtgcttgttcgtaacagatgcaaacaagaaagaagaactgggaagtctttgtccctaggaaatccaaaggggctggaatatggtgttggtttggctttctggttggcccaatcggcctattggctcaatgggaagagaggagagggagaaaaataaaatgaaaggaaaaaaaaaagtttgcaaattcagacaggaaacaggtgagtggtttgaattggatgcagtgtgggccatcctggaatgatactgactgattaattattcctgataacatctcaagaaaaggagaaggaaagtgtttctggagaatgttctttcacatcactggaatctgcaattcaagaagtgacaagggagaattcttgctttacctatggactggcttaagccgtgtggcatccgaggaatgtttcaaatgtgtctgtgtttctctttacattccttgttgtacctcattgttcaattcacttttgtaaattccacctaacatttaattattttaaatttctccttttaccttaatctccttgctaattttatctgtctaattaaaaagagcagaagcatgtctgggtttacgtaaaaaaaaaaaaaaaaaa

SEQ ID NO: 472 - protein, 984 aa, Homo sapiens
MALDYLLLLLLASAVAAMEETLMDTRTATAELGWTANPASGWEEVSGYDENLNTIRTYQVCNVFEPNQNNWLLTTFINRRGAHRIYTEMRFTVRDCSSLPNVPGSCKETFNLYYYETDSVIATKKSAFWSEAPYLKVDTIAADESFSQVDFGGRLMKVNTEVRSFGPLTRNGFYLAFQDYGACMSLLSVRVFFKKCPSIVQNFAVFPETMTGAESTSLVIARGTCIPNAEEVDVPIKLYCNGDGEWMVPIGRCTCKPGYEPENSVACKACPAGTFKASQEAEGCSHCPSNSRSPAEASPICTCRTGYYRADFDPPEVACTSVPSGPRNVISIVNETSIILEWHPPRETGGRDDVTYNIICKKCRADRRSCSRCDDNVEFVPRQLGLTECRVSISSLWAHTPYTFDIQAINGVSSKSPFPPQHVSVNITTNQAAPSTVPIMHQVSATMRSITLSWPQPEQPNGIILDYEIRYYEKEHNEFNSSMARSQTNTARIDGLRPGMVYVVQVRARTVAGYGKFSGKMCFQTLTDDDYKSELREQLPLIAGSAAAGVVFVVSLVAISIVCSRKRAYSKEAVYSDKLQHYSTGRGSPGMKIYIDPFTYEDPNEAVREFAKEIDVSFVKIEEVIGAGEFGEVYKGRLKLPGKREIYVAIKTLKAGYSEKQRRDFLSEASIMGQFDHPNIIRLEGVVTKSRPVMIITEFMENGALDSFLRQNDGQFTVIQLVGMLRGIAAGMKYLAEMNYVHRDLAARNILVNSNLVCKVSDFGLSRYLQDDTSDPTYTSSLGGKIPVRWTAPEAIAYRKFTSASDVWSYGIVMWEVMSFGERPYWDMSNQDVINAIEQDYRLPPPMDCPAALHQLMLDCWQKDRNSRPRFAEIVNTLDKMIRNPASLKTVATITAVPSQPLLDRSIPDFTAFTTVDDWLSAIKMVQYRDSFLTAGFTSLQLVTQMTSEDLLRIGITLAGHQKKILNSIHSMRVQISQSPTAMA

SEQ ID NO: 473 - DNA, 3206 bp, Homo sapiens
gtttataacttgaaaaatcctctccgtctcccttccctgcctcctttcctttccctttcctctgccagtacaactagacccggcgtctggcgtccccggtgcccagcattctgcggggcaggcggattaattggaattcttcaaaatgtcaggtgtggtacccacagcccctgaacagcctgcaggtgaaatggaaaatcaaacaaaaccaccagatccaaggcctgatgctcctcctgaatacagttctcattttttaccaggaccccctggaacagctgtccctccacctactggctacccaggaggcttgcctatgggatactacagtccacagcaacccagtaccttccctttgtaccagccagttggtggtatccatcctgtccggtatcagcctggcaaatatcctatgccaaatcagtctgttccaataacatggatgccagggccaactcctatggcaaactgccctcctggtctggaatacttagttcagttggacaacatacatgttcttcagcattttgagcctctggaaatgatgacatgttttgaaactaataatagatatgatattaaaaacaactcagaccagatggtttacgttgtaaccgaagacacagatgactttaccaggaatgcctatcggacactaaggcccttcgtcctccgggtcactgattgtatgggccgagaaatcatgacaatgcagagacccttcagatgcacctgctgttgcttctgttgcccctctgccagacaagagctggaggtgcagtgtcctcctggtgtcaccattggctttgttgcggaacattggaacctgtgcagggcggtgtacagcatccaaaatgagaagaaagaaaatgtgatgagagttcgtgggccatgctcaacctatggctgtggttcagattctgtttttgaggtcaaatcccttgatggcatatccaacatcggcagtattatccggaagtggaatggtttgttatcagcaatggcagatgctgaccattttgacattcacttcccactagacctggatgtgaagatgaaagccatgatttttggagcttgcttcctcattgacttcatgtattttgaaagatctccaccacaacgttcaagatagagagacacagcaagccatcaactatggttaattttgaaaaatggaaaagttggattgggcttacagtcagcactcagttatttgcaagtgtatttctttgctttgtagagtatttttattgggtgttaactttgacagctgagagtgggcttgcaagaacacaatctaaaagtgtgtttcaattgagtatctctctagtagaataggagttcatcctgaaaagctgtgactcattaacccagtaaacatatacaaagtaagcttaaaacactataaacatgagataagggaaaatgaatccagagttctcatattaataggtagtgaaacaataaggctttttagagcagactttgttggcataaaataacctggcttctatccctaaccctttcctacctttcctctccgtcaacatgtcctcatactgaagacaaacttgtttcaatgatagtcttcatttttaaaaacaaaaaggcaggcagacagaaataatgatgttttcttgcactaagaaggtactacttgtacacatatatcaaaacctcattctgcaaagtttttgaaggtttcaatgggaaatttgattttattacaaaataaaacattttttaatgttaaagtttatatattccatgcttgttttctcattcactggcatggatgatcaggagctgcctatatatgaaggcagaatcagactatcaggaaaggagctggccagggccacagccagtcaagatctctgagcaacttagagacattggtgtcattatatgaagcttgcatttaatacatttatacataatacatttgtacatttaattcataacgtctcttggtcacagatgccttatatataaaataagttgccagatctctaagattgcctagtacacctttgtatctcatttgatgtgatacccagaagagatcattgttttttgtttttgtttttgtttttttcaagaagatccttcgtgatcaccatgctgttctcatggtaagaactggagttatgtttttaaatttgaaaatatgacattttatgtagcactatataaaaagtgaaagcgacaaattccaccgctgcttaatactgctttgcttctttttattgacatgatagatacatatgtatctacacagagtaataataataaaacacagtaaacattctatttctctatggtctacagcatgccagtaaataatatgtaggaccaataataaattatcaattacacatttttgtgttaactaattaaaagcatagtgtataagtgagtacactctaattaacttgcttctgttgcactttagttttctacctgcatatggactgcatttttttttttaacacagtcagtatgtagaatgggatgtattcttctgctgctgcttattaaataaagaaagcctgagtgttcttagatggggttattctgagatgagggtcttagcctacagttctttttgaaatgaaaggtgctttgttttttaattatattcatcttttcagggtaaatttgtttttctgagtttctcgtaatgctcatttttacatgctgctactagcttttttttttaaaaaaagtaaaagttgctgctttctaaaatattaattgccttatatttgaaagtgccattgcaatcgtaagtagactatgtatttcctataatgatgtctgatatttaaataggaaatcagacaaacaatattcagaaagtttaagcatataaactttttatttttaacttgcctagatccctgtattccaaaacctgctgcatcataataaatatatctatatatatttagcataagacgtgatatttttaatttcttttttaaaaaattatatttgtctcttagagttaaaattttctttatataatattgtcatatgtcatagttttaatacaattcacatgatttctatgtttcttaatgatattttgttgtgtaaaattgatcggattgattaaaaaacaaattctctggaatttgtgcgttcatgctttttcgtattctttatggcttttaaataaatatacaatggttaatagt

SEQ ID NO: 474 - protein, 329 aa, Homo sapiens
MSGVVPTAPEQPAGEMENQTKPPDPRPDAPPEYSSHFLPGPPGTAVPPPTGYPGGLPMGYYSPQQPSTFPLYQPVGGIHPVRYQPGKYPMPNQSVPITWMPGPTPMANCPPGLEYLVQLDNIHVLQHFEPLEMMTCFETNNRYDIKNNSDQMVYVVTEDTDDFTRNAYRTLRPFVLRVTDCMGREIMTMQRPFRCTCCCFCCPSARQELEVQCPPGVTIGFVAEHWNLCRAVYSIQNEKKENVMRVRGPCSTYGCGSDSVFEVKSLDGISNIGSIIRKWNGLLSAMADADHFDIHFPLDLDVKMKAMIFGACFLIDFMYFERSPPQRSR

SEQ ID NO: 475 - DNA, 3857 bp, Homo sapiens
ccgcggtcggcggcagcgctctcctaagctctcgcggctgcgcttcggtcccggacccgggccacccacggggtagtgggtgctcctcggccccggacattgcaagccccagaaggcaagactaactcggtgttgctcctcccggcgctgacttcgaggcccggctatggacggcgagagcgaggtggatttttctagcaacagcataacccctttgtggcggaggcggtcgattcctcagccccaccagcttctgggccggagcaagccgaggccccagtcctaccagagccccaacgggttactaattacggatttcccggtggaggacggagggacgctctccgcagcgcagattcccgcccaggtgcccaccgcctcggacagcaggacggtacataggagccccctgcttctgggcgcccagcggagagcggtggccaatggtgggacggcatccccggagtacagggctgcctctcctcgacttcgacggcccaagtcacccaagctccccaaagcggtgcctggcggctccccgaaatccccagcaaatggcgcggtgaccttgcctgcgccgccgccgccgccggttctgcgccccccgcggactcctaacgcgcccgccccctgcacccccgaggaggaccttactgggttgactgccagcccggtgccttcgcccactgcaaatggccttgccgctaataacgactctcctgggtcaggttcgcagtccggccggaaggcaaaggaccccgaacgggggctctttcctgggccccagaaaagttcttcggaacaaaaactccccctccaaaggctgccctcccaggagaacgagctcctcgagaatccttccgtggttttgagtacaaacagccccgccgccctcaaagtggggaagcagcagatcattccgaagagtctggcctcggaaattaaaataagtaaatccaacaatcaaaatgtggagccccacaagagactcctcaaggtgcgcagcatggtggagggcctaggaggacccctgggtcacgcaggggaggagagtgaggtcgataacgacgtggatagcccagggtctctgcggagaggcttgcggtccacgtcttatcgcagggcagtggtcagtggctttgattttgacagtcctaccagctcgaagaagaagaacagaatgtcccagcctgttctgaaagtggtgatggaagacaaggagaagttttccagtctgggaaggataaagaaaaaaatgctgaaaggacaaggaacatttgatggggaagaaaatgctgtcctgtatcaaaactacaaggaaaaggcccttgacattgattctgatgaagagtcagagcccaaagaacagaagtcagatgaaaaaattgtgattcaccataagccattgagatccacatggagccaactctctgcggtgaaaagaaagggattatctcagacagtaagccaggaggaaagaaagagacaagaggctatctttgaagtcatatcctctgaacattcatatttactcagcttggagatcttgatacgaatgtttaaaaattctaaagaactgagtgatacaatgactaaaaccgagaggcaccatcttttctccaatattacagatgtctgtgaggcaagcaaaaagttctttatagagttggaagcaagacatcagaataatatcttcatagatgacataagtgacattgtggaaaaacacacagcatccacatttgacccatatgtgaaatactgcacaaatgaagtctaccaacaacgaacactacaaaaattgttagctaccaatccttcctttaaggaagtattgtcaaggattgagtcccatgaagactgtaggaacttacccatgatctcttttctcattctccccatgcagagggtgacccgccttcccctgctgatggatactatctgtcaaaaaacacctaaggactctccgaagtatgaagtctgcaaaagagccttgaaggaagttagcaagttggttcgactatgcaatgagggcgcccggaagatggaaaggactgagatgatgtacacaattaactcccagctggaatttaaaattaagccttttcctttagtctcctcttcccggtggttggtaaaaagaggtgaattgacagcctatgttgaagacactgtgcttttctcaagaaggacatccaaacagcaagtctacttctttctctttaacgatgtgctcattatcaccaagaagaagagtgaagaaagttacaacgtcaatgattattccttaagagatcagctattggtggaatcttgtgacaatgaagagcttaattcttctccagggaagaacagctccacaatgctctattcaagacagagctctgccagtcacctctttactctgacagtccttagtaaccacgcgaatgagaaagtggagatgctactaggagctgagacgcagagcgagcgagcccgctggataactgccctgggacacagcagagggaagccgcctgcagaccgaacctcactgacccaggtggaaatcgttaggtcatttactgctaagcagccagatgaactctccctgcaggtggctgacgtcgtcctcatctatcaacgtgtcagcgatggctggtatgagggggaacgactacgagatggagaaagaggctggtttcctatggaatgtgccaaggagataacatgtcaagctacaattgataagaatgtggagagaatgggacgcttgctaggactggagaccaacgtgtagtctctcagatggtcttttgttactgcaagatttgcacgacacttaccgggctggttggttctgggctagttttattgttaattttgtcacagcctatttaattaaaagaacgaaaacacttgcctttaagcttgccaggttgttccgctctctcatgagaagagcttggatacagtgagtttgcacagctcagtttttacctaaccacacacttgcagacctcctgaggtacacagagtagctgagcagttcacttcagggatcaggtcatctctgctcctcctagtttcaccatgttctggcaataaaaaacacatattatatcctggttttctctatccttgcattactaaggtgactgtctctctttatacatccttgtatggttctcccagtattagcaagattgtatatctgtaaagaatgtccagttttgtaaatatttccctgcctttttttttctttttttacatctgattttaatgcttcgttaacttcaaaaggaactggtagagttcagaaggtgagctgttgtttttctaaacctcttcccaggaaggggacattgacacttgaatttttgtcacctttttcctcattagaaggaaagtagaaagccttactgtaggatttttaaaaaaaaatccatctcaccccatattggtcttaaataagtatagactaattaacctaagctacctttaacaacgtagaatttagatgggttcatatatgtgagaaaaacctgaatataggacaggggtcctacttttttccccacctctgtcgcccaggctagagtatagtggtgtgatcttggcccactgcaacctctgcttcctaggttcaagtgattctcctgcctcagcctcccaagtagctgggattgtaagagtatgccaccacgcccagctactttttgtatttttagtagagacagggtttcatcatgttggccaggatggtctcttaactcctgccctcaagtgatccaccagagaggagatcctcggcctccccaagtgctgggattataggcatgagccaccgtgcccagcctactttctaattaatt

SEQ ID NO: 476 - protein, 871 aa, Homo sapiens
MDGESEVDFSSNSITPLWRRRSIPQPHQLLGRSKPRPQSYQSPNGLLITDFPVEDGGTLSAAQIPAQVPTASDSRTVHRSPLLLGAQRRAVANGGTASPEYRAASPRLRRPKSPKLPKAVPGGSPKSPANGAVTLPAPPPPPVLRPPRTPNAPAPCTPEEDLTGLTASPVPSPTANGLAANNDSPGSGSQSGRKAKDPERGLFPGPQKSSSEQKLPLQRLPSQENELLENPSVVLSTNSPAALKVGKQQIIPKSLASEIKISKSNNQNVEPHKRLLKVRSMVEGLGGPLGHAGEESEVDNDVDSPGSLRRGLRSTSYRRAVVSGFDFDSPTSSKKKNRMSQPVLKVVMEDKEKFSSLGRIKKKMLKGQGTFDGEENAVLYQNYKEKALDIDSDEESEPKEQKSDEKIVIHHKPLRSTWSQLSAVKRKGLSQTVSQEERKRQEAIFEVISSEHSYLLSLEILIRMFKNSKELSDTMTKTERHHLFSNITDVCEASKKFFIELEARHQNNIFIDDISDIVEKHTASTFDPYVKYCTNEVYQQRTLQKLLATNPSFKEVLSRIESHEDCRNLPMISFLILPMQRVTRLPLLMDTICQKTPKDSPKYEVCKRALKEVSKLVRLCNEGARKMERTEMMYTINSQLEFKIKPFPLVSSSRWLVKRGELTAYVEDTVLFSRRTSKQQVYFFLFNDVLIITKKKSEESYNVNDYSLRDQLLVESCDNEELNSSPGKNSSTMLYSRQSSASHLFTLTVLSNHANEKVEMLLGAETQSERARWITALGHSRGKPPADRTSLTQVEIVRSFTAKQPDELSLQVADVVLIYQRVSDGWYEGERLRDGERGWFPMECAKEITCQATIDKNVERMGRLLGLETNV

SEQ ID NO: 477 - DNA, 3600 bp, Homo sapiens
cacgaggggcttccgggcccggacgccatttccagcggttgctggttctgacgggttgtagtctgccaggacaatgagttatgactaccatcagaactggggccgtgatgggggtccccgcagctccggtgggggctatggaggggggccagcagggggtcatggaggtaaccgaggctccggaggaggcggcggcggcggagggggtggtcgaggcggcaggggccggcatcccgggcacctgaaaggccgcgaaatcggcatgtggtacgcgaaaaaacaggggcagaagaacaaggaagcggagaggcaagagagagctgtagtacacatggatgaacgacgagaagaacaaattgtacagttactgaattctgttcaagcgaagaatgataaagagtcagaagcacagatatcctggtttgctcctgaggatcatggatacggtactgaagtttctactaagaacacaccatgctcagagaacaaacttgacatccaggaaaagaagttgataaatcaagaaaaaaaaatgtttagaatcaggaacagatcatatattgaccgagattctgagtatctcttgcaagaaaatgaaccagatggaactttagaccaaaaattattggaagatttacaaaagaaaaaaaatgaccttcggtatattgaaatgcagcatttcagagaaaagctgccttcgtatggaatgcaaaaggaattggtaaatttaattgataaccatcaggtaacagtaataagtggtgaaactggttgtggcaaaaccactcaagttactcagttcattttggataactacattgaaagaggaaaaggatctgcttgcagaatagtttgtactcagccaagaagaattagtgccatttcagttgcggaaagagtagctgcagaaagggcagaatcttgtggcagtggtaatagtactggatatcaaattcgtctccagagtcggttgccaaggaaacagggttctatcttatactgtacaacaggaatcatccttcagtggctccagtcagacccgtatttgtccagtgttagtcatatcgtacttgatgaaatccatgaaagaaatctgcagtcagatgttttaatgactgttgttaaagaccttctcaattttcgatctgacttgaaagtaatattgatgagtgcaacattgaatgcagaaaagttttcagaatattttggtaactgtccaatgatacatatacctggttttacctttccggttgtggaatatcttttggaagatgtaattgaaaaaataaggtatgttccagaacaaaaagaacacagatgccagtttaagaggggtttcatgcaagggcatgtaaatagacaagaaaaagaagaaaaagaagcaatatataaagaacgttggccagattatgtaagggaactgcgaagaaggtattctgcaagtactgtagatgttatagaaatgatggaggatgataaagttgatctgaatttgattgttgccctcatccgatacattgttttggaagaagaggatggtgcgatactggtctttctgccaggctgggacaatatcagcactttacatgatctcttgatgtcacaagtaatgtttaaatcagataaatttttaattatacctttacattcactgatgcctacagttaaccagacacaggtgtttaaaagaacccctcctggtgttcggaaaatagtaattgctaccaacattgcggagactagcattaccatagatgatgtcgtttatgtgatagatggaggaaaaataaaagagacgcattttgatactcagaacaatatcagtacaatgtccgctgagtgggttagtaaagctaatgccaaacagagaaaaggtcgagctggaagagttcaacctggtcattgctatcatctgtataatggtcttagagcaagtcttctagatgactatcaactgccagaaattttgagaactcctttggaagaactttgtttacaaataaagattttaaggctaggtggaattgcttattttctgagtagattaatggacccaccatcaaatgaggcagtgttactctccataagacacctgatggagctgaacgctttggataaacaagaagaattgacacctcttggagtccacttggcacgattacccgttgagccacatattggaaaaatgattctttttggagcactgttctgctgcttagacccagtactcactattgctgctagtctcagtttcaaagatccatttgtcattccactgggaaaagaaaagattgcagatgcaagaagaaaggaattggcaaaggatactagaagtgatcacttaacagttgtgaatgcgtttgagggctgggaagaggctaggcgacgtggtttcagatacgaaaaggactattgctgggaatattttctgtcttcaaacacactgcagatgctgcataacatgaaaggacagtttgctgagcatcttcttggagctggatttgtaagcagtagaaatcctaaagatccagaatctaatataaattcagataatgagaagataattaaagctgtcatctgtgctggtttatatcccaaagttgctaaaattcgactaaatttgggtaaaaaaagaaaaatggtaaaagtttacacaaaaaccgatggcctggttgctgttcatcctaaatctgttaatgtggagcaaacagactttcactacaactggcttatctatcacctaaagatgagaacaagcagtatatacttgtatgactgcacagaggtttccccatactgtctcttgttttttggaggtgacatttccatccagaaggataacgatcaggaaactattgctgtagatgagtggattgtatttcagtctccagcaagaattgcccatcttgttaaggaattaagaaaggaactagatattcttctgcaagagaagattgaaagtcctcatcctgtagactggaatgacactaaatccagagactgtgcagtactgtcagctattatagacttgatcaaaacacaggaaaaggcaactcccaggaactttccgccacgattccaggatggatattacagctgacagcttttcaggggtggtctgaaaagccagtttgacagccattcttcatcattgtttaaattttggctggatgccaaaccctgggacatgaacaattttcatgtgtaaggtagaagccttcagtaggtagtaaagacttaatgtgcatgacttgatgttatatgtagagatatatatatatatatatataccataaaagcaatatgttctctgatcatatactctgctgtggtcatgcccactctttgggagtatattccctttatatatattgagtattgtaccacttgagaaattcctttgttctgttatacaaaattaatctttctgctcataatgattgatgataccaccagtaaaaataggatgtttaccccaaaacaagtgtcaattaagaatttgaacacaaccacattttttaaaatgaaacttctatcggaagtaaattaatttgttgtaataaagtccagtatttaataaaatgtacaatgttaaatctc

SEQ ID NO: 478 - protein, 1008 aa, Homo sapiens
MSYDYHQNWGRDGGPRSSGGGYGGGPAGGHGGNRGSGGGGGGGGGGRGGRGRHPGHLKGREIGMWYAKKQGQKNKEAERQERAVVHMDERREEQIVQLLNSVQAKNDKESEAQISWFAPEDHGYGTEVSTKNTPCSENKLDIQEKKLINQEKKMFRIRNRSYIDRDSEYLLQENEPDGTLDQKLLEDLQKKKNDLRYIEMQHFREKLPSYGMQKELVNLIDNHQVTVISGETGCGKTTQVTQFILDNYIERGKGSACRIVCTQPRRISAISVAERVAAERAESCGSGNSTGYQIRLQSRLPRKQGSILYCTTGIILQWLQSDPYLSSVSHIVLDEIHERNLQSDVLMTVVKDLLNFRSDLKVILMSATLNAEKFSEYFGNCPMIHIPGFTFPVVEYLLEDVIEKIRYVPEQKEHRCQFKRGFMQGHVNRQEKEEKEAIYKERWPDYVRELRRRYSASTVDVIEMMEDDKVDLNLIVALIRYIVLEEEDGAILVFLPGWDNISTLHDLLMSQVMFKSDKFLIIPLHSLMPTVNQTQVFKRTPPGVRKIVIATNIAETSITIDDVVYVIDGGKIKETHFDTQNNISTMSAEWVSKANAKQRKGRAGRVQPGHCYHLYNGLRASLLDDYQLPEILRTPLEELCLQIKILRLGGIAYFLSRLMDPPSNEAVLLSIRHLMELNALDKQEELTPLGVHLARLPVEPHIGKMILFGALFCCLDPVLTIAASLSFKDPFVIPLGKEKIADARRKELAKDTRSDHLTVVNAFEGWEEARRRGFRYEKDYCWEYFLSSNTLQMLHNMKGQFAEHLLGAGFVSSRNPKDPESNINSDNEKIIKAVICAGLYPKVAKIRLNLGKKRKMVKVYTKTDGLVAVHPKSVNVEQTDFHYNWLIYHLKMRTSSIYLYDCTEVSPYCLLFFGGDISIQKDNDQETIAVDEWIVFQSPARIAHLVKELRKELDILLQEKIESPHPVDWNDTKSRDCAVLSAIIDLIKTQEKATPRNFPPRFQDGYYS

SEQ ID NO: 479 - DNA, 2323 bp, Homo sapiens
cttggtaggaggaatgaaatctgatttgcagcagccggtctttcttttgagaaaattatcagactcattgataagggaaattaaatattgaccaaggacaatgtctttatttctcagtaacttatcaacaaatgactctagcctgtggaaagagaatcataattctacggaccttttaaatccgccaggaaccctgaatatctatcttttttgcttgacatgtctcatgacttttgcagccttggtgggcagcatttattcactaatttccctgctgaaaatgcagaacagaactgttgtgtccatgcttgtggcttcctggtctgtggatgatctcatgagcgtcctgtcggtgaccatcttcatgtttttgcagtggccaaacgaggtccccggttacttccaatttctgtgcaccacctctgccttaatgtatttatgccagggcctctctagcaacttgaaggcgactctcctagtctcttacaacttttatacgatgcacagaggtgtggggagccagacagcctccagaagatcgggccaggtgctcggcgtggtgctgaccgtgtgggcagccagtctgctgctctcggcgctcccgctgtgcggctggggcgccttcgtgcgcacgccctggggctgcctggtggactgctccagctcctacgtactattcctctctatcgtgtacgctttggccttcggactcctcgtgggcctctcagtcccactcactcaccgattgctgtgttcggaggagccgccgagactccactccaactaccaggaaatttcccgtggagcttcaattcctgggacccctcctactgcggggagagtggtttccctgtccccagaggatgctccaggcccgagtctgcggcgctctgggggatgctctccgagctccgacaccgtgttcggaccgggtgcgcccgctgccgctggggctgaagcctgcaggcgtgagaaccgggggactctctatggcaccaggagcttcaccgtgagcgtagcgcagaagcgcttcgctttgatcctagcgcttacaaaagtcgtcctttggctgcccatgatgatgcacatggtggtccagaacgtcgtggggtttcagagccttcccttggagacattcagctttctacttaccctgctggccaccactgtaaccccagtgtttgtcttgtccaaacgctggacccacttgccctgtggctgcatcatcaactgcaggcagaacgcatatgcagtggcgtccgatgggaaaaaaatcaagagaaaaggctttgaattcaatctatcattccaaaaaagttatgggatttataaaatagcacatgaagattactatgatgatgatgaaaattccatattctatcacaacctgatgaactctgagtgtgaaactacaaaagaccctcagagagacaaccgtaacatcttcaatgctataaaagtagaaatcagcaccacgccctctctggacagctccacacaaagaggcatcaacaaatgcacaaatactgatattacagaagctaaacaggattccaacaacaaaaaggatgcgttttctgacaaaacaggaggtgatattaactatgaagaaactaccttttctgaagggccagaaagaagactgtctcatgaagagagtcagaaaccagatctttcagactgggagtggtgtaggagtaaatcagaaagaacccctcgtcagcgttccggttatgcccttgccattcccttgtgtgcattccaggggactgtgtctctccatgcacctacagggaaaaccctatctctttctacctatgaggtaagcgcagaagggcaaaaaataactccagcctctaagaaaatagaagtctatcgatccaaaagtgttggccatgaaccaaactcagaagattcttcatccacgtttgtggacaccagtgtgaaaatacacttggaggttcttgaaatttgtgataatgaagaggccttggacactgtgtcaatcattagtaacatcagtcagtcctccacacaagtcagatctccatccctacgttactccaggaaagaaaacagatttgtttcatgtgacctaggggaaacagcctcatactccctctttttgcccaccagtaatcctgatggtgatattaatatctccattccagacacagtagaagcacacaggcagaacagtaaaaggcagcatcaagagagggatggctaccaggaggaaatccagttgttaaataaagcttacagaaaaagagaggaagaaagcaagggtagttagtgggtatttggtctaacaggagcaaga

SEQ ID NO: 480 - protein, 731 aa, Homo sapiens
MSLFLSNLSTNDSSLWKENHNSTDLLNPPGTLNIYLFCLTCLMTFAALVGSIYSLISLLKMQNRTVVSMLVASWSVDDLMSVLSVTIFMFLQWPNEVPGYFQFLCTTSALMYLCQGLSSNLKATLLVSYNFYTMHRGVGSQTASRRSGQVLGVVLTVWAASLLLSALPLCGWGAFVRTPWGCLVDCSSSYVLFLSIVYALAFGLLVGLSVPLTHRLLCSEEPPRLHSNYQEISRGASIPGTPPTAGRVVSLSPEDAPGPSLRRSGGCSPSSDTVFGPGAPAAAGAEACRRENRGTLYGTRSFTVSVAQKRFALILALTKVVLWLPMMMHMVVQNVVGFQSLPLETFSFLLTLLATTVTPVFVLSKRWTHLPCGCIINCRQNAYAVASDGKKIKRKGFEFNLSFQKSYGIYKIAHEDYYDDDENSIFYHNLMNSECETTKDPQRDNRNIFNAIKVEISTTPSLDSSTQRGINKCTNTDITEAKQDSNNKKDAFSDKTGGDINYEETTFSEGPERRLSHEESQKPDLSDWEWCRSKSERTPRQRSGYALAIPLCAFQGTVSLHAPTGKTLSLSTYEVSAEGQKITPASKKIEVYRSKSVGHEPNSEDSSSTFVDTSVKIHLEVLEICDNEEALDTVSIISNISQSSTQVRSPSLRYSRKENRFVSCDLGETASYSLFLPTSNPDGDINISIPDTVEAHRQNSKRQHQERDGYQEEIQLLNKAYRKREEESKGS

SEQ ID NO: 481 - DNA, 5494 bp, Homo sapiens
cccctttgcttttactctgtccaaagttaacatgtcactgaaaaacgagccacgggtaaatacctctgcactgcagaaaattgctgctgacatgagtaatatcatagaaaatctggacacgcgggaactccactttgagggagaggaggtagactacgacgtgtctcccagcgatcccaagatacaagaagtgtatatccctttctctgctatttataacactcaaggatttaaggagcctaatatacagacgtatctctccggctgtccaataaaagcacaagttctggaagtggaacgcttcacatctacaacaagggtaccaagtattaatctttacactattgaattaacacatggggaatttaaatggcaagttaagaggaaattcaagcattttcaagaatttcacagagagctgctcaagtacaaagcctttatccgcatccccattcccactagaagacacacgtttaggaggcaaaacgtcagagaggagcctcgagagatgcccagtttgccccgttcatctgaaaacatgataagagaagaacaattccttggtagaagaaaacaactggaagattacttgacaaagatactaaaaatgcccatgtatagaaactatcatgccacaacagagtttcttgatataagccagctgtctttcatccatgatttgggaccaaagggcatagaaggtatgataatgaaaagatctggaggacacagaataccaggcttgaattgctgtggtcagggaagagcctgctacagatggtcaaaaagatggttaatagtgaaagattcctttttattgtatatgaaaccagacagcggtgccattgccttcgtcctgctggtagacaaagaattcaaaattaaggtggggaagaaggagacagaaacgaaatatggaatccgaattgataatctttcaaggacacttattttaaaatgcaacagctatagacatgctcggtggtggggaggggctatagaagaattcatccagaaacatggcaccaactttctcaaagatcatcgatttgggtcatatgctgctatccaagagaatgctttagctaaatggtatgttaatgccaaaggatattttgaagatgtggcaaatgcaatggaagaggcaaatgaagagatttttatcacagactggtggctgagtccagaaatcttcctgaaacgcccagtggttgagggaaatcgttggaggttggactgcattcttaaacgaaaagcacaacaaggagtgaggatcttcataatgctctacaaagaggtggaactcgctcttggcatcaatagtgaatacaccaagaggactttgatgcgtctacatcccaacataaaggtgatgagacacccggatcatgtgtcatccaccgtctatttgtgggctcaccatgagaagcttgtcatcattgaccaatcggtggcctttgtgggagggattgacctggcctatggaaggtgggacgacaatgagcacagactcacagacgtgggcagtgtgaagcgggtcacttcaggaccgtctctgggttccctcccacctgccgcaatggagtctatggaatccttaagactcaaagataaaaatgagcctgttcaaaacctacccatccagaagagtattgatgatgtggattcaaaactgaaaggaataggaaagccaagaaagttctccaaatttagtctctacaagcagctccacaggcaccacctgcacgacgcagatagcatcagcagcattgacagcacctccagttattttaatcactatagaagtcatcacaatttaatccatggtttaaaaccccacttcaaactctttcacccgtccagtgagtctgagcaaggactcactagacctcatgctgataccgggtccatccgtagtttacagacaggtgtgggagagctgcatggggaaaccagattctggcatggaaaggactactgcaatttcgtcttcaaagactgggttcaacttgataaaccttttgctgatttcattgacaggtactccacgccccggatgccctggcatgacattgcctctgcagtccacgggaaggcggctcgtgatgtggcacgtcacttcatccagcgctggaacttcacaaaaattatgaaatcaaaatatcggtccctttcttatccttttctgcttccaaagtctcaaacaacagcccatgagttgagatatcaagtgcctgggtctgtccatgctaacgtacagttgctccgctctgctgctgattggtctgctggtataaagtaccatgaagagtccatccacgccgcttacgtccatgtgatagagaacagcaggcactatatctatatcgaaaaccagtttttcataagctgtgctgatgacaaagttgtgttcaacaagataggcgatgccattgcccagaggatcctgaaagctcacagggaaaaccagaaataccgggtatatgtcgtgataccacttctgccagggttcgaaggagacatttcaaccggcggaggaaatgctctacaggcaatcatgcacttcaactacagaaccatgtgcagaggagaaaattccatccttggacagttaaaagcagagcttggtaatcagtggataaattacatatcattctgtggtcttagaacacatgcagagctcgaaggaaacctagtaactgagcttatctatgtccacagcaagttgttaattgctgatgataacactgttattattggctctgccaacataaatgaccgcagcatgctgggaaagcgtgacagtgaaatggctgtcattgtgcaagatacagagactgttccttcagtaatggatggaaaagagtaccaagctggccggtttgcccgaggacttcggctacagtgctttagggttgtccttggctatcttgatgacccaagtgaggacattcaggatccagtgagtgacaaattcttcaaggaggtgtgggtttcaacagcagctcgaaatgctacaatttatgacaaggttttccggtgccttcccaatgatgaagtacacaatttaattcagctgagagactttataaacaagcccgtattagctaaggaagatcccattcgagctgaggaggaactgaagaagatccgtggatttttggtgcaattccccttttatttcttgtctgaagaaagcctactgccttctgttgggaccaaagaggccatagtgcccatggaggtttggacttaagagatattcattggcagctcaaagacttccaccctggagaccacactgcacacagtgacttcctggggatgtcatagccaaagccaggcctgacgcattctcgtatccaacccaaggaccttttggaatgactggggagggctgcagtcacattgatgtaaggactgtaaacatcagcaagactttataattccttctgcctaacttgtaaaaagggggctgcattcttgttggtagcatgtactctgttgagtaaaacacatattcaaattccgtataccaaaatccatttcctttgtaacaagaatttaccagtaactgtgatctaggttgccaaaagttgtctgaatctccttattcttctctgatcttcatttatgcagccaatgtctagctggacctgccctcatcttgcagttcatacaggcactgtttgagagattgtttattattagatgttgtaatgctgcttcaagattcttcatggttacatgggatgcccctgctcatctggtcctgaagtagtaacattcacccaaatgaggatatagtcattattccttttcagtcactgtacgaacacggcagactttagcctacacagtagactgtgttaggcacttctggtaacattgacactgtatcttgacaccactaagcaacaggaaggaataaattccaatattgagacagagatttatttcattttgctcccaaaggcactgacaacatgagtccttgtgattaggcccacctgatcaaatgtaaaaacatgcatgggatatttgattacgtaacaaccagctaaaactgagagcacacagccttcggaaacccccaaggtgtcgaggaggatcagatccagataagagaagatgattccttctagtcctgtaaaatttcctgtcatccttagctgctgggttgattgaaatttgatctctacatttcaaaatcaaactagtgaatacagtttgtctttcaagagaatcagaggcatcgtaactcctaccaagttagtaagtatgagtctaaccttgtttgacattcaggtcttctgctacattatcttctttgagaaaaattaattgattataaaatatgtgctacttcacttacattattaaatatgtattaacgcctctcaccagggcttccagtgaagttacaatgccctagtctgtgaattagtctggaaacgtgtttttccttttcggatgttagagtaccctttgataaactaaattttactaagctgaacaactctgacagtctaaagagctaatgtgggttaccaaaaggcctgtacctgtaaaacaaaatgcaggtgtaatgattatacatgtatatggattacctggacatactctcatttgggttgttcttcaaagaagcaagcagccgatccctgttttcataaagctaatacttcagttggaaaaattaaacaggagcacaaagtcagggataggggttagcagaagagagaaatagtgtcacatcaagggcaggatctcatagctagggaacatttcacaaataaggtgagattttgtaaccaataataaaaatgaatgtttttataagtaaataacttatttttcatatggctaaagatggtaaaatgacttcattctatagccattgtaaataagaatttgctattgatgaaagaagttcagattggcatttgaagtattgagtgtatgggatctctaaggatttcttagattttatatttaaatattttttaaaccttagaggagtcaacaaactggctcttgattttcagcaccctactctcatgaaaaaagcctgaaaggaccctttcccttataagtaatttaatccaatttctccccattttatagatgaggaaactgaggctcagatcagatgagaactcacttaaatccactcaatgtgtagatggtagagctgggactagcaacattgctgcagcccattgttggcctctctcttcactttatcattgcccaagaatgaggatatgcagtaaacagaattcaggcaagatacctctaagctgttttgaaccctctgatattttgtatttatgtgtttgtctgtctccccctactagaatgtaagctccatggggcagggacttcactgtattttgttcatagtgtatccccagagcctggaccagtgcttggcacataggagatggcaataaatgcttgtagaattaataaacaaaaaaaaaaaaaaaaa

SEQ ID NO: 482 - protein, 1074 aa, Homo sapiens
MSLKNEPRVNTSALQKIAADMSNIIENLDTRELHFEGEEVDYDVSPSDPKIQEVYIPFSAIYNTQGFKEPNIQTYLSGCPIKAQVLEVERFTSTTRVPSINLYTIELTHGEFKWQVKRKFKHFQEFHRELLKYKAFIRIPIPTRRHTFRRQNVREEPREMPSLPRSSENMIREEQFLGRRKQLEDYLTKILKMPMYRNYHATTEFLDISQLSFIHDLGPKGIEGMIMKRSGGHRIPGLNCCGQGRACYRWSKRWLIVKDSFLLYMKPDSGAIAFVLLVDKEFKIKVGKKETETKYGIRIDNLSRTLILKCNSYRHARWWGGAIEEFIQKHGTNFLKDHRFGSYAAIQENALAKWYVNAKGYFEDVANAMEEANEEIFITDWWLSPEIFLKRPVVEGNRWRLDCILKRKAQQGVRIFIMLYKEVELALGINSEYTKRTLMRLHPNIKVMRHPDHVSSTVYLWAHHEKLVIIDQSVAFVGGIDLAYGRWDDNEHRLTDVGSVKRVTSGPSLGSLPPAAMESMESLRLKDKNEPVQNLPIQKSIDDVDSKLKGIGKPRKFSKFSLYKQLHRHHLHDADSISSIDSTSSYFNHYRSHHNLIHGLKPHFKLFHPSSESEQGLTRPHADTGSIRSLQTGVGELHGETRFWHGKDYCNFVFKDWVQLDKPFADFIDRYSTPRMPWHDIASAVHGKAARDVARHFIQRWNFTKIMKSKYRSLSYPFLLPKSQTTAHELRYQVPGSVHANVQLLRSAADWSAGIKYHEESIHAAYVHVIENSRHYIYIENQFFISCADDKVVFNKIGDAIAQRILKAHRENQKYRVYVVIPLLPGFEGDISTGGGNALQAIMHFNYRTMCRGENSILGQLKAELGNQWINYISFCGLRTHAELEGNLVTELIYVHSKLLIADDNTVIIGSANINDRSMLGKRDSEMAVIVQDTETVPSVMDGKEYQAGRFARGLRLQCFRVVLGYLDDPSEDIQDPVSDKFFKEVWVSTAARNATIYDKVFRCLPNDEVHNLIQLRDFINKPVLAKEDPIRAEEELKKIRGFLVQFPFYFLSEESLLPSVGTKEAIVPMEVWT

SEQ ID NO: 483 - DNA, 6894 bp, Homo sapiens
tgacccggtccgtgtgggccagcgggaaggaagccagttgagggaagttctccatgaatgtacgtcacaatgatgatgaccgaccaaatccctctggaactgccaccattgctgaacggagaggtagccatgatgccccacttggtgaatggagatgcagctcagcaggttattctcgttcaagttaatccaggtgagactttcacaataagagcagaggatggaacacttcagtgcattcaaggacctgctgaagttcccatgatgtcacccaatggatccattcctcccattcatgtgcctccaggttatatctcacaggtgattgaagatagtactggagtccgccgggtggtggtcacaccccagtctcctgagtgttatcccccaagctacccctcagccatgtctccaacccatcatctccctccctatctgactcaccatccacattttattcataactcacacacggcttactacccacctgttaccggacctggagatatgccgcctcagttttttccccagcatcatcttccccacacaatatatggtgagcaagaaattataccattttatggaatgtcaagctacatcacccgagaagaccagtacagcaagcctccgcacaaaaaactgaaagaccgccagatcgatcgccagaaccgactcaacagacctccttctgctatctacaaaagcagctgcacaacagtatacaatggctatgggaagggccatagtggtggaagtggcggaggcggcagcggtagtggtcccggaattaagaaaacagagcgacgagcaagaagcagcccaaagtcgaatgattcagacttgcaagaatatgagttggaagtaaagagggtgcaagacattctttcgggaatagagaaaccacaggtttctaatattcaggcaagagcagttgtgttgtcctgggctccccctgttggactttcctgtggaccccacagtggtctttccttcccctacagttacgaggtggccttatcagacaaaggacgagatggaaaatacaagataatttacagtggagaagaattagaatgtaacctgaaagatcttagaccagcaacagattatcatgtgagggtgtatgccatgtacaattccgtaaagggatcctgctccgagcctgttagcttcaccacccacagctgtgcacccgagtgtcctttcccccctaagctggcacataggagcaaaagttcactaaccctgcagtggaaggcaccaattgacaacggttcaaaaatcaccaactaccttttagagtgggatgagggaaaaagaaatagtggtttcagacagtgcttcttcgggagccagaagcactgcaagttgacaaagctttgtccggcaatggggtacacattcaggctggccgctcgaaacgacattggtaccagtggttatagccaagaggtggtgtgctacacattaggaaatatccctcagatgccttctgcaccaaggctggttcgagctggcatcacatgggtcacgttgcagtggagtaagccagaaggctgttcacccgaggaagtgatcacctacaccttggaaattcaggaggatgaaaatgataaccttttccacccaaaatacactggagaggatttaacctgtactgtgaaaaatctcaaaagaagcacacagtatacattcaggctgactgcttctaatacggaaggaaaaagctgtccaagcgaagttcttgtttgtacgacgagtcctgacaggcctggacctcctaccagaccgcttgtcaaaggcccagttacatctcatggctttagtgtcaaatgggatccccctaaggacaatggtggttcagaaatcctcaagtacttgctagagattactgatggaaattctgaagcgaatcagtgggaagtggcctacagtgggtcggctaccgaatacaccttcacccacttgaaaccaggcactttgtacaaactccgagcatgctgcatcagtaccggcggacacagccagtgttctgaaagtctccctgttcgcacactaagcattgcaccaggtcaatgtcgaccaccgagggttttgggtagaccaaagcacaaagaagtccacttagagtgggatgttcctgcatcggaaagtggctgtgaggtctcagagtacagcgtggagatgacggagcccgaagacgtagcctcggaagtgtaccatggcccagagctggagtgcaccgtcggcaacctgcttcctggaaccgtgtatcgcttccgggtgagggctctgaatgatggagggtatggtccctattctgatgtctcagaaattaccactgctgcagggcctcctggacaatgcaaagcaccttgtatttcttgtacacctgatggatgtgtcttagtgggttgggagagtcctgatagttctggtgctgacatctcagagtacaggttggaatggggagaagatgaagaatccttagaactcatttatcatgggacagacacccgttttgaaataagagacctgttgcctgctgcacagtattgctgtagactacaggccttcaatcaagcaggggcagggccgtacagtgaacttgtcctttgccagacgccagcgtctgcccctgaccccgtctccactctctgtgtcctggaggaggagccccttgatgcctaccctgattcaccttctgcgtgccttgtactgaactgggaagagccgtgcaataacggatctgaaatccttgcttacaccattgatctaggagacactagcattaccgtgggcaacaccaccatgcatgttatgaaagatctccttccagaaaccacctaccggatcagaattcaggctataaatgaaattggagctggaccatttagtcagttcattaaagcaaaaactcggccattaccacccttgcctcctaggctagaatgtgctgctgctggtcctcagagcctgaagctaaaatggggagacagtaactccaagacacatgctgctgaggacattgtgtacacactacagctggaggacagaaacaagaggtttatttcaatctacagaggacccagccacacctacaaggtccagagactgacggaattcacatgctactccttcagaatccaggcagcaagcgaggctggagaagggcccttctcagaaacctataccttcagcacaaccaaaagtgtcccccccaccatcaaagcacctcgagtaacacagttagaaggaaattcatgtgaaattttatgggagacggtaccatcaatgaaaggtgaccctgttaactacattctgcaggtattggttggaagagaatctgagtacaaacaggtgtacaagggagaagaagccacattccaaatctcaggcctccagaccaacacagactacaggttccgcgtatgtgcgtgtcgtcgctgtttagacacctctcaggagctaagcggagccttcagcccctctgcggcttttgtattacaacgaagtgaggtcatgcttacaggggacatggggagcttagatgatcccaaaatgaagagcatgatgcctactgatgaacagtttgcagccatcattgtgcttggctttgcaactttgtccattttatttgcctttatattacagtacttcttaatgaagtaaacccaacaaaactagaggtatgaattaatgctacacattttaatacacacatttattcagatactcccctttttaaagcccttttgttttttgatttatatactctgttttacagatttagctagaaaaaaaatgtcagtgttttggtgcacctttttgaaatgcaaaactaggaaaaggttaaactggatttttttttttaaaaaaaagaaaaaaaaagaagaaaagtataccagataccaaaagctagctttcttatgttttcctttaaattttcagatttaccttcattctgttttcactgatgtcttttgcaagcctttgatttttttttttttgttacagtttagtaatttatattcaccagtcacttcatatgtcttgaacatctgtatctgtaaacatgaatcaccgtgtgtgtacttacagggctaggatttcagtgttgtcagagtattaccacacagcaacagcaacatacagaagatatgttcactcagataagactgccctaaacaaccattttgtcactcagttatttaactgtgtttagctcatttaaatcaaaatgtgtactttaatctaaaatgttttaataatctgtatttcttataattttaacactatgagctgcctgtataagaaatcaagtaaccagaatgcacctataaattatggagcattgtagattttaccacatcaattcatagcagtaactttaagagggcattgtgcaatagttagttgttttcttgttcagctattttaaaggctgctttaacttgtttgtttgtctttgtatataactacttctaatctaatcactagagttattatattctgttatgtttgaccagaattatatgacaagaactggtgacagtttagtgcctctgcccattgtccatgatttacactaattgtgagcagtcttcttatgtgtcagctcattatttttgaaacatttgcctttaggctgttctttgaggtatcaatgaagtgattgaatttcaataccttaattcagtgcacataatactaatgtaacagcagatgaaaattgataaaacccaaaagagagtcatctaaatttgtagttcctatttctgtgggtttgcctggccatggttggagagggaatggtgtttgatggtaaacacagggtgtttggggatcaaggagcctagattctctccctggatctgtcactaacttgctgcgtgacctgaacacgtcactttacctctctgtgcctcagttttcccatgcatgaaaaataaaataaaataaaacggggattctaatgtttgtaagtgctttgagatctttgaccaacaggtgctattggagtgcaaagtgttactcttacgtgtttattttgagtcatgagataatcaattttaacccaaagtcattggattatttatatgaagtccataatgttcgagtacctcagggacatttaagagttggaggtgcaaatatattccaaaagggtgcaacagacacagtgtatccccctgcttctgtttttgtatatttttgctacttggtttttcttgatcatagctattttgtgcttgatctttattgtctaagatgcagtatcctgtactagcttataatattcccataccaaagtcatggggaaacaaacattattttgtttttggtttatttatactatattctgcatacagtactttaaatgccaattacagtgcaatctttatttattgtaaaattttttaagtgtacttatgtactaattttcccttgtagcatgttatatttttgtgttttatacttttgtaattttaggtcagtcttgttccttggcaacatctgtagtattattaatcttctgacattttcttatgtttttaaaaagataagagcatctagtgcattaaatgccaaaaaaaaaatacattatcagtgattgaaacgtttacatgtacccaaaaaccataatcatctcttggaagaaaatgctgagatcaatgaattattctgtgtgcctatattgacgtagtgagtactagagagttctgtattttattattgactataataattagtttaattagctttgcaaactgatggcatcaaggtaaatatatttttgccaaagttctggccttccaaaactcacccccttatttaaatgtgtgctatgacccactatgaccacagcatctgcattttctaaaaaattccatgcaggtgttttggggagaggtattttttaagcaatgaaaattcaactgagtacaaagccccctcttggggggttggggaagtctcttttttgaaacacttcagaactgctgctataaagaaattctctaattggttgaattttttttttaagtaaatagtactttaggccaaaatttatatgaatatttgatcttcttgagattttcatactatcatttaaccaccaggaagctgaagtgtgtgaagtacaaagctgacagcactttattttattgctctccattatttggtattcattatattccttcagtcagaaaattattactctctatggcactgttttttatcacaaatatgtatatgtgatattgatatataactatatatattgccatcacacacgaacaataaaataaagtgttctattaacctgatctctttgcccttttgctatgtgaggagtgaatgagtggccttctgatgctctgactcttctctgtatgtcaaactcatccctggcacaagaaattccagtcatgtgaagcaaactgccctttgtcctcaaagaaattgttgaaaaagaaaactttttaaagagattttttgcatattctctgccttgttcttatcaacttgaaatgttggcattttctaaccttgttttgttggctacaataattcagtattcatgtcaaaattgagaagtgccctaattgaatgtgtttgaatgttatccttgcacaattctttaaattgaaagataaaatgttttacctcactgttggacatacattccaagcttttcaactctaggagaaaaagaaaatcatgttttcctgtattgtaaattttagactatttcatatacattgtattaaaactgccatatcaattttaatgtatagattttgcaaatattatgctatatgtaatacctaactgtatctgtagtgtatatgtaatatatttatgcccaataaatgttttaattctttctga

SEQ ID NO: 484 - protein, 1204 aa, Homo sapiens
MYVTMMMTDQIPLELPPLLNGEVAMMPHLVNGDAAQQVILVQVNPGETFTIRAEDGTLQCIQGPAEVPMMSPNGSIPPIHVPPGYISQVIEDSTGVRRVVVTPQSPECYPPSYPSAMSPTHHLPPYLTHHPHFIHNSHTAYYPPVTGPGDMPPQFFPQHHLPHTIYGEQEIIPFYGMSSYITREDQYSKPPHKKLKDRQIDRQNRLNRPPSAIYKSSCTTVYNGYGKGHSGGSGGGGSGSGPGIKKTERRARSSPKSNDSDLQEYELEVKRVQDILSGIEKPQVSNIQARAVVLSWAPPVGLSCGPHSGLSFPYSYEVALSDKGRDGKYKIIYSGEELECNLKDLRPATDYHVRVYAMYNSVKGSCSEPVSFTTHSCAPECPFPPKLAHRSKSSLTLQWKAPIDNGSKITNYLLEWDEGKRNSGFRQCFFGSQKHCKLTKLCPAMGYTFRLAARNDIGTSGYSQEVVCYTLGNIPQMPSAPRLVRAGITWVTLQWSKPEGCSPEEVITYTLEIQEDENDNLFHPKYTGEDLTCTVKNLKRSTQYTFRLTASNTEGKSCPSEVLVCTTSPDRPGPPTRPLVKGPVTSHGFSVKWDPPKDNGGSEILKYLLEITDGNSEANQWEVAYSGSATEYTFTHLKPGTLYKLRACCISTGGHSQCSESLPVRTLSIAPGQCRPPRVLGRPKHKEVHLEWDVPASESGCEVSEYSVEMTEPEDVASEVYHGPELECTVGNLLPGTVYRFRVRALNDGGYGPYSDVSEITTAAGPPGQCKAPCISCTPDGCVLVGWESPDSSGADISEYRLEWGEDEESLELIYHGTDTRFEIRDLLPAAQYCCRLQAFNQAGAGPYSELVLCQTPASAPDPVSTLCVLEEEPLDAYPDSPSACLVLNWEEPCNNGSEILAYTIDLGDTSITVGNTTMHVMKDLLPETTYRIRIQAINEIGAGPFSQFIKAKTRPLPPLPPRLECAAAGPQSLKLKWGDSNSKTHAAEDIVYTLQLEDRNKRFISIYRGPSHTYKVQRLTEFTCYSFRIQAASEAGEGPFSETYTFSTTKSVPPTIKAPRVTQLEGNSCEILWETVPSMKGDPVNYILQVLVGRESEYKQVYKGEEATFQISGLQTNTDYRFRVCACRRCLDTSQELSGAFSPSAAFVLQRSEVMLTGDMGSLDDPKMKSMMPTDEQFAAIIVLGFATLSILFAFILQYFLMK

SEQ ID NO: 485 - DNA, 762 bp, Homo sapiens
atgggcctcatggtctgtggacagcggaagggcgccggggctgcgtttcccgcgcaggtgaagcaccgtcagggcacagcgcgcctgcgcgctgtggactgcccccagcggctacaagagcaccgtgaagggcgctatccactacccgggctgcggcgcgcccctcgccaaggtggtcttccggaatgcaccggtttaagaagtggacgcagctgttcattgccgctgagggtattcacatgggtcagtttgtgtattgcggcaagaaggtccagctcaacattggcagtgttctctctgtggacaccatgcctgagagtacgaccgtgtgctgcttgaaggagaagcctgaagaccgtggcaagctggcccgggcatcagggaacggtgccaccgttatctcccacaaccctgagactcagaagacccatgaagctgccctcctgcgccaacaaggttatttcctcagccaacagagctgtgggtggtgtagtggccagaggtggccgaaatgacaaagccatcttgaaggctggccgggcccaccacaaatataaggcaaagaggaactgctggccacgagtacggggtgtggccatgaaccttgtggagcatcctttcggaggtggcaaccaccagcacatcggcaagccctccaccatccgcagagatgcccccgctgaccgcaaagtgggtctcattgctgtccgccagactggacgtctccggggagccaagactgtgcaggagaaagagaactag

SEQ ID NO: 486 - DNA, 1006 bp, Homo sapiens
atgaacctgcttgtgcctgtgcgccggggccgccgctcgggggcgagggttcgcgccgcggctcgcgcccgcttctcccgctttacggctgctgaaaatccggcctggcccggcagccgtaccgcagacgagcccgcgcccgcgccgctcagatctcccagctggacgttcaaaatagcttttgatgtcttagggcgtcttttattcaaccctaggaggctgagggaagaaaagaataatttaaatgaaatttagtttctataaagaaaacgattaaaaacaaggtaggtttttatcttagatattttatccaggataaaggcagagattcaaccaagtctttaattataattagttataggaaatgtttaaagtatgcttacaatatgtgcaactgagtattctgtttcagaaaggaaagtttattgagttgtttatcttttgggggcagttgtttacttattttccttttaaaataaataatctaataattttatagcattttaaataatcataaaatgtatgtgataaagtgactgctatatgttctctatatttttatctattaactatggattgcttctaaaaacatgccttgaatagtaaaggattccatagtgtatgtgcattttattttattttattttattattattatactttaagttttagggtacatgtgcacaatgtgcagggtagttacatatgtatacatgtgccatgctggtgtgctgcacccattaactcgtcatttagcatcaggtatatcttctaaagctatccctgtgcattttaaacattatatgctttctttgtttttgatgagatagcagtctaaattttttcactctgctcttgtgtttaaatgcaaataagttcattcagttttctgttggtgctttatttgatactaccaagtttttgtttgctaatgtagcacatataaggcatcccctgtaaaaacatcccccaagctactctatggttagtgtatggctaatatatt

SEQ ID NO: 487 - protein, 84 aa, Homo sapiens
MNLLVPVRRGRRSGARVRAAARARFSRFTAAENPAWPGSRTADEPAPAPLRSPSWTFKIAFDVLGRLLFNPRRLREEKNNLNEI

SEQ ID NO: 488 - DNA, 2432 bp, Homo sapiens
agctgtttccctgtgggtcgggttggactgacttttgacagtcagccttcggctgcggagggggctcggcggcggccggcggagaaagttgctccgagaagaggctgggtcgagctgggccgagccgggcgcgcagggcgggcgtcgcgggcgtcccgggcggacgcggcgcggagactgccggcgcgtcccgggggttccgatttgaagaccttgcttctcatcacccactggattatgccccaggcttccctacccaatgatcctcttgcaacacgccgtgcttcctccacctaagcagccctcaccctcgcctcctatgtcagtggccaccaggtctacaggaaccttgcagcttccaccacagaagccttttgggcaggaggcttccttgcctcttgcaggggaagaagagttatcgaagggaggggagcaagactgtgccctggaggagctatgtaagcccctgtactgcaaactctgcaatgtcaccttgaactctgcacagcaagcccaggctcattatcagggtaaaaatcatggtaagaaactccgaaattactatgcagcaaatagctgtcctcctcctgctagaatgagcaatgtggtcgagcctgcagctactccagttgttccagtccctccgcagatgggctcctttaagccaggaggccgagtgatcctggccacggagaatgattactgtaagctctgtgatgcctccttcagttccccagctgtggctcaggctcactatcaagggaagaatcatgccaagaggctgcggctggcggaagctcagagtaactcattctcggaatcctcagagctgggtcaacggcgggccaggaaagaagggaatgagtttaagatgatgcctaacaggagaaatatgtatacagtacagaataattcagcaggtccttacttcaatccccgctctcggcagagaattccacgtgatctggccatgtgtgttactccaagtggccagttttactgctcaatgtgtaatgttggagctggcgaagagatggaattccggcagcatttagagagcaagcaacataagagcaaggtgtctgaacagcggtacaggaatgagatggagaatctgggatatgtatagtgattatcatattaagatagagcagcttttcctgcctgttgtttgccttttgtcaacttgccctgctttgtggtctttttgatatgagtacattcctctgcttaatgttaatacatgtaacccacagtggtaccatgagatgtcaaaacctgggggcccgggggcggggcggggggaggtgggtgtgaagaacgtgcttcttaggtcataacgcttttgcagggtcaatggtgttgagccgctcatagcatgtgacctacctaccccatcagaaataactttttatcttgctcaagttctggtcaactagtagcctgacggcttagaactttgactatttaaaagtttcattttcttttgcaattttagttttatgtactgttaaagaattgtactgaattctttttagatcacagtaaaaataggttggcagagatttcagtttcccagggcttaaccagaaccgccacctcaatgcattgtcagtagaatacattattagaaactgttaaggtctttcccgggacatttttttctgccattttcttttgcaattgtagttttatgtactgttaaagaattgtattgaattctttttagatcaaagtaaaaataggtcagcagagatttcagtttcccagggcttaaccagaaccgccacctcaatgcattgtcagtaggatacattattagaaactgttagggtctttcccaggacatttttttttctgtatcatgtctccccatcattgaagcgcaaattttcttgaattcaaatactcccaatgagcttgtatacttccaaacagctaaacttgatttccagttgtggatttcacacatataattgccgccttcttccctcctcttttttcccccctagttgaatcagcttgtctaacaagcccattttcatgccccagctgtgctgtgggttttccaagcctcatatttgaatattcaatgagtttaagatggatatgatttcaaaaaatagggccgggcgcggtggctcacgcctgtaatcccagcactttgggaggccgaagcaggcggatcacgaggtcaggaggtcgagatcatcctggctaacacagtgaaaccccatctctactaaaaatacaaaacattagccgggcgtggtggtgggtgcctgtagtcccagctactctggaggctgaggcaggagaatggcgtgaacccgggaggcggagcttgcagtgagccgagatcgcgccactgcactccagcctgggtgacagagcgagactccgtctcaaaaaaaaaaaaaaaaaaaaaaaaa

SEQ ID NO: 489 - protein, 289 aa, Homo sapiens
MILLQHAVLPPPKQPSPSPPMSVATRSTGTLQLPPQKPFGQEASLPLAGEEELSKGGEQDCALEELCKPLYCKLCNVTLNSAQQAQAHYQGKNHGKKLRNYYAANSCPPPARMSNVVEPAATPVVPVPPQMGSFKPGGRVILATENDYCKLCDASFSSPAVAQAHYQGKNHAKRLRLAEAQSNSFSESSELGQRRARKEGNEFKMMPNRRNMYTVQNNSAGPYFNPRSRQRIPRDLAMCVTPSGQFYCSMCNVGAGEEMEFRQHLESKQHKSKVSEQRYRNEMENLGYV

SEQ ID NO: 490 - DNA, 2323 bp, Homo sapiens
agctgtttccctgtgggtcgggttggactgacttttgacagtcagccttcggctgcggagggggctcggcggcggccggcggagaaagttgctccgatttgaagaccttgcttctcatcacccactggattatgccccaggcttccctacccaatgatcctcttgcaacacgccgtgcttcctccacctaagcagccctcaccctcgcctcctatgtcagtggccaccaggtctacaggaaccttgcagcttccaccacagaagccttttgggcaggaggcttccttgcctcttgcaggggaagaagagttatcgaagggaggggagcaagactgtgccctggaggagctatgtaagcccctgtactgcaaactctgcaatgtcaccttgaactctgcacagcaagcccaggctcattatcagggtaaaaatcatggtaagaaactccgaaattactatgcagcaaatagctgtcctcctcctgctagaatgagcaatgtggtcgagcctgcagctactccagttgttccagtccctccgcagatgggctcctttaagccaggaggccgagtgatcctggccacggagaatgattactgtaagctctgtgatgcctccttcagttccccagctgtggctcaggctcactatcaagggaagaatcatgccaagaggctgcggctggcggaagctcagagtaactcattctcggaatcctcagagctgggtcaacggcgggccaggaaagaagggaatgagtttaagatgatgcctaacaggagaaatatgtatacagtacagaataattcaggtccttacttcaatccccgctctcggcagagaattccacgtgatctggccatgtgtgttactccaagtggccagttttactgctcaatgtgtaatgttggagctggcgaagagatggaattccggcagcatttagagagcaagcaacataagagcaaggtgtctgaacagcggtacaggaatgagatggagaatctgggatatgtatagtgattatcatattaagatagagcagcttttcctgcctgttgtttgccttttgtcaacttgccctgctttgtggtctttttgatatgagtacattcctctgcttaatgttaatacatgtaacccacagtggtaccatgagatgtcaaaacctgggggcccgggggcggggcggggggaggtgggtgtgaagaacgtgcttcttaggtcataacgcttttgcagggtcaatggtgttgagccgctcatagcatgtgacctacctaccccatcagaaataactttttatcttgctcaagttctggtcaactagtagcctgacggcttagaactttgactatttaaaagtttcattttcttttgcaattttagttttatgtactgttaaagaattgtactgaattctttttagatcacagtaaaaataggttggcagagatttcagtttcccagggcttaaccagaaccgccacctcaatgcattgtcagtagaatacattattagaaactgttaaggtctttcccgggacatttttttctgccattttcttttgcaattgtagttttatgtactgttaaagaattgtattgaattctttttagatcaaagtaaaaataggtcagcagagatttcagtttcccagggcttaaccagaaccgccacctcaatgcattgtcagtaggatacattattagaaactgttagggtctttcccaggacatttttttttctgtatcatgtctccccatcattgaagcgcaaattttcttgaattcaaatactcccaatgagcttgtatacttccaaacagctaaacttgatttccagttgtggatttcacacatataattgccgccttcttccctcctcttttttcccccctagttgaatcagcttgtctaacaagcccattttcatgccccagctgtgctgtgggttttccaagcctcatatttgaatattcaatgagtttaagatggatatgatttcaaaaaatagggccgggcgcggtggctcacgcctgtaatcccagcactttgggaggccgaagcaggcggatcacgaggtcaggaggtcgagatcatcctggctaacacagtgaaaccccatctctactaaaaatacaaaacattagccgggcgtggtggtgggtgcctgtagtcccagctactctggaggctgaggcaggagaatggcgtgaacccgggaggcggagcttgcagtgagccgagatcgcgccactgcactccagcctgggtgacagagcgagactccgtctcaaaaaaaaaaaaaaaaaaaaaaaaa

SEQ ID NO: 491 - protein, 288 aa, Homo sapiens
MILLQHAVLPPPKQPSPSPPMSVATRSTGTLQLPPQKPFGQEASLPLAGEEELSKGGEQDCALEELCKPLYCKLCNVTLNSAQQAQAHYQGKNHGKKLRNYYAANSCPPPARMSNVVEPAATPVVPVPPQMGSFKPGGRVILATENDYCKLCDASFSSPAVAQAHYQGKNHAKRLRLAEAQSNSFSESSELGQRRARKEGNEFKMMPNRRNMYTVQNNSGPYFNPRSRQRIPRDLAMCVTPSGQFYCSMCNVGAGEEMEFRQHLESKQHKSKVSEQRYRNEMENLGYV

SEQ ID NO: 492 - DNA, 3724 bp, Homo sapiens
tctccctcggcgccgccgccgccgcccgcggggctgggacccgatgcggttagagccgcggagcctggaagagccccgagcgtttctgctttgggacaaccatacatctaattccttaaagtagttttatatgtaaaacttgcaaagaatcagaacaatgcctccacgaccatcatcaggtgaactgtggggcatccacttgatgcccccaagaatcctagtagaatgtttactaccaaatggaatgatagtgactttagaatgcctccgtgaggctacattaataaccataaagcatgaactatttaaagaagcaagaaaataccccctccatcaacttcttcaagatgaatcttcttacattttcgtaagtgttactcaagaagcagaaagggaagaattttttgatgaaacaagacgactttgtgaccttcggctttttcaaccctttttaaaagtaattgaaccagtaggcaaccgtgaagaaaagatcctcaatcgagaaattggttttgctatcggcatgccagtgtgtgaatttgatatggttaaagatccagaagtacaggacttccgaagaaatattctgaacgtttgtaaagaagctgtggatcttagggacctcaattcacctcatagtagagcaatgtatgtctatcctccaaatgtagaatcttcaccagaattgccaaagcacatatataataaattagataaagggcaaataatagtggtgatctgggtaatagtttctccaaataatgacaagcagaagtatactctgaaaatcaaccatgactgtgtaccagaacaagtaattgctgaagcaatcaggaaaaaaactcgaagtatgttgctatcctctgaacaactaaaactctgtgttttagaatatcagggcaagtatattttaaaagtgtgtggatgtgatgaatacttcctagaaaaatatcctctgagtcagtataagtatataagaagctgtataatgcttgggaggatgcccaatttgatgttgatggctaaagaaagcctttattctcaactgccaatggactgttttacaatgccatcttattccagacgcatttccacagctacaccatatatgaatggagaaacatctacaaaatccctttgggttataaatagtgcactcagaataaaaattctttgtgcaacctacgtgaatgtaaatattcgagacattgataagatctatgttcgaacaggtatctaccatggaggagaacccttatgtgacaatgtgaacactcaaagagtaccttgttccaatcccaggtggaatgaatggctgaattatgatatatacattcctgatcttcctcgtgctgctcgactttgcctttccatttgctctgttaaaggccgaaagggtgctaaagaggaacactgtccattggcatggggaaatataaacttgtttgattacacagacactctagtatctggaaaaatggctttgaatctttggccagtacctcatggattagaagatttgctgaaccctattggtgttactggatcaaatccaaataaagaaactccatgcttagagttggagtttgactggttcagcagtgtggtaaagttcccagatatgtcagtgattgaagagcatgccaattggtctgtatcccgagaagcaggatttagctattcccacgcaggactgagtaacagactagctagagacaatgaattaagggaaaatgacaaagaacagctcaaagcaatttctacacgagatcctctctctgaaatcactgagcaggagaaagattttctatggagtcacagacactattgtgtaactatccccgaaattctacccaaattgcttctgtctgttaaatggaattctagagatgaagtagcccagatgtattgcttggtaaaagattggcctccaatcaaacctgaacaggctatggaacttctggactgtaattacccagatcctatggttcgaggttttgctgttcggtgcttggaaaaatatttaacagatgacaaactttctcagtatttaattcagctagtacaggtcctaaaatatgaacaatatttggataacttgcttgtgagatttttactgaagaaagcattgactaatcaaaggattgggcactttttcttttggcatttaaaatctgagatgcacaataaaacagttagccagaggtttggcctgcttttggagtcctattgtcgtgcatgtgggatgtatttgaagcacctgaataggcaagtcgaggcaatggaaaagctcattaacttaactgacattctcaaacaggagaagaaggatgaaacacaaaaggtacagatgaagtttttagttgagcaaatgaggcgaccagatttcatggatgctctacagggctttctgtctcctctaaaccctgctcatcaactaggaaacctcaggcttgaagagtgtcgaattatgtcctctgcaaaaaggccactgtggttgaattgggagaacccagacatcatgtcagagttactgtttcagaacaatgagatcatctttaaaaatggggatgatttacggcaagatatgctaacacttcaaattattcgtattatggaaaatatctggcaaaatcaaggtcttgatcttcgaatgttaccttatggttgtctgtcaatcggtgactgtgtgggacttattgaggtggtgcgaaattctcacactattatgcaaattcagtgcaaaggcggcttgaaaggtgcactgcagttcaacagccacacactacatcagtggctcaaagacaagaacaaaggagaaatatatgatgcagccattgacctgtttacacgttcatgtgctggatactgtgtagctaccttcattttgggaattggagatcgtcacaatagtaacatcatggtgaaagacgatggacaactgtttcatatagattttggacactttttggatcacaagaagaaaaaatttggttataaacgagaacgtgtgccatttgttttgacacaggatttcttaatagtgattagtaaaggagcccaagaatgcacaaagacaagagaatttgagaggtttcaggagatgtgttacaaggcttatctagctattcgacagcatgccaatctcttcataaatcttttctcaatgatgcttggctctggaatgccagaactacaatcttttgatgacattgcatacattcgaaagaccctagccttagataaaactgagcaagaggctttggagtatttcatgaaacaaatgaatgatgcacatcatggtggctggacaacaaaaatggattggatcttccacacaattaaacagcatgcattgaactgaaaagataactgagaaaatgaaagctcactctggattccacactgcactgttaataactctcagcaggcaaagaccgattgcataggaattgcacaatccatgaacagcattagaatttacagcaagaacagaaataaaatactatataatttaaataatgtaaacgcaaacagggtttgatagcacttaaactagttcatttcaaaattaagctttagaataatgcgcaatttcatgttatgccttaagtccaaaaaggtaaactttgaagattgtttgtatctttttttaaaaaacaaaacaaaacaaaaatccccaaaatatatagaaatgatggagaaggaaaaaaaaaaaaaaaaa

SEQ ID NO: 493 - protein, 1068 aa, Homo sapiens
MPPRPSSGELWGIHLMPPRILVECLLPNGMIVTLECLREATLITIKHELFKEARKYPLHQLLQDESSYIFVSVTQEAEREEFFDETRRLCDLRLFQPFLKVIEPVGNREEKILNREIGFAIGMPVCEFDMVKDPEVQDFRRNILNVCKEAVDLRDLNSPHSRAMYVYPPNVESSPELPKHIYNKLDKGQIIVVIWVIVSPNNDKQKYTLKINHDCVPEQVIAEAIRKKTRSMLLSSEQLKLCVLEYQGKYILKVCGCDEYFLEKYPLSQYKYIRSCIMLGRMPNLMLMAKESLYSQLPMDCFTMPSYSRRISTATPYMNGETSTKSLWVINSALRIKILCATYVNVNIRDIDKIYVRTGIYHGGEPLCDNVNTQRVPCSNPRWNEWLNYDIYIPDLPRAARLCLSICSVKGRKGAKEEHCPLAWGNINLFDYTDTLVSGKMALNLWPVPHGLEDLLNPIGVTGSNPNKETPCLELEFDWFSSVVKFPDMSVIEEHANWSVSREAGFSYSHAGLSNRLARDNELRENDKEQLKAISTRDPLSEITEQEKDFLWSHRHYCVTIPEILPKLLLSVKWNSRDEVAQMYCLVKDWPPIKPEQAMELLDCNYPDPMVRGFAVRCLEKYLTDDKLSQYLIQLVQVLKYEQYLDNLLVRFLLKKALTNQRIGHFFFWHLKSEMHNKTVSQRFGLLLESYCRACGMYLKHLNRQVEAMEKLINLTDILKQEKKDETQKVQMKFLVEQMRRPDFMDALQGFLSPLNPAHQLGNLRLEECRIMSSAKRPLWLNWENPDIMSELLFQNNEIIFKNGDDLRQDMLTLQIIRIMENIWQNQGLDLRMLPYGCLSIGDCVGLIEVVRNSHTIMQIQCKGGLKGALQFNSHTLHQWLKDKNKGEIYDAAIDLFTRSCAGYCVATFILGIGDRHNSNIMVKDDGQLFHIDFGHFLDHKKKKFGYKRERVPFVLTQDFLIVISKGAQECTKTREFERFQEMCYKAYLAIRQHANLFINLFSMMLGSGMPELQSFDDIAYIRKTLALDKTEQEALEYFMKQMNDAHHGGWTTKMDWIFHTIKQHALN

SEQ ID NO: 494 - DNA, 1492 bp, Homo sapiens
tgccctgcgagaatgtatctcatcctttgctggagcaggtttgcaggcacagtggagagaggagagaagaaatgaagggacacttatgcagaaccatgagtggccagagaggaggagaaggagggtgagaggagcaaagaagccatgacaacttcataattctgagtggactgggcagtggccagaaattctggtggtggatatgctgcctttccaacaggtgaatatgaaagaataagtcaaaccctgttcaggacgctgttaattccaaatgtgaactttttgagtcattctttccatgtggaattcaaaggagaatgtaaacaaattttcaggagggacgtgcaatatccctgaaagataacaaagttcgtaacacttatttacatacaacattctctagttattgattaaacagatctctacagacttgcatgaggcaacatttcttaggcttgtttgctacaatatctttaaaaatacttgattacacatcactttagcttatttagatggacttttcaccaagctctgaactgggatttcattttgttgcattcatcctgctcacgagacacaggacagcctttcctgcctcagggaagaagagagagacagactacagtgatggagacccactagatgtgcacaagaggctgccatccagtgctggagaggaccgagccgtgatgctggggtttgccatgatgggcttctcagtcctaatgttcttcttgctcggaacaaccattctaaagccttttatgctcagcattcagagagaagaatcgacctgcactgccatccacacagatatcatggacgactggctggactgtgccttcacctgtggtgtgcactgccacggtcaggggaagtacccgtgtcttcaggtgtttgtgaacctcagccatccaggtcagaaagctctcctacattataatgaagaggctgtccagataaatcccaagtgcttttacacacctaagtgccaccaagatagaaatgatttgctcaacagtgctctggacataaaagaattcttcgatcacaaaaatggaacccccttttcatgcttctacagtccagccagccaatctgaagatgtcattcttataaaaaagtatgaccaaatggctatcttccactgtttattttggccttcactgactctgctaggtggtgccctgattgttggcatggtgagattaacacaacacctgtccttactgtgtgaaaaatatagcactgtagtcagagatgaggtaggtggaaaagtaccttatatagaacagcatcagttcaaactgtgcattatgaggaggagcaaaggaagagcagagaaatcttaagacggtggccaaattaaagtgctggccttcagatgtctgtgatttctgcaactgaggacctaattatgcctgtctgcaaactaataatgtaaaaggtaataattaaagtatcatattttcatgtgggaaaaaatttaaaa

SEQ ID NO: 495 - protein, 279 aa, Homo sapiens
MDFSPSSELGFHFVAFILLTRHRTAFPASGKKRETDYSDGDPLDVHKRLPSSAGEDRAVMLGFAMMGFSVLMFFLLGTTILKPFMLSIQREESTCTAIHTDIMDDWLDCAFTCGVHCHGQGKYPCLQVFVNLSHPGQKALLHYNEEAVQINPKCFYTPKCHQDRNDLLNSALDIKEFFDHKNGTPFSCFYSPASQSEDVILIKKYDQMAIFHCLFWPSLTLLGGALIVGMVRLTQHLSLLCEKYSTVVRDEVGGKVPYIEQHQFKLCIMRRSKGRAEKS

SEQ ID NO: 496 - DNA, 1272 bp, Homo sapiens
gctcccggctgccgaggcggaaacacaggtgatgaggtggcggcaagcacagtgcaaagagagagaagcagcttcggctgcagcaaaccacgcaggtccttcttgatcatctagaactgaccgctccgccttgccaggagtctgcagaaccacgtggctagcctgcctgaagttctcacctctccaggaaggcggggggcttctaatggctgcagctgcgctgggggctgggggctcccgctgggactccacttccgtggatgtctaagcttcacctttcttgcgcccgcaggggcatgactcaggtgaaagggagccattttctcagacccctggcctcatgcagcccttcagcatccccgtgcaaatcacacttcagggcagccggaggcgccaggggaggacagcctttcctgcctcagggaagaagagagagacagactacagtgatggagacccactagatgtgcacaagaggctgccatccagtgctggagaggaccgagccgtgatgctggggtttgccatgatgggcttctcagtcctaatgttcttcttgctcggaacaaccattctaaagccttttatgctcagcattcagagagaagaatcgacctgcactgccatccacacagatatcatggacgactggctggactgtgccttcacctgtggtgtgcactgccacggtcaggggaagtacccgtgtcttcaggtgtttgtgaacctcagccatccaggtcagaaagctctcctacattataatgaagaggctgtccagataaatcccaagtgcttttacacacctaagtgccaccaagatagaaatgatttgctcaacagtgctctggacataaaagaattcttcgatcacaaaaatggaacccccttttcatgcttctacagtccagccagccaatctgaagatgtcattcttataaaaaagtatgaccaaatggctatcttccactgtttattttggccttcactgactctgctaggtggtgccctgattgttggcatggtgagattaacacaacacctgtccttactgtgtgaaaaatatagcactgtagtcagagatgaggtaggtggaaaagtaccttatatagaacagcatcagttcaaactgtgcattatgaggaggagcaaaggaagagcagagaaatcttaagacggtggccaaattaaagtgctggccttcagatgtctgtgatttctgcaactgaggacctaattatgcctgtctgcaaactaataatgtaaaaggta

SEQ ID NO: 497 - protein, 277 aa, Homo sapiens
MQPFSIPVQITLQGSRRRQGRTAFPASGKKRETDYSDGDPLDVHKRLPSSAGEDRAVMLGFAMMGFSVLMFFLLGTTILKPFMLSIQREESTCTAIHTDIMDDWLDCAFTCGVHCHGQGKYPCLQVFVNLSHPGQKALLHYNEEAVQINPKCFYTPKCHQDRNDLLNSALDIKEFFDHKNGTPFSCFYSPASQSEDVILIKKYDQMAIFHCLFWPSLTLLGGALIVGMVRLTQHLSLLCEKYSTVVRDEVGGKVPYIEQHQFKLCIMRRSKGRAEKS

SEQ ID NO: 498 - DNA, 1709 bp, Homo sapiens
aagagaaagaacaagaaaaagaaaaagaagaggaaaaaatccccagtacccatagaaacccttaaagatgtttaaaaagagttaacttatcagaacacagatttaagtgaaattaaggaagaagagcaggtaaagtctactgacagaaagtcagcagtggaagcccaaaacgaggtgactgaaaatccaaaacagaaaattgcagcagaaagcagtgaaaatgttgattgtccagagaatcctaaaatgaagttggatggaaaacttgaccaagaaggcaatgatgtaaaaacagcagctgaggaggtactagctggtagagacacattagattttgaggatgtcacagttcaatcatcaggcccgagggctggtggtgaagaattagatgaaggtgttgcaaaagataatgctaaaatagctggtgccacttaaagcaatcctgaagaaccagagagcgaagatgcagatcactgcaccgtacccaaaaatgaaagtccctcacaggacattagtgatgcctgtgaagcagaaagtacagagaggtgtgggatgtcagaacatccaagtcagaccatcaggaaagctttagacagcaatagcctaaaaaaccatgacttgttggcaccaggaggagagccgggggacttcaatccagaaagcagagaagataccagaggagggaacgagaagggcaaaagcaaagaagaccgtaccatgtcctaagctgaggcaggcggcaggcgtggtgcacaggaagtctgagtgtgaggggctcttttctctccactgccaatgacagcctttcctgcctcagggaagaagagagagacagactacagtgatggagacccactagatgtgcacaagaggctgccatccagtgctggagaggaccgagccgtgatgctggggtttgccatgatgggcttctcagtcctaatgttcttcttgctcggaacaaccattctaaagccttttatgctcagcattcagagagaagaatcgacctgcactgccatccacacagatatcatggacgactggctggactgtgccttcacctgtggtgtgcactgccacggtcaggggaagtacccgtgtcttcaggtgtttgtgaacctcagccatccaggtcagaaagctctcctacattataatgaagaggctgtccagataaatcccaagtgcttttacacacctaagtgccaccaagatagaaatgatttgctcaacagtgctctggacataaaagaattcttcgatcacaaaaatggaacccccttttcatgcttctacagtccagccagccaatctgaagatgtcattcttataaaaaagtatgaccaaatggctatcttccactgtttattttggccttcactgactctgctaggtggtgccctgattgttggcatggtgagattaacacaacacctgtccttactgtgtgaaaaatatagcactgtagtcagagatgaggtaggtggaaaagtaccttatatagaacagcatcagttcaaactgtgcattatgaggaggagcaaaggaagagcagagaaatcttaagacggtggccaaattaaagtgctggccttcagatgtctgtgatttctgcaactgaggacctaattatgcctgtctgcaaactaataatgtaaaaggtaataattaaagtatcatattttcatgtgggaaaaaatttaaaa

SEQ ID NO: 499 - protein, 257 aa, Homo sapiens
MTAFPASGKKRETDYSDGDPLDVHKRLPSSAGEDRAVMLGFAMMGFSVLMFFLLGTTILKPFMLSIQREESTCTAIHTDIMDDWLDCAFTCGVHCHGQGKYPCLQVFVNLSHPGQKALLHYNEEAVQINPKCFYTPKCHQDRNDLLNSALDIKEFFDHKNGTPFSCFYSPASQSEDVILIKKYDQMAIFHCLFWPSLTLLGGALIVGMVRLTQHLSLLCEKYSTVVRDEVGGKVPYIEQHQFKLCIMRRSKGRAEKS

SEQ ID NO: 500 - DNA, 1835 bp, Homo sapiens
cccagctactagggaggctgaggcaggagaatcgcttgaacctgggaggcggaggaggttgcagtgaactgagatcgtacccagcctgggcaacagtgcgaggttccgtctcaaaaaaaaccaaaaaacacaaaaacaaaaaacgacagagaaggccaaacaaaacacatctgtgggctggatgccgccatgcccaccggtttgcgacctttgtgttggactcttctgttcaccagacaccctgccctgcgagaatgtatctcatcctttgctggagcaggtttgcaggcacagtggagagaggagagaagaaatgaagggacacttatgcagaaccatgagtggccagagaggaggagaaggagggtgagaggagcaaagaagccatgacaacttcataattctgagtggactgggcagtggccagaaattctggtggtggatatgctgcctttccaacaggtgaatatgaaagaataagtcaaaccctgttcaggacgctgttaattccaaatgtgaactttttgagtcattctttccatgtggaattcaaaggagaatgtaaacaaattttcaggagggacgtgcaatatccctgaaagataacaaagttcgtaacacttatttacatacaacattctctagttattgattaaacagatctctacagacttgcatgaggcaacatttcttaggcttgtttgctacaatatctttaaaaatacttgattacacatcactttagcttatttagatggacttttcaccaagctctgaactgggatttcattttgttgcattcatcctgctcacgagacacaggtaggcagcaaatgagattatccctccagtccccatggattggaaatgttcccccttctttatgagctcactgcagtatctccttctccctttccccaaaggacagcctttcctgcctcagggaagaagagagagacagactacagtgatggagacccactagatgtgcacaagaggctgccatccagtgctggagaggaccgagccgtgatgctggggtttgccatgatgggcttctcagtcctaatgttcttcttgctcggaacaaccattctaaagccttttatgctcagcattcagagagaagaatcgacctgcactgccatccacacagatatcatggacgactggctggactgtgccttcacctgtggtgtgcactgccacggtcaggggaagtacccgtgtcttcaggtgtttgtgaacctcagccatccaggtcagaaagctctcctacattataatgaagaggctgtccagataaatcccaagtgcttttacacacctaagtgccaccaagatagaaatgatttgctcaacagtgctctggacataaaagaattcttcgatcacaaaaatggaacccccttttcatgcttctacagtccagccagccaatctgaagatgtcattcttataaaaaagtatgaccaaatggctatcttccactgtttattttggccttcactgactctgctaggtggtgccctgattgttggcatggtgagattaacacaacacctgtccttactgtgtgaaaaatatagcactgtagtcagagatgaggtaggtggaaaagtaccttatatagaacagcatcagttcaaactgtgcattatgaggaggagcaaaggaagagcagagaaatcttaagacggtggccaaattaaagtgctggccttcagatgtctgtgatttctgcaactgaggacctaattatgcctgtctgcaaactaataatgtaaaaggtaataattaaagtatcatattttcatgtgggaaaaaatttaaaa

SEQ ID NO: 501 - protein, 275 aa, Homo sapiens
MFPLLYELTAVSPSPFPQRTAFPASGKKRETDYSDGDPLDVHKRLPSSAGEDRAVMLGFAMMGFSVLMFFLLGTTILKPFMLSIQREESTCTAIHTDIMDDWLDCAFTCGVHCHGQGKYPCLQVFVNLSHPGQKALLHYNEEAVQINPKCFYTPKCHQDRNDLLNSALDIKEFFDHKNGTPFSCFYSPASQSEDVILIKKYDQMAIFHCLFWPSLTLLGGALIVGMVRLTQHLSLLCEKYSTVVRDEVGGKVPYIEQHQFKLCIMRRSKGRAEKS

SEQ ID NO: 502 - DNA, 2899 bp, Homo sapiens
atggaaaattatgaggcattggtaggctttgatctctgtaatacaccgctctccagtgttgctcagaagattatgtctgctatgcattcaggtgatttagtggattctaagacttggggaaagagtacagagactatggaagtgataaacaagtccagtgttaagtattcagtacaacttgaagacaggaagactcaatcaccagaaaaaaaggatcttaaatctttaagaagtcagacatcaagaggttctgccaagctgtctcctcagtccttcagtgtcaggctcacagatcagctgtctgctgaccaaaaacagaagagcatcagctcattgactctttcaagttgtttaattccacagtataatcaagaggcttcagttctacagaaaaaggggcataaaagaaagcatttcctaatggagaatataaataatgaaaataaaggaagcattaatcttaaaagaaaacatattacatataataatttgtcagagaaaacaagtaaacaaatggcattggaagaagatactgatgacgccgaaggctacctaaattctgggaactcaggagcattgaaaaaacatttttgtgatattaggcatttggatgattgggcaaaaagccagctgattgaaatgctcaaacaggcagcagccctggtgataactgtgatgtatactgatggttccacccagctaggagctgaccagacccccgtttcttctgttagaggaattgtggtgttagtaaaacgccaagcagagggtggccatggctgtccagatgccccggcctgtggtcctgttctggagggctttgtgtcagatgatccatgcatctacattcaaatagagcactctgctatctgggaccaagaacaggaggcacatcaacaatttgcccggaacgtgctatttcaaacaatgaaatgtaaatgtcctgttatttgttttaatgctaaggattttgtgagaatagtgctgcagttttttggcaatgatggcagttggaagcatgttgctgattttatagggctagatcccagaattgctgcatggcttatagatcctagtgatgccacaccctcttttgaagatttagtagaaaaatactgtgaaaaatccattacagttaaagtgaacagcacatatggaaattcctcaagaaatattgtgaatcagaatgtacgtgagaacctgaagacactctacagacttacaatggacctttgctctaaactgaaggattatggtttatggcaactatttcgtactttggagcttcctctgataccaattttggcagtgatggaaagccatgccattcaggtgaacaaagaggagatggagaagacgtcagcacttcttggggctcgtctcaaggaattggagcaagaagctcattttgttgcaggagaacggtttcttataacgagcaataaccagcttcgagagatcctctttggcaagttaaagctgcacctgctgagtcaaaggaacagtctccccagaacggggttgcagaaatacccgtctacatcagaagcagtgttaaatgctctgcgagaccttcatccattacccaagataattttggaatacaggcaggttcacaagatcaagtcaacctttgtagatggattactagcttgcatgaaaaagggctccatttcctctacatggaatcagactggaactgtgactggaagactttcagccaagcatcctaatatccaaggtatctccaagcacccaattcagattactacacctaagaattttaaaggtaaagaagacaagattctcacgatctccccgagggccatgtttgtttcatccaaaggccacacctttctagcagcagacttttcacagattgaattgcgcattcttacacatttatctggagatccggaacttctgaagttattccaggaatctgaaagagatgatgtattttctactctgacttcacagtggaaggatgtgcccgtggaacaggtgacacacgcagacagagagcaaaccaagaaggtggtgtacgcggtggtctatggagcagggaaggagcggctggctgcttgccttggagttcctattcaggaagctgcccagtttttggagagttttttgcagaagtacaagaaaatcaaggacttcgcccgagcagctattgcccagtgtcaccagacaggctgtgtggtgtccatcatgggcagaaggagacccctgccaaggattcacgctcatgaccagcaactccgggcacaagcagagcgacaggcagtgaacttcgtggtgcaaggctccgctgctgacctctgcaagctggccatgatccatgtcttcactgcagtggctgcttcccacaccttgacggccaggctggtggcccagatccatgatgagctgctgtttgaagtggaagatccgcagatcccggagtgtgcagctctcgtcaggaggaccatggagtccttggaacaggtgcaggcattggagctgcagcttcaggtacccctcaaggtgagcctgagtgccggccgctcatggggacacctggtgccactgcaggaggcctggggccctccgccaggcccatgtcgcactgagtctcccagcaacagcctggctgcccctgggtcccctgccagcacccagcccccacccctgcatttttcgccttcattttgtctgtagccccaggcaacagtgggaggagagaactggtttccagcagtccattgtgtggccttccccaaggtcaccagctctgtacgccccaggacgcattaaccctttggggctggggtggcccgccatcccctggagtaaatgcctgtgcaaagccctcctcatccttgtctgagtgaattcttcctgtgagtgggaagtg

SEQ ID NO: 503 - protein, 900 aa, Homo sapiens
MENYEALVGFDLCNTPLSSVAQKIMSAMHSGDLVDSKTWGKSTETMEVINKSSVKYSVQLEDRKTQSPEKKDLKSLRSQTSRGSAKLSPQSFSVRLTDQLSADQKQKSISSLTLSSCLIPQYNQEASVLQKKGHKRKHFLMENINNENKGSINLKRKHITYNNLSEKTSKQMALEEDTDDAEGYLNSGNSGALKKHFCDIRHLDDWAKSQLIEMLKQAAALVITVMYTDGSTQLGADQTPVSSVRGIVVLVKRQAEGGHGCPDAPACGPVLEGFVSDDPCIYIQIEHSAIWDQEQEAHQQFARNVLFQTMKCKCPVICFNAKDFVRIVLQFFGNDGSWKHVADFIGLDPRIAAWLIDPSDATPSFEDLVEKYCEKSITVKVNSTYGNSSRNIVNQNVRENLKTLYRLTMDLCSKLKDYGLWQLFRTLELPLIPILAVMESHAIQVNKEEMEKTSALLGARLKELEQEAHFVAGERFLITSNNQLREILFGKLKLHLLSQRNSLPRTGLQKYPSTSEAVLNALRDLHPLPKIILEYRQVHKIKSTFVDGLLACMKKGSISSTWNQTGTVTGRLSAKHPNIQGISKHPIQITTPKNFKGKEDKILTISPRAMFVSSKGHTFLAADFSQIELRILTHLSGDPELLKLFQESERDDVFSTLTSQWKDVPVEQVTHADREQTKKVVYAVVYGAGKERLAACLGVPIQEAAQFLESFLQKYKKIKDFARAAIAQCHQTGCVVSIMGRRRPLPRIHAHDQQLRAQAERQAVNFVVQGSAADLCKLAMIHVFTAVAASHTLTARLVAQIHDELLFEVEDPQIPECAALVRRTMESLEQVQALELQLQVPLKVSLSAGRSWGHLVPLQEAWGPPPGPCRTESPSNSLAAPGSPASTQPPPLHFSPSFCL

SEQ ID NO: 504 - DNA, 5621 bp, Homo sapiens
ctcccgtgaggcagtgcgaggcgcgcggggcacggagggcggtggcggcgggctcctgcgagaagcaagcggaacttcctgaggaggaatcattatagattctaaaaatatattttcccttctctgtggacttggtataaaacgtagctttttttctgcttggatttattttctaaaaatcaacaccgtaaacccatatcagatacaacaaaattggggtagttaaaaccatgagttgtggaaatgagtttgtggaaacattaaaaaaaattggttatcccaaagctgataatcttaatggagaagactttgactggttgtttgagggcgttgaagatgaatcgtttctgaagtggttttgtgggaatgtgaatgaacagaacgtgttgtctgaaagagaattggaagcttttagcattcttcagaaatcaggcaagcctattctagaaggggcggcattggatgaagctcttaaaacgtgtaaaacttctgatttgaagacacctagactggatgataaagagctggagaaattagaggatgaggttcaaactctactgaaattaaagaacctaaaaattcagcgacgtaataaatgtcaattgatggcttcagtaactagccacaaatctctgaggttaaatgctaaagaagaagaagccactaaaaagctgaagcagagtcaaggaattctaaatgcaatgatcactaagatcagtaatgaacttcaggctcttactgatgaagttacacaattgatgatgttcttcagacattctaatttaggtcaagggacaaatccactggtatttttatcgcaattttccttggaaaaatacctaagtcaggaagagcaaagcacagcagcattaactttgtataccaaaaaacagttctttcagggtatacatgaagtagttgaaagttcaaatgaagacaattttcaacttttagatatacagacaccatctatttgtgataatcaagaaatccttgaggagagacgactagagatggctagactgcagctcgcatacatttgtgctcaacatcagttaattcacttaaaagcaagtaattcgagcatgaagtcaagtataaaatgggcagaggagagtcttcacagcctaaccagcaaggctgtggacaaagaaaatttggatgctaaaatttctagcttgaccagtgagattatgaaacttgaaaaagaggtcactcaaataaaagacagaagtttacctgctgtggtaagagagaatgcccagttattgaatatgccagtggtaaagggagattttgatctgcagattgctaaacaagattattatacagcaagacaagagttagttttaaatcaattaataaaacaaaaggcatcatttgaacttctacagttatcatatgaaattgaattaagaaagcatcgggacatatatcgtcaacttgaaaatttggttcaagaacttagtcaaagtaacatgatgctctacaagcaattagaaatgttaacagatccatcagtttctcaacagataaatccaaggaataccattgatactaaggattattctactcataggctttaccaagttttggagggagagaataagaaaaaagaattgtttctaactcatggaaaccttgaggaagtggctgagaaattgaaacagaatatttctttagtacaagatcagttggcagtatctgctcaagaacattctttctttctgtccaaacgaaataaggatgtggacatgctttgtgatactttgtatcaaggaggaaatcagcttttgcttagtgatcaggagttaacagagcagtttcataaagttgaatctcaactgaataagctaaatcatctcctcactgatattcttgctgatgtgaagacaaaaagaaaaactttggcaaataataaattacatcaaatggaaagagaattctatgtatattttttaaaagatgaagattatctgaaagatattgtggagaatttagaaactcaatcaaagattaaggctgttagtcttgaagattgaaaattactgaaaactgaatctttattacgtgtcctcttttatttattagaagactgtgtataataaacactactaaatttttaaaatttgaggtcaatggaacatttaatttgatgaattgaactattatattaatttgtcttttttctcatgtagtacattcagaataccagtgctttttatgacttgagcatgtgtttagtggtacttagtcctggtaattttttacttacagggaaaaagcattattacataatgcaaatattttttaatatagttatctctctcctttttagaaatagaaattttctgccgttaaatttttttttgagatagagtctcactctgtctccaggctggaatgcagtggcacgatcttggctcactgcaacctctgcctcccgggttcaagtgattctcctgcctcagcctcccaagtagctgggactacaggcgcacaccgccacacccagctaatttttttgtattttagtagaaaaggggtttcaccatgttggccaggatggtctcaatctcttgacctcttgatcccctctcccggcctcccaaagtgccggaattacaggcatgagccaccacgctcagccgctattaaatattttaaaatgtgtagaacttctagtcagcatttttaaatctgtagaccttaatatgtgaaatagccaagtcccctcatgtttgactgtcaaataaaattctgctgctcaaattgtattcctccataattccctgctatagacctttaggctgttttaatgtccctacttgtaccacagagtattaggacttccttggcctgcctgcattcattttagagtctgaattctggggactcaaaagtttctacaagacagctgagcagtgctttgactttaatgtgacttacacatcataaatgactttcaaatgaaatttgaatttcaaaattctgtaaaagtggttgctcaaaggatgtatgatactattttaatcagtttaagagcaaaaatgtctaattgtatttaacaatggtatttgggcagccagaaaatattttaagcgttgctctaaaataatttgaagtagctcatctgttattacatcagatgcttcttgagtgcccaatttatacatggcctgtggtaaataccatgtgagctttgtaggaatacctttaagaatattcctcacctgttcgtaatatggaatgccaatctaaaaactacatgttttgggtggtctttatggaattttttagctataaccatcagaaaacaggcatacctagatgacagatgaaccttcttgatttttgaaacccattgaacaaaaatattttgccaattattgtgtttatgttatttaaaattttatgtaaaccttaattttgtagcagtaaattttgtttaagattttgctatcagctccctatcacctgagcaactttttttttgttgtatatgtttttttctattctatttcggaatagagaatttacttaaaatttttattttctccaaaaatgtggaaaatatgtcacctggtttcctggtttatggtagcatattctgtttaaattagtgtcacatatttagatgtgtggccagacgcttgatttattagttaatttttgagacagagtctaactgtgtcactcaggctggagttcagtggaatgatctcggctcactgcaacctccgcctcccaggttcaagtgattctcctgcttcagcctcctgagtagatgggattgtaggcgtgcaccactgcacctggctaatttttgtattttcagtagagacggggtttcaccatgttggtcaggctggtctcaaactcctgacctcaagtgatctacccgccttggccttccatagtgctggcattacaggtgtaagccaccatgcccctgcccagatgcttgatttatactgtccccacccaaaccttgacttgctcagcccagggggccagcagggcagatcaaggcacggatggtagttgtgtgtctgccgtaattacccaagttacttataatcgttgtgttactaggtaggtttatttgaagatttatttatttatttatttattttttattttttgagacggagtttcactcttgttgcccaggctggagtgcagtggcatgatctcagctcactgcaacctctgccttctgggttcacgtgattctcctgcctcaggcctcccgagtagctgggattacaggtgccaccatgcctggttaattttttgtatttttagtagagacggggtttcatcatgttggccaggttggtctcgaactcctgacctcaggtgatccacccgcctcagtctaccaaagtgcagggatcacaggcatgagcttccgcgctcagcctatttgaagatttaataacatttttcaaacctcaggatgtatttgagtagattgcttctaaattggtcacctagaaaataagttatctatttactatgatacctggattaagcctctagctattttgcttttttctttctatccatattattggatgattgatgcctattttctgtggttatgaatatagacattttaaatgaaagttggtatataaatttttgaaaataattgtatttcctgttttatagtcttaggattaatatatgggatttatcttatgttaatcttacatttaggattttgtgaaaatggaaaattatgaggcattggtaggctttgatctctgtaatacaccgctctccagtgttgctcagaagattatgtctgctatgcattcaggtgatttagtggattctaagacttggggaaagagtacagagagtaagtaatttttatgaacctttctttctcttgatactttgaatgttaattgttctaaagactaagaattgaaaatggaatgcatgtagacagatgaagcccagctcccgccccttttacactcattcagtgcagactgagcttctgcttgctaactttcgtgttcccttaaccttcattgctttaaaaatgtaacactctcttccttattccaggtatttctgtcaaacattcccttagaatctggatcaggtattttagtattttcaaaagagatgctttaatcttggttctcaggtcatcaaacctgtacatagtatttgctattttgtgtggtgaacaagagatatgtttttgacaatatgtgtattgtgctgctatagaaatgtaaactcttaggtggcaaggattattggatcagtgtatatggatttatgatgtggtataatagtaaaagcagtggggccgggtgcggtggctcacgcctgtaatcccagcactttgggaggccgaggtcggcgatcatgaggtcaggagatcgagaccatcctggctaacacggtaaaacactgtctctactaaaaatacaaaaaattagctgggagtggtggtaggcgcctgtagtccagctacttgggaggctgaggcaggagaatggcatgaacccaggaggcggggcttgcagtgagctgaggtctccagcgtgggcgacagagtgagactctatctctaaaaaaaaaaaaaaaaaaaa

SEQ ID NO: 505 - protein, 603 aa, Homo sapiens
MSCGNEFVETLKKIGYPKADNLNGEDFDWLFEGVEDESFLKWFCGNVNEQNVLSERELEAFSILQKSGKPILEGAALDEALKTCKTSDLKTPRLDDKELEKLEDEVQTLLKLKNLKIQRRNKCQLMASVTSHKSLRLNAKEEEATKKLKQSQGILNAMITKISNELQALTDEVTQLMMFFRHSNLGQGTNPLVFLSQFSLEKYLSQEEQSTAALTLYTKKQFFQGIHEVVESSNEDNFQLLDIQTPSICDNQEILEERRLEMARLQLAYICAQHQLIHLKASNSSMKSSIKWAEESLHSLTSKAVDKENLDAKISSLTSEIMKLEKEVTQIKDRSLPAVVRENAQLLNMPVVKGDFDLQIAKQDYYTARQELVLNQLIKQKASFELLQLSYEIELRKHRDIYRQLENLVQELSQSNMMLYKQLEMLTDPSVSQQINPRNTIDTKDYSTHRLYQVLEGENKKKELFLTHGNLEEVAEKLKQNISLVQDQLAVSAQEHSFFLSKRNKDVDMLCDTLYQGGNQLLLSDQELTEQFHKVESQLNKLNHLLTDILADVKTKRKTLANNKLHQMEREFYVYFLKDEDYLKDIVENLETQSKIKAVSLED

SEQ ID NO: 506 - DNA, 3773 bp, Homo sapiens
ccgtcccggggcggacgggcgcgggcgggaggatggagctgaactccctgctgatcctgctggaggcggccgagtacctggagcgcagggatcgagaggccgagcacggctacgcctcggtgctgcccttcgacggcgacttcgccagggagaaaacaaaggcggccggcctggtgcgcaaggccccgaacaacaggtcttcacacaacgagctagaaaagcacagacgagccaaactcaggctgtaccttgagcagctcaagcaactggtgcccctgggccccgacagcacccgccacaccacgctgagcctcctgaagcgggccaaggtgcacatcaagaaactggaggagcaggaccgccgggcactgagcatcaaggagcagctgcagcaggagcatcgtttcctgaagcggcgcctggagcagctgtcggtgcagagcgtggagcgcgtgcgcacagatagcacgggctctgctgtctccacggacgactcagagcaagaagtggacatagagggcatggagtttggccctggtgagctggacagtgttggcagcagcagtgacgcggacgaccactacagcctgcagagtggcaccggcggcgacagtggcttcgggccccactgccggcggctgggccgccccgccctctcgtaggcccgtgccctctgctccttggcctgcctgcccgccagccacgcgtgtcagccctccagttctccttcagttgacgccagcctctccacaggcccactgctgtgccattctggaagctccagctgctgctgggctgcctggcactgcccgcttgccggtcagggcctgccgagctgcctgccccttccagctgggcagagtcccctgcaaggaggcagggcccagcttccacatccggagccctggtcagcatagccgcccacggtctgttctcagattcctaatcattccagaagtattaaacgtcattgctgcaaacctcggcaggtgccgtgtgaggggcttaatgaccaccacagggagctcagaccccaaccctggatcccaggagaaaggagtggaccgaggaaggaaggaaggcaaggctgtctgtccatccgtccgtctgtccacctacctgtcagtccacataggctcctggcgtggacaaggggtctgtgaagggcgggaactgggtgagcacctggggcaggtgggtggttaaggtccttcccacttcgcaggtgtcagaacctagggctgggctctcggggccaggcaggccagcccagcccacgccgagctgggcagcgtctgctctggtaggactgtcagacgcacacgcgcacgcacctagacacacccactcatgtacatgctcacacatgcagacacacctgggcgtcccgaggtcacatgttctggggatgatggccttcaggggtcatctggcaaacagcccctgggctgtgcctggatccccctctagctcctgctcacccacgcccacccagtagtcctgcctgtctgcacaggagaggggcttctcttcctggctggggctggggtgaactggaggctggttaagttgcagccgctgggtcctcgggggcttactcatctcccttttttaaacaaaaagcaaaaaagtaaaatgctgcactgcccagcagcccggttagggctcctggagccaccttaggaaagggcttctcatgagctctgctgcggcagcttcagctggcagagaggctttcccagaaaaaaaaaaaaaaccatttttaaaaagaagaaagcctaaagactctcggcctagggacgtccgtgtgtgccgcctctgtttcctgtaccagatttttgtattctattttcctagctgttgttgcgtccttgtttgctgaggggtgggagccacccagcgtctcagggacctgtccctccgtcacgtcgtcaaagtgtgccttgtgtcttgtgtcaggccttgcccttcccaccagcatgtccctcgtggctcagggtgccccaggcctgcccagctagtgctgtcctcccatctcctgtgggcagcccctcccggcagccagggcttcctggaggcgatgcagccaggcccctgtgggtggcacggaggggctgtgacctggtccccagtgttgccctccccagtggctggcaggggcctgcttgctcactagagagatggattctcacctgtcacctgactcgagccccctgcttcctggcctaggcgagggttccaggtttcagacactggcagccaatgaagactgtgctcgctgggtggtgcaggcctggcaccaggaggcttgcacccgcctttccttcctgacgtcctctgtccttggggctggcccatagcagtgcctgccgtgcctctggtacatctgtagccaattcccatatcatggggaaaattcgtgtctattttcagtcgtacgcatagacgccccaggatggggggcccactgtggcggaagggggtccctggaaacaactctggcacagaacctgccctgcaggctgtagggggcatggtgcctggagctgaggggcatccgaacgcgttgcgggtggttgtgaggaggcctgtctgcatctccttccggccccactggggtccaggggtgcccagaaaggagcttcccctgcctgcctgagtctgtccccccaggcttcatttcaaacaccgtggcacctccgagcaaggcgggccgtgtgtaaaagcttgcttccccagccagcactgcagggccctgaggtggtcgtgtccctgccctcaattcttgaagcaccagctccctgccccaccctccagtgcctgaggcagctaggggcttctgctctcatctctgaccagcagaatccacccggtgaccagtggtggcccctcagcccaccctcccggcagctcagcctgtggctcttgaggccgtggttcccacgtggactgggaggcagtctcagccacccggggtgctgttcagctgcccctccctgccatcagcaggtgggtgaggggttgcccactgggtgggggcccgtgctaggagtcaccacatgctccaacctcccactgctccctgtcaggggcccaggctgccatcactggaggctgcagggaccaagaggccatcaccgtgtctatagagagcagacagaagcagaacagagcccggggctcctgagcctctgcgtgtgccctcccagcccacaccagtgctctcggccactgagcacccagactcaggcttgggttccccagccttattggaaggcagctcccgcataccaggataacccccgcaaaccacatagcagacccccgccatcctcgcagagtgggagaggctgcagcaaggctttgcctctgcagaccccatcttagtggcacggtgcttgggcctgtgtccccgggtggtggaaccctgtaccggtctgtggccctagggtccctgctctgtctgccccggcccgtgctgtccgctgggtgaggcaggctcccccgtgccctgcctccctctgtcagggaacctgggaccccctccccactgcctgcacagaggaccctgaccctcggccagcagggtggccccaggtccatgttgggcactagggcaggttccgtgccagagtcgggggccacacgagggcctggtgccggtgaggggggcgtgcgctagagggggaaaggggcccccggccacctgtccaccgtgtgggccgtgctgtgtccttatgtcattgtaatataaatacagatttttatatctc

SEQ ID NO: 507 - protein, 209 aa, Homo sapiens
MELNSLLILLEAAEYLERRDREAEHGYASVLPFDGDFAREKTKAAGLVRKAPNNRSSHNELEKHRRAKLRLYLEQLKQLVPLGPDSTRHTTLSLLKRAKVHIKKLEEQDRRALSIKEQLQQEHRFLKRRLEQLSVQSVERVRTDSTGSAVSTDDSEQEVDIEGMEFGPGELDSVGSSSDADDHYSLQSGTGGDSGFGPHCRRLGRPALS

SEQ ID NO: 508 - DNA, 4110 bp, Homo sapiens
accagcggagcgctgggtgtcagtgagcagcgaggagccgcgcgcccccgtgcccgcgtctgtccgtgcgcccgagcgcccactcccgggtctgaggtctgcccggcgcgccgcttgcagagcatactcagggccgcgcacctgccccgcgcacctgcccgccgcccgctcggcgctccgggcttcgctagccagcctccctgcgacagcgcgggggctccggccgtgcctccgcgtccgccccgcgcctcagccgggcccgggcgcagcgctgcggagggcgagggccgcccggagtccggccagggccggcgcggcgatgatgaacaggttccgaaagtggctctacaaacccaagaggtcggatccgcagctgcttgcccggttctactatgccgacgaggagctgaaccaggtggccgcggagctggacagcctggatgggcggaaggacccccagcggtgcacgctgctggtcagccagttccgctcctgtcaggacaatgtgttgaacatcattaaccagatcatggatgagtgcatcccccaggaccgcgcccccagagatttctgcgtcaagttccctgaggagatccggcacgacaacctggccggccagctgtggttcggtgccgagtgcctggccgccggctccatcatcatgaaccgggagctggagagcatggccatgcgcccgctggccaaggagctgacgcgcagcctggaggacgtgcggggcgccctccgtgaccaggcgctgcgggacctgaacacctacacagagaagatgagggaagcgctgaggcacttcgacgtcctgttcgcggagtttgagctcagctacgtctcggccatggtgcctgtgaagtcccccagggagtactacgtgcagcaggaggtcatcgtgctcttctgcgagacggtggagagggccctggacttcgggtacctgactcaggacatgattgatgactacgagccggccctcatgttcagcatccccaggctggccatcgtgtgtggcctcgtggtctatgcggacggacctctgaacttggaccgcaaggtggaagacatgtccgagctgttccggcccttccacacgttgctgcggaaaataagggatttgctgcagacgctgacggaggaggagctgcacacgctggaacggaacctctgcatttcccaagacgtggagttccccatccgcgcagacgtgcagggacccgctgccctggcgcctgccctctctgcccctctcccccctgaggggccactctcagctaaggccaaagacccggatgcagagctggcctgctccatgcagtacgacgaccaggagctggagcagctcagccgcatggtccacagggcgggggacgagatgtcctctttgctttcaccgcccattgcctgccagtccccagctcacaggccaggagcggagggcagcccaggcggggaggcctctccaggtagaccgcgcctgcggtcaggcagtgacgaggaggagcgcgtgttcttcatggatgacgtggaggggacggcagaagccctggccaggcccgagtccccagctggcccatttgggtgggcaggcagtacctgggccgacccccaggagaaagggcagggtgggccaggcggagcggcggggatcagcttgcccgcctcggaaaaggaggaggacttgagcaacaacaatctcgaggccgagggcacagatggggccagcctcgcgggcaccagctcctgcagctgcctggactcgcggctgcacctggacggctgggaggtgggtgcggatgacgcagagacggctgagatgatcgcccaccggacagggggcatgaagctctcagccacggtcatcttcaaccccaaatcgcccacttccctggactctgcggtcgccacccaggaggccgcctcggagcccgtggccgaggggatggatggcggcccccacaagcttagcactggggccaccaactgccttctgcattcctgcgtgtgctgtgggagctgcggggacagcagggaggacgtggtggagcgtctgcgggagaagtgcagcccgggaggcgtcattggtgcctcgtacgctgccggcttagccaaggccagcgacagggcccctgagagacaggaggaggcgcccccaccctcagaagatgcctccaacgggcgggagcccaaagcccccacttccgacaagtgcctgcctcacacctcaggttcccaggtggacacagcgagtgggctgcaaggagaggctggggttgcaggtcagcaggagccagaggccagagagctgcatgctgggagccccccggctcacgaggcgcctcaggccctgtcgggctccagcagctccacagctgggtcctgctcctcagacaagatggggccagaggcggccccagcagccacgcatgctgccccacaggccacaagagagaagatccggtccaggttccacggcagccacgacctcatccaccgcctgttcgtctgcatttcaggtgtggctgaccagctgcagacgaactatgccagtgacctgagaagtattcttaaaacactgtttgaggtcatggccaccaagcctgaaacagacgacaaggaaaagttaaggaaggtcacccagactctgcggagtgcggccttggaggactgtgcactgtgccaggagaccctgtcatcctctgaactggcagccaagacccgcgatggggactttgaagaccccccggagtgggtgccagacgaggcctgtggcttctgcacggcgtgcaaagcacccttcaccgtcatccgccggaagcaccactgccgcagctgtgggaagatcttctgctcgcgctgctcctcgcactcagcaccgctgccccgctacgggcaggtgaagccggtccgagtgtgcacccactgctacatgttccatgtcacgcccttctacagcgacaaggccggcctgtgacgtggtgccaggggcagccccaacccacccgggccaggaacccccaggaaggtggggccacgctgcaggcaggtctcactgcgtctcatgaggccgctgccgctgctgcaggggcacccagacctccagagcatccagagcctctgtcctgcccacgctagcctccctgcagggaccccgggccggctgcaggggccaacaagaggtcagctttgcccagcaggggacccggaggagcctggtggctgcctcagggcagggtgcctggcggagaaggcctgggccctcccactggtccctcggagatctgctggggctatgggaatcggggcgggtgatggaggtggacaagagtggggccactctgcgcctctgctgttgcggtgaatctggaagccggagcaagggccactccacaggctctttggcacagcagggctccctatgtgcctcccaaacgtcaaatgcaggctacccattctccccatcagctgcccacctcgttccccagccctcacccctcacccctcaccatccttcctcaggacttggctaaacaacatgcatctcatttcttcttggagtggggagatgcgggaagctgacccagtggtcctctaggcaggcagggtgctcctggtgtctgcccaccactgtccccttgctgatggcatgggggtccgaccaggcactgacaccgcaggcagaggttgctcggggccttgggtcgggtttaccaatcagccaggacgcccggggccaccagctcagctaccacttccccttccctctgcaccctctggaaccctggcccaattcctcagaccccagagtggcctgggacccaagctgccgcagctgagtggccccagcggacacctcctcaggcttaaatctcaggcttcacattgcaatgacgattgcagttttatttttggagatgacacacctactgcttcttttctaggataaatctaattactgtttactggtggagtacatatgcatagaaacggcttctgtcggggggagagtatataatggaggaaatattatgtattgagattatatttattttctaaatgctgtaatttgaagccatttccataaatctatttaaggattgc

SEQ ID NO: 509 - protein, 887 aa, Homo sapiens
MMNRFRKWLYKPKRSDPQLLARFYYADEELNQVAAELDSLDGRKDPQRCTLLVSQFRSCQDNVLNIINQIMDECIPQDRAPRDFCVKFPEEIRHDNLAGQLWFGAECLAAGSIIMNRELESMAMRPLAKELTRSLEDVRGALRDQALRDLNTYTEKMREALRHFDVLFAEFELSYVSAMVPVKSPREYYVQQEVIVLFCETVERALDFGYLTQDMIDDYEPALMFSIPRLAIVCGLVVYADGPLNLDRKVEDMSELFRPFHTLLRKIRDLLQTLTEEELHTLERNLCISQDVEFPIRADVQGPAALAPALSAPLPPEGPLSAKAKDPDAELACSMQYDDQELEQLSRMVHRAGDEMSSLLSPPIACQSPAHRPGAEGSPGGEASPGRPRLRSGSDEEERVFFMDDVEGTAEALARPESPAGPFGWAGSTWADPQEKGQGGPGGAAGISLPASEKEEDLSNNNLEAEGTDGASLAGTSSCSCLDSRLHLDGWEVGADDAETAEMIAHRTGGMKLSATVIFNPKSPTSLDSAVATQEAASEPVAEGMDGGPHKLSTGATNCLLHSCVCCGSCGDSREDVVERLREKCSPGGVIGASYAAGLAKASDRAPERQEEAPPPSEDASNGREPKAPTSDKCLPHTSGSQVDTASGLQGEAGVAGQQEPEARELHAGSPPAHEAPQALSGSSSSTAGSCSSDKMGPEAAPAATHAAPQATREKIRSRFHGSHDLIHRLFVCISGVADQLQTNYASDLRSILKTLFEVMATKPETDDKEKLRKVTQTLRSAALEDCALCQETLSSSELAAKTRDGDFEDPPEWVPDEACGFCTACKAPFTVIRRKHHCRSCGKIFCSRCSSHSAPLPRYGQVKPVRVCTHCYMFHVTPFYSDKAGL

SEQ ID NO: 510 - DNA, 1145 bp, Homo sapiens
atggcggcgttgaccccagggaccccaggctccttcttgccccaaccatgtgtgatgaggtcaccctcacccaggaccttctgctccccagcagggcctgatgaagaaaccgtcaccttcccgggcaaagctgagggacgctcagaggctgtttcgagaggcttctgccctaagaagatggcctactatggaaaatgcattgaaactgtgatcgagcaactcgacaaatttacacccaagagggacaaccctgagcagttcctggaggctgcggccacctccctgcaggctctgagcccccagaagcagagctttgttttggaggttctgtctgggtgcctcgagtaccggaagctgctgaccgtcgtggtggatgccttctacgtggaggatggccgactctgcctgcgggttgaccacagccgcttcgaggtgatctgctacctagccacattcctgctggaggaactcggcttccagctattctgtaacatcatcaagtcccagcccgtggataagatgtgcaagttcctcaggttcttcttcaaccccctgcacctgtgctcatggatcaaggatgagtggagcctcatctacgagccagcccacgtgaaggagaactggatcgaccccctgatgaggtcccccagagcacctaccagccacccaaggagcagcagcagctggagacagtcaagaggtacaaccgccgaaaggccgaggagctgctgctgagggcaaacatcgaggaactgtgctgcgccatgcccaggtcctgcagggagcgagtgcaggtaccgcccagctctctcaagacccatcatcgaggtgccatcttctcaagccatcagaaagttcctcccaacgccatcgcagtgaccacttatgtagccttttcccactgagggccggggaggggcggattcccagtagcactgggaaagtgtgccttgagcccactgcgatgtggcccctaagcaggcgggtgtagacgcgcacccacatcccccaggaggaagctcacgggaaagcacctgcaggtgctgcctctgggtatctccagatgttccgtgacaagcatttcatgtctctgtaaggaaaaaacaaacccaggtatgtttgccaataaagaaaaagcaaggtaa

SEQ ID NO: 511 - protein, 244 aa, Homo sapiens
MAALTPGTPGSFLPQPCVMRSPSPRTFCSPAGPDEETVTFPGKAEGRSEAVSRGFCPKKMAYYGKCIETVIEQLDKFTPKRDNPEQFLEAAATSLQALSPQKQSFVLEVLSGCLEYRKLLTVVVDAFYVEDGRLCLRVDHSRFEVICYLATFLLEELGFQLFCNIIKSQPVDKMCKFLRFFFNPLHLCSWIKDEWSLIYEPAHVKENWIDPLMRSPRAPTSHPRSSSSWRQSRGTTAERPRSCC

SEQ ID NO: 512 - DNA, 2985 bp, Homo sapiens
atggggggcggagccgaggcctccgaagcggaagtgggttgctgttgaggcggcggcatctttctcgaggagctctcctgggcggctgaagaaggagcttcttctccggagtgcgccggcggtggcgcctgcggacctaactagctccaggttaggccgagctttgcgggaaagcagcggacttgaaaatactggaaatctgtccggatccaaattattttgcaagccagatgagtaaccagagggcatgaaaggttgagaacatttgacttccctgcaaaccttggtatagatcacttccttttctgtaggaaaggaaaggcaccaaagagcacaatgagtacaagaaagcgtcgtggtggagcaataaattctagacaagctcagaagcgaactcgggaagcaacctccacccccgagatctccttggaagcagaacccatagaactcgtggaaactgctggagatgaaattgtggacctcacttgtgaatctttagagcctgtggtggttgatctgactcacaatgactctgttgtgattgttgacgaaagaagaagaccaaggaggaatgctaggaggctgccccaggaccatgctgacagctgtgtggtgagcagtgacgatgaggagttgtccagggacagagacgtatatgtgactacccatactcccagaaacgccagggatgagggcgctacaggcctcaggccctcaggtactgtcagttgtcccatctgcatggacggatactcagagatcgtgcagaatggacgtctcatcgtttccacagaatgcggccatgtcttctgtagccagtgcctccgtgattccctgaagaatgctaatacttgcccaacttgtaggaaaaagatcaaccacaaacggtaccaccccatttatatatgaagtattcagagccccccaggagagacggatggacagacagacagccaggttctccagtggtatctgcctccattttcctgagatcaaaaagactgtttcgaaaccaacatctgatatgtaaactgctcttttgtttccaaccccttccttttgttatctccagtttgatgctatggcgctggacccagggccctcccaggccatctctgttcctctggggtggtccagttctagagtgggagaaagggagtcaggcgcattgggaatcgtggttccagtctggttgcagaatctgcacatttgccaagaaattttccctgtttggaaagtttgccccagctttcccgggcacaccaccttttgtcccaagtgtctgccggtcgaccaatctgcctgccacacattgaccaagccagacccggttcacccagctcgaggatcccaggttgaagagtggccccttgaggccctggaaagaccaatcactggacttcttcccttgagagtcagaggtcacccgtgattctgcctgcaccttatcattgatctgcagtgatttctgcaaatcaagagaaactctgcagggcactcccctgtttcctaagaacgaaaaagtgcaataaaggccattcgttacctacttttcagcagcccacaagatgtagcactattagtgtccccctcagaggcttaatgttgcctgtggagcagtgcccatcccagcccgtttctgcccaccagttgttctcaggaaccttacccatgctccagcgtccttcacctggcacaggacatgcaagataaatagggcaggcacgtgtttgggtgtcctctcttttctgataaaatccatcccgtgtttgccacacgccctccagtcctcagttcccactgcctaacgtctgcccccgtgtagatactgagaggtggtggcagtaattgtggccttatcagccgctcagttccaggcttttgcccaggtcactgttgccccatgttcggagaacctggcccacctgtcttggctttctcatccttcccaacccagtgccgtttatttcagaagcttcctggccactgggcttggatgcttcgggcttctgactgctccataggttttgactggtgaaacaggggcccagatgacaacctctccttcgctccacaggtacgcgggagcctcaggttctctcaggggcagcaaagtggcccaagctgcccctgacagcacagggcctggggggtggctaacgagagaggccttacagtgccggcatgcctcctcttccactgtcgtccttcctcagagggcctcacgccaaacaaacggccttttcgtgtgaaacatcttcagggcgggaaaggggccacttctggctttgttagcaataactgaccttcagtttacccttctgaaggagcagggactcagcacagaattcactttagacggggctgaaggagtgtccctcctctatgtgaaaagaaaattgttttattcttcattctgactttttaactgtttggctcacttccagttagtttgaatgaaaataataattttctacttggagttgaagagggcagaatccgcagctctcatcattgtgatgtgtagcatgtctgccctctgactggacatcattgccattaactttcttctgggcatcacggcaatgtcacgatgcccagacttggagcaaggcaaccttggagtcagtccactcataaaatatggtaacacccattttaaaatttaagttttgtccttaaagacaacttcagtggttaattataaaagttgtgttacttcgtcctaaattaaattgatagaaagatttaaaaatgtgttttgtttctactattcagaaactgcgaactagggaaaggttggtatgaagaaatgtctttccttttttcaatgtacatagttcaactctttctttgttacatttaaactatatccatggatatcagtctgctttggactcctctgctagtgttacagatggaaataaaaccattaatttgaaccaaaaaaaaaaaaaaaaaaaaaaaaaaaaaaaaaaaaaaaaa

SEQ ID NO: 513 - protein, 190 aa, Homo sapiens
MSTRKRRGGAINSRQAQKRTREATSTPEISLEAEPIELVETAGDEIVDLTCESLEPVVVDLTHNDSVVIVDERRRPRRNARRLPQDHADSCVVSSDDEELSRDRDVYVTTHTPRNARDEGATGLRPSGTVSCPICMDGYSEIVQNGRLIVSTECGHVFCSQCLRDSLKNANTCPTCRKKINHKRYHPIYI

SEQ ID NO: 514 - DNA, 4742 bp, Homo sapiens
cacaatgacatgcagacctgcatattggagctggacggagaaactgggctaatgtgacagacagcaacaagagtaaggcagttgcttcgctattgagagaaagaaccatatgaagaaatttcggcagaggcggaccgggaacctcagcagctgcagaactactggtcagaagtgcgctacacggtgcgctgcatctaccgccaggcaggaaccccgctggcagatgaccaggaccagtctctggtgcctgacaaggagggagtgaaggagctcgtggataggctctgcgagagggacccctaccagctgtaccagcgtctggaacagcaagctcgagagtatgtgctggagatgaaggtccgcctgctccggcagctgtcggctgcggccaaggtgaaggcaccatctggcctgcagggcccgccgcaagcgcaccagttcatctccctcctgcttgaggagtacggcgccctctgccaggccgcacgctccatcagcaccttccttggcactctggaaaatgaacacttgaaaaagttccaagtgacgtgggaactgcataataaacacctgtttgaaaatctggtcttttcggagccacttcttcagagcaacttgcccgcactggtgtcacagatcaggctaggaaccaccacacacgacacctgcagtgaggacacatacagtaccttgctgcagaggtaccagcgttccgaggaggagctgcgcagagtcgccgaggagtggctggagtgccagaagaggatcgacgcctatgtcgacgagcagatgacaatgaaaaccaagcagcgcatgttaacagaagactgggagctttttaaacaaagaagattcattgaagaacagttaaccaataagaaagcagttactggcgagaacaacttcacagacaccatgaggcacatgttatcgtcccggctgagcatgcccgactgccccaactgcaactacaggagaagatgtgcttgcgatgactgcagtctctcacacatcctcacgtgtggtatcatggacccccccgtcactgatgacatccacattcaccagctcccacttcaagtggatcctgctcctgactatcttgctgagaggagcccgcccagtgtgtcatctgcaagctcggggtccggctccagctctcccatcacaattcagcagcaccccaggctcatcctcacagacagtggctcggcaccaactttttgtagtgatgatgaagatgttgcaccattgtcagccaaatttgctgatatttatccattgagtaattatgatgataccgaggtggtggccaacatgaatggaatccacagcgaattgaatggtggcggggaaaacatggccctgaaggatgagtctcctcagataagcagtaccagcagtagttcctcagaagctgatgatgaagaagcggacggcgagagtagtggggagcccccaggggccccgaaggaagatggagtgctgggaagcaggagccccaggacagaggagagcaaagcagacagtccacccccatcctacccaacacagcaggctgaacaagctccaaacacttgtgaatgtcatgtttgtaagcaggaagcttctggactgacaccatctgcaatgacagccggagcccttcctcctggccatcagttcttgagcccagagaagcccacacaccctgcactgcacctttaccctcacatccatggacatgtgcctttgcacactgttccacacctgccacgccctctcatccaccccaccttgtatgcaacgccccccttcacacacagtaaggctttaccgccagcacctgttcagaatcacacaaataagcatcaggtattcaatgcatctcttcaagaccatatttatccgagctgttttgggaatactccagagtggaatagttctaaatttataagtctttggggatcagaagtgatgaatgataagaactggaatcctggcactttcttgccagatacaatttctgggagtgaaatattagggccaacactctcagaaacaagaccggaagcccttccacctccatctagcaatgaaacacctgcagtctcggatagtaaagagaaaaagaatgctgcaaaaaagaaatgtttatacaatttccaagatgctttcatggaagcaaataaagttgtcatggccacgtcatcagccacgtcctctgtgtcctgcacagctaccacagtgcagtccagcaacagccagttcagagtgtcatccaagagacctccttcagtaggtgacgtgtttcatggcatcagcaaggaggaccacagacactcggccccagccgccccgaggaatagccccacgggcttggcccccctcccagcgctctcgcctgctgcgctgtcacctgctgcgctctcacctgcctccacacctcaccttgcaaatcttgcagccccatcattccccaaaacagcaaccacaactcctgggtttgtggacacacgcaagagtttctgtcctgcacccctacccccggccacagatggctccattagcgcccctccaagtgtctgcagtgaccctgactgcgaagggcaccgctgcgagaatggtgtctacgacccacagcaggatgatggggacgagagtgcagatgaggacagctgctctgagcacagctccagcacctcgacctccaccaaccagaaggagggcaagtactgcgactgctgctactgcgaattctttgggcacggcgggcctccagctgcaccaacaagtagaaattatgcagaaatgagggaaaagcttcgcttacggctgaccaagaggaaagaggagcaacctaaaaaaatggaccagatctcagaaagggaaagcgtcgttgaccatcggagggtggaggatttgttgcagtttataaatagctccgaaaccaaaccagtgagcagcacgcgtgcagcgaagcgagcaaggcataagcaaaggaagctggaggagaaagctcgcctagaagcagaggccagggcccgggagcacctgcacctccaggaggagcagaggcggcgggaggaggaggaggatgaggaagaagaggaggatcgtttcaaggaggaatttcagcggcttcaggagcttcagaagctaagagctgtaaaaaagaagaagaaggagaggccaagtaaagactgccccaagttggacatgctcactagaaatttccaggcagcaacagagtctgttcctaactctggaaacatccacaatggctcactagagcaaactgaagaaccagaaacctcttctcactccccatccaggcatatgaaccactcagagcccaggccagggctaggggctgatggggatgctgcagaccccgtcgacaccagagactccaaatttctcctccccaaggaggtgaatgggaagcagcatgagccactctcttttttcttcgacatcatgcagcaccataaagaaggaaatggcaagcagaagctgaggcagaccagcaaggccagcagcgagccagcgaggaggcccacagagccccccaaggccacagaggggcagtccaagccccgggcccagactgagtcaaaggctaaggtggtcgacctcatgtccatcacagagcagaaaagagaggagagaaaagtcaacagtaataacaataacaaaaagcagctgaaccacatcaaggacgaaaagtcaaacccaacccctatggagcccacctctcccggtgagcatcagcagaacagcaagctggtgctggcagagtcccctcagccaaagggcaagaacaagaaaaataagaagaagaaaggagacagagtcaacaattcaattgatgatgtctttctacctaaagatattgacctagacagtgtggatatggatgagacagagagggaagtggaatatttcaaaaggttctgcttggattctgctagacagacccgacaaagactgtctatcaactggtccaattttagcttgaaaaaagccacctttgctgcccactgaatgaggactccctggagagggacacgcgagaggcaggccaggctgcaccaccccaagagccacgcccctcgctggcgccccagagccgtggtgcttgccaagggctgtgcggagctggtgctgcctgaaaccccagaccgagaagttgatgctcggcccacgccgttagctcgtgtgcgtgtagtctgtgcgtgagactccttcgattgtagctctgtgctgtcggattggaacagtagttcccgccaagtcctcccaccaccgcggcctcggaggcctgggccgtggccagataggagtttgcatcatccacgtggctccgttgcctctgcattgcgccctgtcctgtcatgtgtcctcaccggggtatcggccgtcactcagctctcctgtgcccctgcgtctcaccctaggcgggctgggcggggcaggcctcctttgttctccacaatctactgtctccgagtgtacacgttgcgctgtttgtgtttgatccccctgacttgtagccagcttgtgtaagatcccttgcagaacgagaaagttaaaaacaagcccacccagtactcacaccatcaagtctgttatagagtgtacgactgtattaacacggaggcctgcctggctacttttttaacatattgttaagtaatattaaaatcatgtctttctttttgaaagatggaatacattagtacagcaggagaaaaaaaaaa

SEQ ID NO: 515 - protein, 1224 aa, Homo sapiens
MKVRLLRQLSAAAKVKAPSGLQGPPQAHQFISLLLEEYGALCQAARSISTFLGTLENEHLKKFQVTWELHNKHLFENLVFSEPLLQSNLPALVSQIRLGTTTHDTCSEDTYSTLLQRYQRSEEELRRVAEEWLECQKRIDAYVDEQMTMKTKQRMLTEDWELFKQRRFIEEQLTNKKAVTGENNFTDTMRHMLSSRLSMPDCPNCNYRRRCACDDCSLSHILTCGIMDPPVTDDIHIHQLPLQVDPAPDYLAERSPPSVSSASSGSGSSSPITIQQHPRLILTDSGSAPTFCSDDEDVAPLSAKFADIYPLSNYDDTEVVANMNGIHSELNGGGENMALKDESPQISSTSSSSSEADDEEADGESSGEPPGAPKEDGVLGSRSPRTEESKADSPPPSYPTQQAEQAPNTCECHVCKQEASGLTPSAMTAGALPPGHQFLSPEKPTHPALHLYPHIHGHVPLHTVPHLPRPLIHPTLYATPPFTHSKALPPAPVQNHTNKHQVFNASLQDHIYPSCFGNTPEWNSSKFISLWGSEVMNDKNWNPGTFLPDTISGSEILGPTLSETRPEALPPPSSNETPAVSDSKEKKNAAKKKCLYNFQDAFMEANKVVMATSSATSSVSCTATTVQSSNSQFRVSSKRPPSVGDVFHGISKEDHRHSAPAAPRNSPTGLAPLPALSPAALSPAALSPASTPHLANLAAPSFPKTATTTPGFVDTRKSFCPAPLPPATDGSISAPPSVCSDPDCEGHRCENGVYDPQQDDGDESADEDSCSEHSSSTSTSTNQKEGKYCDCCYCEFFGHGGPPAAPTSRNYAEMREKLRLRLTKRKEEQPKKMDQISERESVVDHRRVEDLLQFINSSETKPVSSTRAAKRARHKQRKLEEKARLEAEARAREHLHLQEEQRRREEEEDEEEEEDRFKEEFQRLQELQKLRAVKKKKKERPSKDCPKLDMLTRNFQAATESVPNSGNIHNGSLEQTEEPETSSHSPSRHMNHSEPRPGLGADGDAADPVDTRDSKFLLPKEVNGKQHEPLSFFFDIMQHHKEGNGKQKLRQTSKASSEPARRPTEPPKATEGQSKPRAQTESKAKVVDLMSITEQKREERKVNSNNNNKKQLNHIKDEKSNPTPMEPTSPGEHQQNSKLVLAESPQPKGKNKKNKKKKGDRVNNSIDDVFLPKDIDLDSVDMDETEREVEYFKRFCLDSARQTRQRLSINWSNFSLKKATFAAH

SEQ ID NO: 516 - DNA, 1951 bp, Homo sapiens
ggaagttgccggcggccgcgcggcctcccgggcgggcctacagccatgtcccgggacccggggtcgggcggctgggaggaggccccgcgcgcagctgccgcgctctgcaccctgtaccacgaggccggacagcggctgcgccgcctgcaggaccagctcgctgcccgcgacgccctcatcgctcgcctccgcgcccgcctggccgcgctggagggggacgccgcgccgtccctagtggacgcgctgctggagcaggttgcgcgcttccgggagcagctgcgaaggcaggagggcggcgccgccgaggcccagatgcgccaggaaattgagaggctgactgagcgactagaagaaaaagagagggagatgcagcagctgctgagccagccccaacacgagcgagagaaggaagtcgtcctgctacggaggagcatggcagaaggggagcgcgcccgggccgccagtgacgtcctgtgccgctccttggccaacgagacccatcagctgcggaggacgctgaccgccaccgcccacatgtgtcagcatctggccaagtgtctggatgaacgacagcatgcacaaaggaatgtgggggagagaagtcctgaccagtcggaacacacagatgggcacacctctgtccagagtgttattgagaagttgcaggaagaaaatcgactgttaaaacagaaggtgactcacgttgaagacctcaatgccaagtggcagcgctacaacgccagcagggacgaatacgtgagggggctccatgcgcagctcagggggctgcagatcccccacgagcccgagctgatgaggaaggagatctcccggctcaacagacagttggaagagaaaataaatgactgtgccgaagtgaagcaggagctggcggcctccaggacggcccgggatgctgcgttggagcgggtgcagatgctggaacagcagattctcgcttacaaggatgacttcatgtcagaaagggccgatcgggaacgggctcaaagtaggattcaagaactggaggaaaaggtcgcctctttgctgcaccaggtgtcctggagacaggattctcgagagccagacgccggccggattcacgctgggagcaaaactgccaagtatttggccgccgacgcattagagcttatggtgcctggtggctggaggcctgggactgggtcccagcagccagaaccccctgcagagggcgggcatcctggcgcggtccagagaggccagggggaccttcagtgccctcactgcctgcagtgcttcagtgacgagcaaggggaagagctcctcaggcatgtggccgagtgctgccagtgaccgagactcacccgtgcccttgcggcctcctggcccggtgcagctgccctcagggacagggtgggtgctctcagatgccatgggttgagctctactgagagccaaggcccctagaatagttgcggggcactctgatcgttcactttggtccctttggctatggaacaggctgggtcacagggaactgccagtgaggctggaggctggaggtggagatggggtcaggaacatctggcagagggaggtcccagtctgtgtctccatcaggcttaagccagagctatctggtgctggtgtgccagcccctcccccagcctgcctagaaaggggtggctgcctgagggagtcacttgtatggtccccagggtgggagccccatcctgttctatggaataaagcgtcgcctctctgcctcgaaccagtcaaatggagtattgcggctgcacgtcacactagggtggccacccccgccattgcgagccacatgtctgcactgagaaactgcatttcagtagcatttgtcatccagccggaagttaaagcacacttactttattcacctatttttataataaacgttcttgctgctgtgactgcaaaaaaaaaaaaaaaaaaa

SEQ ID NO: 517 - protein, 429 aa, Homo sapiens
MSRDPGSGGWEEAPRAAAALCTLYHEAGQRLRRLQDQLAARDALIARLRARLAALEGDAAPSLVDALLEQVARFREQLRRQEGGAAEAQMRQEIERLTERLEEKEREMQQLLSQPQHEREKEVVLLRRSMAEGERARAASDVLCRSLANETHQLRRTLTATAHMCQHLAKCLDERQHAQRNVGERSPDQSEHTDGHTSVQSVIEKLQEENRLLKQKVTHVEDLNAKWQRYNASRDEYVRGLHAQLRGLQIPHEPELMRKEISRLNRQLEEKINDCAEVKQELAASRTARDAALERVQMLEQQILAYKDDFMSERADRERAQSRIQELEEKVASLLHQVSWRQDSREPDAGRIHAGSKTAKYLAADALELMVPGGWRPGTGSQQPEPPAEGGHPGAVQRGQGDLQCPHCLQCFSDEQGEELLRHVAECCQ

SEQ ID NO: 518 - DNA, 7300 bp, Homo sapiens
cagccgggtgacccaggccgaggccggcagaagacagcctgatgccttgaagacttcctcttgcacttttgttggagggtgctggtttgctaaaagcagagagtatttttctttttatttattttgtttttaattttttaattttagctccagctcagttgcccagactggagagcagtggccaatcatagcttactgcctcctggaactcctggctcaatcgatcctcctggataagcctcctccgggtactatagcttcatggcggctgaagagatgcattggcctgtccctatgaaggccattggtgcccagaacctgctaaccatgcctgggggcgtggccaaggctggctacctgcacaagaagggcggtacccagctgcagctgctgaaatggcccctgcgctttgtcatcatccacaaacgctgcgtctactacttcaagagtagcacctctgcctccccgcagggcgccttctccctgagtggctataaccgggtgatgcgggcggctgaggagaccacgtccaacaacgttttccccttcaagatcatccacatcagcaagaagcaccgcacgtggttcttctcggcctcctccgaggaggagcgcaagagctggatggccttgctgcgcagggagattggccacttccacgaaaagaaagacctgcccttggacaccagcgactccagctcggacacagacagcttctacggcgcagttgagcggcctgtggatatcagcctttccccgtaccccacggacaatgaagactatgagcacgacgatgaggatgactcctacctggagcctgactccccggagcccggaaggcttgaggatgccctgatgcacccaccggcttacccaccacccccagtgcccacgcccaggaagccagccttctctgacatgccccgggcccactcctttacctccaagggccccggtcccctactgccacccccgccccctaagcacggcctcccagatgttggcctggctgctgaggactccaagagggacccactgtgcccgaggcgggctgagccttgccccagggtacctgctaccccccgaaggatgagcgatccccctctgagcaccatgcccaccgcacccggcctccggaaacccccttgcttccgggagagtgccagccccagcccggagccctggacccctggccacggggcctgctccacttccagtgctgccatcatggccactgccacctccagaaactgtgacaaactcaagtccttccacctgtccccccgaggaccacccacatctgagcccccacctgtgccagccaacaagcccaagttcctgaagatagctgaagaggaccccccaagggaggcagccatgcccggactctttgtgccccccgtggctccccggcctcctgcgctgaagctgccagtgcctgaggccatggcgcggcccgcagtcctgcccaggccagagaagccgcagctcccgcacctccagcgatcacccctcgatgggcagagtttcaggagcttctcctttgaaaagccccggcaaccctcacaggctgacactggcggggacgactcggacgaggactatgagaaggtgccactgcccaactcggtcttcgtcaacaccacggagtcctgcgaagtggaaaggttgttcaaggctacaagcccccggggagagccccaggatggactctactgcatccggaactcctctaccaagtcggggaaggtcctggttgtgtgggacgaaacctctaacaaagtgaggaactatcgcatttttgagaaggactctaagttctacctggagggcgaggtcctgtttgtgagtgtgggcagcatggtggagcactaccacacccacgtgctgcccagccaccagagcctgctgctgcggcacccctacggctacactgggcctaggtgatggcagtccatgtggctgccaggccaaggcagtcacaggggccctgaccccaggccacacagacggacatgggcccacatgggagggtgagcaggagcaaggctgtgcttgcctagggcctctgtgatggacatctcgtaggacccagccagtctcatccagcaggttgggttctagggctgaaccaggcgccaggctccagaggacgaagggactctgttgccccacactaacttgccctgtcccaatcccagaaacccaggaccaagctgtgcctgggctccaaggacaggaacactggtccccccatcacactcacccctaagtgggctgggagccaggcagggccagggcagctgggtgggggccggggctggccctgggacccccaggaacgctaagacacaggctccagtaggggctgttgcctccaataaagcagcagtgagctttgccttggtggctggggcttgattgggaaggaggggattaccagcttactgggtgcccatgctgatgtctaagtggtgaccgcagcagtacccgggaaccccaacagttggttgtcttgtcttccagggtgcaggtcactgagtgacttccccagggtgcacagcgagtaacagatcaggacccaaacttgggcagtctgggctgggagcccacaccccactcaccagttctgctgcctcaggtcaggccagggcagtgctgctgcagagctagaaggccctgcagctacagctgcttcattccctgcattagtgcctggttactgggtacctcctgagtggctgtccccgttccagaacttgcatacactgagcgggctacagagctagaagccctgcagctacagctgcttcattccctgcattagcgagcagttattgggtacctcctgcatgcctggtcccattccagacaggggcctctggcctggctgagttcacagcccagtctggggacagctgggtatgaggtgcttacggcacagtgtccagggcagctgggtgtgcagggactgggggctcccggaagattttttggaggaagtaacagctacgatgggatgggaacagtggaccctaagcaggccaagggtgcgtagggacggtggtacccagatgcccaagtcttccaggcaatacctggctcaggcccagccccaatccatccccttactttctgccatggagttccagcaggtcactctccctggcacaccttccaggctggatttttaatgaaacagactcagggaggtaggggctggcagggaccctagaatccttgtgatttttcttagcaccttatgtcagggaaacctaaactgaggtcagcacttgggcccactgacagtgactgactgggggagaaggtcctgcagcccccttcccctgggtgtgttctggggacctgtggtttgctggcggaaacaaatgatgaggctggttagcggatgtgggaggctgtgaccccagggggccatagggtgcggtggaactgcaggccctgcagatgacggcagccagctgcttccaggaaccaggtgtccaaggccacctctgcaggggtttcctcttcagcctgcctggggtgagaggtcagtgcaccacagccgaggctggagcacagggagcttctgttgttctgatctatctctggaaaaccagccattcctcctccctgcagtcagaattctttgccctgtctgacctgaacttgcttagggagtcatgccactccccactgtggccatagtttctcttcctgtaaaattttattattttagttttttgtttttgagatgtagtctcaccctgtcgcccaggctggagtgcaatgccgtgatctccgctcactgccacctccgcctctctagttcaagcgattttcctgcctcagcctcccgagtagctgggattccaggcgcccgccaccacgcctggctaattttttgtatttttagtagagacgggattttatcatgttggccaggctggtctcgaactcctgacctcaggtgatctgcccaccttggcctcccaaagtgctgggattacaggcatgagccactgtgcctggccccttcctgtaaaatttttaaatggagaattgggtgcgagatgtggtttccagcctggtgcctggggtgctgagctagtgagtggtgcagtccaggacacctttgctttatgtcacttacacggtcacctggagccggctcaagtggctaaagcatcctggggcccagagccaggtgatagtccctctggccaactggacagttgaggcttgtggttaacccgaagcccagctggggccttggtccagcttcgcttcccagattctgcacctgctagcacagctgtccacgtctgtgtgagctgttctaggccgagggcctcagtttcaagagtgtgttggggtgggatggggcaggccgtggtcctccagcatgaagaaggagccatgaggagttcccatgacctcccgagacttgccataagtgttctagtccacatataagggtagggttgggattaccatttactgaccacatctgtgaggtgccgagctgggtgcttgacatcatttgcttggagaagcagctgttagtagacccattttacaggtgagagaaccaagtctcacagaggcctgggttcaagtcccacctctgccactaactggcatgtgaccctatctatccttcactgctctgagcctagaccctggcccctgcctggctccctgccaggctccctgccacccctcacgacctctgatggtcgttgtgggggtctcttgcctggctcccagggctagggttagggctctggaggtgctttcactcaaccaagggggccacagcactggggagtgaaactgccccgcctcaccctgcgttgccctctgggtctgtgagggtgggctggcaggaggcctaggccttgccctaggggcagtcctgcttcctcattttatagatagggaaactgaggctttgggaggactcactgacatacctaccttcaagatgagttcaggtgggctcagttctggggcttgggaaaagggccccagtggctttgggaagcacccccagcccagggtgaaacatgcttcttctcttcctgtggttccatccgaaggattgtggtgagccccgtgccttcagttaataaagatttgtattgtgaaaagattttttcttttttttttgggacacagtctcactctgtcgcccaggctagagtggattggcgtgatctcggctcaatgcaaatctccagggttcaatcgattctcctgcctcaccctcccatgtagctgggattacagctgcctgccaaatttttgtatttttagtggaaccggggtttcaccatgttggccaggctggtcttgaactcctgacctcaactgatccgcccaccttggcctcccaagtgctgggattacaggcgcgagccacggcgcccagccttgaaaagatgtttttagaaccagaagaaacctcggttcccactgatccttctgggccacgttgtgcggagctcccctgctggttggggctcagcgcagccccagggaggtgcttcctgcacctcaggatgggcgagggtgggcattgggggagagggggacctgggacctgcggcttagttccctgaggcaggcagggcttattggggccatttcatagaaaggcagattgaagctcagcagggaagaagcttttgagggtgatccaggcgctggagggatggcctaggacaccagggtcacaccaggaacatgggagggccgtgcttgtctctagacgaggggaatgggggaagggccacaacctctgtttctgtgacccagcagcatcaagcccctcgctgggcacctcgcacacaccccctgccttatctctgcctgcacgccctgttccctccacctagactgcctgctgagggggcagtgccaggaggttgcctgtccttggggaagaggggcagtgaccctgtgaagatgcttgacagacaacccccaccacctcagaagtgtgtgtgagtggtgaacccttttaagccatcttccagccattctcactggagggagatttgatgggtacagagcagacccctacctgtctaccctccttcggacccctaggaagcttcgcaggccttccaggctgccagacagctgccctggcgttgccgtctgcttcttccctggccccactctgaggggctcagagctgaggcagaatccctttttcattcatttcctgcagaataaaacaacatacagaaaagtgaataaaacataaatgcacaacctaacacactgttaggaagtaaacgatctgcaaccaccatcaggaaatagttttgccagcacccaagtgccctcccctcacagtgtcacttccggcctctctgccctggcttatgtgagtcttgtgttcttgtttttctaaaaagtcttcagcacccaattatgcaagcattgcagtattttcctgtttctgtgctttatccccttgaatcatacagatgcaaattctggcagctggcttctttggctcgttattatgtctgtgagatttattcatgttgctgtgcgtagtatagtttgtgcatgttcattgctaaaaacttccattgtttggctgtatcgtagttcacagattcatttcactgtcagtcaagcttgtccaatgcatgcagcccaggatgcctttgaatgtggcccaacacaaatttgtaaactttcttaaaacattataaagatttttgtttgcgatttttttttttagctcatcagctatagttagtggtagtgtattttatgcgtgacccgagacagttcttccggtatggtccatggaagccaaaagattggacatgcctgctgtagatggacagttggtttgtttctagtttggggtaactacacacaatgctgctagcaacagttttgtccatgtctctgatgcacgtgtgttttttgcaaatggtgcacaaatttttctagggtttgtactcaggagtctgactcctgggttctagggtatgaagatctttctaaatattgttctagtttacgtgcccaccagcagtaaaacagaattcccttgccttcccatccttggcagacatttcacttttgccagtctggtggggtgtatagttatggccttaatttgcatttagctaattaccaaggagattgagcatatttttatgtttttattaaccattttgattttgtctcctgtgaagtgtctatcatcttttgcccattttttaacttgttgtctttttctttttcttttctttttttttttttt

SEQ ID NO: 519 - protein, 561 aa, Homo sapiens
MAAEEMHWPVPMKAIGAQNLLTMPGGVAKAGYLHKKGGTQLQLLKWPLRFVIIHKRCVYYFKSSTSASPQGAFSLSGYNRVMRAAEETTSNNVFPFKIIHISKKHRTWFFSASSEEERKSWMALLRREIGHFHEKKDLPLDTSDSSSDTDSFYGAVERPVDISLSPYPTDNEDYEHDDEDDSYLEPDSPEPGRLEDALMHPPAYPPPPVPTPRKPAFSDMPRAHSFTSKGPGPLLPPPPPKHGLPDVGLAAEDSKRDPLCPRRAEPCPRVPATPRRMSDPPLSTMPTAPGLRKPPCFRESASPSPEPWTPGHGACSTSSAAIMATATSRNCDKLKSFHLSPRGPPTSEPPPVPANKPKFLKIAEEDPPREAAMPGLFVPPVAPRPPALKLPVPEAMARPAVLPRPEKPQLPHLQRSPLDGQSFRSFSFEKPRQPSQADTGGDDSDEDYEKVPLPNSVFVNTTESCEVERLFKATSPRGEPQDGLYCIRNSSTKSGKVLVVWDETSNKVRNYRIFEKDSKFYLEGEVLFVSVGSMVEHYHTHVLPSHQSLLLRHPYGYTGPR

SEQ ID NO: 520 - DNA, 2635 bp, Homo sapiens
aggatgctcgggcggcggctgcagtgggacctccaccttctctgccaaccagagcggaggaacctttccgcctccctccaagcggcgcactgagcgctctttgcctagaacgacttccctcccgctgcctggggcagcctcaccctgggcgcccacaccccagccctgggagagcgctactccgcctcccgcaccaccgaaaacctcctcctcctttacgggccgcgcctcctttacgggccgcgccccctttatacgcggacgcgccctcttttggtcgccccctccccaacccagcactaaggagcaccctgctctggtctccgccaccacccagcgcctcctggacccatccccccaaacccttgaacgtcctcaggacccccaggctgcagcctcggagctcccggaacgatggtgaagttggggaacaatttcgcagagaagggcaccaagcagccgctgctggaggatggcttcgacaccattcccctgatgacgcccctcgatgtcaatcagctgcagttcccgcccccggataaggtggtcgtgaaaactaagaccgagtatgaacctgaccgcaagaaagggaaagcacgtcctccccaaattgctgagttcaccgtcagcatcacggagggtgtcaccgagaggtttaaggtctccgtgttggtcctcttcgccctggccttcctcacctgcgtcgtcttcctggttgtctacaaggtgtacaagtatgaccgcgcctgccccgatgggttcgtcctcaagaacacccagtgcatcccagaaggcttggagagctactacgcggagcaagactccagtgcccgggagaaattttacacagtcataaaccactacaacctggccaagcagagcatcacgcgctccgtatcgccctggatgtcagttctgtcagaagagaagctgtccgagcaggagactgaagcggctgagaagtcagcttagcgggatgggcaagttccttacaatgtgtcacttgcaaataacaaagggactttgagggacatttcattaaatataattactgatactttagaggttactcatttacggtgcaattgcttctgtttgctaatgctgctttgcaaataaaacttgctgccgaccacccacgggcataaaatcaagtgcatttcagcattgcctaaagagctctgacaccacttttcatgttaagatcttcatttagctcctttactgggatttattggatgctgtaaaaaaataaatttacactggatatgcgaagggtttggatctcagataaatgcattttgtggaattgattttctgaaccgaccctgctgtctgcaaaccttcctccatagccatatctagagtgatctctcgctgtgctaagagcaagcctacttcgcatttcttcctcggccatcagcgggtaacagtgctgactgctgccaaggtgcactgtagtaagtaagtggcatagagaacgaggaaaaagacccccccacccctccctgtgctgactcctgagtcggggtgggacggccctgcaatgtggcaggctcggtgtggattgactactccctcccctctgactctggcatcttggtaaggagggaggggcaccacccatctgggtggagacagctggggtttgctccagtgtgtgtagactggcagagcatgtgagggagagggctgggaagagacggccctgggcccgtgaggtgcagaactctccctgcaggtagtctgtctgctctgtgatgtgctgataggaaagagcccccactggccctctggttcacttctattatgaataaatttgcaccaatagccccattagtttttaaagaaatgagctgggtgggaaaagtggaaatgtaatttctggtaagcttgagctactttaatttttattctatgaaactgatatcccttgatgtgggaaacaggcaggaaaggctgtggggtgggggtgggggactggtgtggcaccgtgcaaacaaaatgacaaatttcaactcacaatctttgtaagaaaattgttccagtttgaatcttgatattaaagtttatgtttacaaaactgccagttagatgaactaagtgtgtaaaacaaatagaaaagacattcgcagacatttcttctatgttattgaatgtgttgtttctggtgtacgtgtcaaaagtttcagttttttagatcagaaataaacgacaaatagtgtgagatgtgttgtgaacaggcatggtgaccgtggtcagcgccactcttgtttcctgaaatgtgcttctaagacagaaaatgtattttctcatcaagggtgtctggagacacagaccgtgaccttggcgcagcggtgtgcatcagaggcgtgtgctgagaagggtggtgttaagctgtggaaaatgactcaagagcaataaatcagtgccaaagcttccctgcgcatctgaatagacacaagtgaagcccgtgtgcgcacagtgcagaggccgagcctgtatttccaggtagacgtggactttattgactgtgaattcatttacatgtaacttctgacatttcactctgtgcaaataaagaacatgaggataaaaaaaaaaaaaaaaaaaaaaaaaaaaaaaaaaaaaaaaa

SEQ ID NO: 521 - protein, 185 aa, Homo sapiens
MVKLGNNFAEKGTKQPLLEDGFDTIPLMTPLDVNQLQFPPPDKVVVKTKTEYEPDRKKGKARPPQIAEFTVSITEGVTERFKVSVLVLFALAFLTCVVFLVVYKVYKYDRACPDGFVLKNTQCIPEGLESYYAEQDSSAREKFYTVINHYNLAKQSITRSVSPWMSVLSEEKLSEQETEAAEKSA

SEQ ID NO: 522 - DNA, 3124 bp, Homo sapiens
aggatgctcgggcggcggctgcagtgggacctccaccttctctgccaaccagagcggaggaacctttccgcctccctccaagcggcgcactgagcgctctttgcctagaacgacttccctcccgctgcctggggcagcctcaccctgggcgcccacaccccagccctgggagagcgctactccgcctcccgcaccaccgaaaacctcctcctcctttacgggccgcgcctcctttacgggccgcgccccctttatacgcggacgcgccctcttttggtcgccccctccccaacccagcactaaggagcaccctgctctggtctccgccaccacccagcgcctcctggacccatccccccaaacccttgaacgtcctcaggacccccaggtgagcgcggcgcgctgcgggcggggaccctctctgcacctccccgcacccctgggggtcgctctgtccctacggtccccgcctcccctttctcctttctaagcgcctcgcgcccaggccgccgcccggggtggcgcagcccgcagccctcccgctccgggcgccctccgccgctccgagaccccctgggggcgcgtcctctcccgctcccctgttccctcccccggctcagggcgggcgcgtggtcccaggggaggctcccgcccagccccgcactcctttgtgcggccgggcgggcgctgcgtcaaggtggaggcgcggccacacgcgcgcacccacccgcgcgcacccagcccccgggagaggcaggaagggaggcggcggcgcgaggaggagggagcggccgtggagcccaatcgttcgctccccttcccgggtccgcgcgcggcgccgcctccgccattgctgcgagcaggagcaggagacgcggagctcggagcgctcagctgacctgccggagccgggcgtgggctgcagcctcggagctcccggaacgatggtgaagttggggaacaatttcgcagagaagggcaccaagcagccgctgctggaggatggcttcgacaccattcccctgatgacgcccctcgatgtcaatcagctgcagttcccgcccccggataaggtggtcgtgaaaactaagaccgagtatgaacctgaccgcaagaaagggaaagcacgtcctccccaaattgctgagttcaccgtcagcatcacggagggtgtcaccgagaggtttaaggtctccgtgttggtcctcttcgccctggccttcctcacctgcgtcgtcttcctggttgtctacaaggtgtacaagtatgaccgcgcctgccccgatgggttcgtcctcaagaacacccagtgcatcccagaaggcttggagagctactacgcggagcaagactccagtgcccgggagaaattttacacagtcataaaccactacaacctggccaagcagagcatcacgcgctccgtatcgccctggatgtcagttctgtcagaagagaagctgtccgagcaggagactgaagcggctgagaagtcagcttagcgggatgggcaagttccttacaatgtgtcacttgcaaataacaaagggactttgagggacatttcattaaatataattactgatactttagaggttactcatttacggtgcaattgcttctgtttgctaatgctgctttgcaaataaaacttgctgccgaccacccacgggcataaaatcaagtgcatttcagcattgcctaaagagctctgacaccacttttcatgttaagatcttcatttagctcctttactgggatttattggatgctgtaaaaaaataaatttacactggatatgcgaagggtttggatctcagataaatgcattttgtggaattgattttctgaaccgaccctgctgtctgcaaaccttcctccatagccatatctagagtgatctctcgctgtgctaagagcaagcctacttcgcatttcttcctcggccatcagcgggtaacagtgctgactgctgccaaggtgcactgtagtaagtaagtggcatagagaacgaggaaaaagacccccccacccctccctgtgctgactcctgagtcggggtgggacggccctgcaatgtggcaggctcggtgtggattgactactccctcccctctgactctggcatcttggtaaggagggaggggcaccacccatctgggtggagacagctggggtttgctccagtgtgtgtagactggcagagcatgtgagggagagggctgggaagagacggccctgggcccgtgaggtgcagaactctccctgcaggtagtctgtctgctctgtgatgtgctgataggaaagagcccccactggccctctggttcacttctattatgaataaatttgcaccaatagccccattagtttttaaagaaatgagctgggtgggaaaagtggaaatgtaatttctggtaagcttgagctactttaatttttattctatgaaactgatatcccttgatgtgggaaacaggcaggaaaggctgtggggtgggggtgggggactggtgtggcaccgtgcaaacaaaatgacaaatttcaactcacaatctttgtaagaaaattgttccagtttgaatcttgatattaaagtttatgtttacaaaactgccagttagatgaactaagtgtgtaaaacaaatagaaaagacattcgcagacatttcttctatgttattgaatgtgttgtttctggtgtacgtgtcaaaagtttcagttttttagatcagaaataaacgacaaatagtgtgagatgtgttgtgaacaggcatggtgaccgtggtcagcgccactcttgtttcctgaaatgtgcttctaagacagaaaatgtattttctcatcaagggtgtctggagacacagaccgtgaccttggcgcagcggtgtgcatcagaggcgtgtgctgagaagggtggtgttaagctgtggaaaatgactcaagagcaataaatcagtgccaaagcttccctgcgcatctgaatagacacaagtgaagcccgtgtgcgcacagtgcagaggccgagcctgtatttccaggtagacgtggactttattgactgtgaattcatttacatgtaacttctgacatttcactctgtgcaaataaagaacatgaggat

SEQ ID NO: 523 - protein, 185 aa, Homo sapiens; identical to SEQ ID NO: 521

SEQ ID NO: 524 - DNA, 2162 bp, Homo sapiens
agtccttcagcggccgggttcgcgccgcggtcgccggctgcttacgtgggcgggcctagtgtggggctgagggtgcgggtcgctatggcggtggacatcacgctgctattccgggccagcgtcaagaccgtgaagacgcggaacaaggcgctgggagtggcggtgggcggcggggtcgatggcagccgggacgagctgttccgccggagcccccggcccaagggcgacttctccagccgggcccgcgaagtgatttctcacattggcaaactgagagattttcttctggaacacaggaaagattatattaatgcttatagccataccatgtctgaatatgggaggatgacagacacagaacgagaccagatagaccaggatgcccagatattcatgaggacctgttcagaagcaattcagcaactacgaacagaagctcacaaggagatacattcccagcaagtgaaggagcacaggaccgctgttttggatttcattgaagattacttgaaaagagtatgtaaactttactcagaacagagagccatccgagttaaaagagtggtggataagaaaagattatctaagctggaaccagaaccaaatacaaagacaagagaatccacatcttctgagaaagtttcacagagtccttcaaaagactctgaagaaaaccctgccactgaagaacgtccagaaaaaattttggctgaaacacaacctgaattgggaacgtggggagatggcaaaggcgaagatgagttatccccagaagaaatacaaatgtttgaacaggaaaatcagcgactaattggtgaaatgaacagcttgtttgatgaagtgaggcaaatcgaagggagagtggttgagatttccagactccaagagatattcacggaaaaggttttgcaacaggaagctgagattgacagcattcaccagttagttgtgggggcaactgaaaatatcaaggaaggcaacgaagacataagagaggccattaaaaacaacgctggcttccgcgtgtggatcctcttcttcctcgtgatgtgctccttctccttgctcttcctcgactggtacgacagctagccagggccacgggggcccagcacgagagtcctcatgggcactcacagactgcgtgctttcatgtacttccagtgctggagcatggtatgaccagattttatcacagtgccatttgaagggaaaggagttcagacagacagacgtattccccaaaaagggataccccaggccgatggtgttcagccatttagcagctgaaaaaggaaacagtgcacaccaatgggaggcagcctgcgtagccctcatcaggcaagacagactgaatgcaggagtgggtgattagctgctccttgaacttgaggctgccttggcagcaggggcacagcaggcctcaagagcccctaattgtctcagggttcaaaggaagacactgacctttcccatcccggtagcttcagggaagatcatagttaataacgtctctcaacaaatgattacttctttgtttccttgtggcttcttgtctgtctgagtcaacgaatacacagacttactggattatagaagagaaaattcacatctgccttgttaatctaataaatataattacagccccttaatgtgttgtcaatgagtctaagttgacaaattcagtggcagcccagccacctcctatcaatcaatcagggaagaaatgcaggggagactggggccctcagtgaggggctgcctggcattactcctccaaagactgctgcccccagaacaggcagggggtgtgggagggccagtttcccgccactgggtccaaggagcctttgttcaaaggaagaagtgggccacggaagaacgggcctgcttctctcgtgcctgtgcttctgacctccaggaactgtaaacaggaacacctatgtgtaactgaaggcatgagacatctgtacaggaagcatcccagcgcccacatgggcatgagacagtctgcactgcgcctggtgaaatgcgtgtgtgtacagacagtccactgggcagcacaggtatcctcatgttctttatttgcacagagtgaaatgtcagaagttacatgtaaatgaattcacagtcaataaagtccacgtctacctggaaaaaaa

SEQ ID NO: 525 - protein, 335 aa, Homo sapiens
MAVDITLLFRASVKTVKTRNKALGVAVGGGVDGSRDELFRRSPRPKGDFSSRAREVISHIGKLRDFLLEHRKDYINAYSHTMSEYGRMTDTERDQIDQDAQIFMRTCSEAIQQLRTEAHKEIHSQQVKEHRTAVLDFIEDYLKRVCKLYSEQRAIRVKRVVDKKRLSKLEPEPNTKTRESTSSEKVSQSPSKDSEENPATEERPEKILAETQPELGTWGDGKGEDELSPEEIQMFEQENQRLIGEMNSLFDEVRQIEGRVVEISRLQEIFTEKVLQQEAEIDSIHQLVVGATENIKEGNEDIREAIKNNAGFRVWILFFLVMCSFSLLFLDWYDS

SEQ ID NO: 526 - DNA, 624 bp, Homo sapiens
atgttcagttggagcgccaagatcgtgaagcccaatggcaagaagccaggtgagttcgagtccggcatctcccaggctcttctggagctggaaaagaactcggacctcaaggctcagctcacagagctgaatattatggcagccaaggaaattgaagttggtggtggtcagaaagctatcacaatctttgttcccgttcctccactgaaatctttccagaaaatccaagtccggctagtatgcgaactggagaaaaagttcagtggaaagcatattatctttatcgctcagaggagaattctgcctaagccaattcgaaaaagccgcacaaaaaataagcaaaagcgtcccaggagtgcactctgacagctgtgcacgacgcaagccttgaggacttgatcttcccaagcgaaattgtgggcaagagaattcacgtgaactggatggcagccggctcataaaggttcgtttggacaaagcccagcagaacaacgtggaacacagactgaaactttttctggtgtctctaagaagctcacgggcaaggatgttaattttgaattcccagagtttcaattgtaaacaaaaatgactaaataaaatatattcacagtaaaaaaaaaa

SEQ ID NO: 527 - DNA, 5963 bp, Homo sapiens
gcggccgctcctgctgctgctgctgctgctgggcgcctgcggggcggcggggcgctcccctgagcccgggcgcctgggtcctcacgcccaactgacccgggtgccgcggagccctcccgcggggcgcgcggagcccggtggcggcgaggaccggcaggcgcgcggcacggagccaggcgccccgggtccgagtcccggtcccgctcctggtcccggcgaggacggcgcccccgccgcgggctaccggcgctgggagcgggcggcgccgctggccggagtggcttcgcgggcgcaggtctcgctcatcagcacgtcgttcgtgctcaagggggacgcgacgcacaaccaggcgatggtgcactggacgggcgagaacagcagcgtgatcttgatcctgacgaagtactaccacgcagacatggggaaggttctggaaagttctctgtggcggtcatcagatttcgggacgtcctacaccaagctcaccctccagcctggtgtcaccaccgtcatcgacaatttctacatctgcccgaccaacaagaggaaggtcatccttgtcagctcctcactcagtgaccgggaccagagcctattcctcagcgcagacgaaggcgccacctttcagaagcagcccattcccttcttcgtggaaactctgattttccaccctaaggaggaggacaaggtcctcgcctacacaaaggagagcaagctctacgtgtcatctgacttggggaaaaagtggacacttctgcaagagcgagtgaccaaagaccacgtgttctggtctgtgtctggggtggacgctgaccctgacttggtccacgtggaagcccaagacctcggtggagattttcggtacgtcacctgcgcaatccacaattgctccgagaagatgctgacagccccattcgcaggccccattgaccacgggtctctgaccgtgcaggacgattacatcttctttaaggcaacatcagcaaaccagacaaaatactacgtctcttatcgtcgaaatgaatttgtcctgatgaagctgccgaagtatgcattgccaaaggatctgcagatcatcagcacggacgagagtcaggtgttcgtggcggtgcaggagtggtaccagatggacacctacaacctgtaccagtcggacccacggggcgtgcgctacgcgctggtgctgcaggacgtgcgcagctcacggcaggcggaggagagcgtgctcatcgacatcctggaggtcagaggggtgaaaggagtcttcctggcaaaccaaaaaattgatgggaaagtgatgacgcttataacctacaacaagggccgcgactgggattacctgaggccacccagcatggacatgaatggaaaaccaaccaactgcaagcctccagactgccacctgcacctgcacctgcgctgggcagacaacccctacgtatcaggcaccgtgcacaccaaggacaccgccccaggcctcatcatgggtgcaggtaacctgggctcacagctggtggaatataaagaagaaatgtacatcacgtcagactgtggtcacacctggcggcaggtgtttgaggaagagcatcacatcctgtacctggaccacggcggcgtgatcgtggccatcaaagacacctccatccctttgaagatcctcaagttcagtgtggacgagggcctcacctggagcacgcacaacttcaccagcacctcggtgtttgtggacgggctgctgagtgagccaggggacgagacgctggtcatgacggtctttggccacatcagcttccgctccgattgggagctggtcaaggtggacttccggccctcattctccaggcagtgcggcgaggaggactacagctcctgggagctctccaacctgcagggcgaccgctgtatcatgggccagcagagaagtttccggaaaagaaagtccacgtcctggtgcatcaaggggaggagcttcacgtcggcgctcacgtcccgcgtgtgcgagtgccgggactcggacttcctgtgcgactacggatttgagcgctcctcctcctcagagtccagcaccaacaagtgctctgccaacttctggtttaacccattgtccccgcctgacgactgtgccctgggccagacctacaccagcagccttgggtaccggaaagtggtgtccaacgtgtgtgagggtggggtggacatgcagcagagtcaggtgcagctgcagtgccccctcacgccgccccggggcctgcaggtcagcattcaaggcgaggcggtggccgtgcggcctggagaggacgtcctgtttgtggtgcggcaggagcagggtgatgtcctgactaccaagtaccaggtagaccttggggacggcttcaaggccatgtacgtgaaccttacactgaccggggagcccatccggcaccgctacgagagccccggcatctaccgcgtgtccgtcagggcagagaacacggcaggccacgatgaggcggtgctctttgtccaggtcaactcccccctgcaggccctctacctggaggtggttcctgtcattggcctcaaccaggaggtgaacctcacagctgtgctgcttcccttgaaccctaacctcaccgtcttctactggtggatcggccacagcctgcagcccctcctttccctggataattctgtgacaacgcggttttcggacacgggcgacgtgcgtgtgacggtgcaggccgcctgtgggaactcggtgctgcaggactccagggtcctccgtgtgctggatcaatttcaagtcatgcctctgcagttttccaaggagctggatgcctacaaccccaacacccctgagtggagggaagacgtgggcctggtggtcacccggctgctctccaaggagaccagcgtccctcaggagcttctggtgactgtggtgaagccggggctgcccactttggccgatctgtacgtgctcctgccccctcccaggcccacaaggaagaggagcctctcgagtgataagaggctcgccgccatccagcaggtgctgaacgcacagaagatcagcttcctcctgcgaggcggagtccgggtcctggtggccctgcgggacacaggcacaggtgctgagcagctgggcggcggtggcggctactgggcggtagtggtgctgtttgtcatcgggctcttcgcagcgggagccttcatcctctacaagttcaaaaggaaacggccaggcaggaccgtgtacgcccaaatgcacaacgagaaggagcaggagatgaccagccctgtgagtcacagtgaggacgtccagggcgctgtccagggcaaccactcaggcgtggtcctgagcatcaactcccgagagatgcacagctacctggtgagctgatgccaccccagcatctgtcttttcacccacggagggcacagaaccaccagcaaagccggcggctggactggcgcccctcagagacctgcggaaagccccctccctgagtcgtcgccacaccaggcgacaggcaccaccccctctgataaatccaagcccgcccaggcccacggggggcccacgggaccccccgggactccccggacatggccctgcccctatgggacaccaggcctgactcaggcaggttctgccccccagaccccacacacggccgccccacgtgctgtcgctcagcccgaggcctgacttctctgggctgaggctggtcgtcctggagccctcccagtacctcgggctgcaagagctgcagacccgttcagacactgcgttgcgggctccttccccgcagaggccggggcctccctgactttgcttcttcactcccacctgtgcggccacccagtccctctgtgggagcccgggtgccaggccctcccaacaccacaccaccctccaggcccccctgccctccggctggaaactgcagctctgtaaatgcctctctaggtagctgctggcggtggtgggggtgtctcactctctgtctttatagccggcggtagccaccggggtggctctgtcagagttccgtactcgggagcccctttccctgagtgcccagggtgtctcctctgcccagaggggcagcagctctccctggttctccccagggcagacggggtagggcgggctcaggacccagtgcccatggttcctcactcctaccagcaagcagcaccatcccgcaggcttctcccacctgatggctgttctcccaccgggtctgggctctggaaggagccagatgcccccagaaaggtgggtggtggagacggcaccagatgtaccagttttctgcagttccttataggcgaagggaaccgggtggaaaccaagctgggagaggctgaggatggcagggctggaagggccatcagcgtgaccctcattttcaagaaggggaaactgaggcccagggaggagagtaactgaaggtcacagcacggtcacagcagaggtggccgaacccagccctctgcgcgccagtgctgtgcggtctccacacccttacggtttcctagaatcagggatgttagtgtaagtctataggaatataggggggtgggggggtcaccttttgccttgaaatgggaagtcagtagccccttcctcctcctccctcctccccctcctctctggcagggatctcagatgaccgtggcctccctctcagagggggagaacgccagagccctggctggtgatgtgctggctgggggtgaatcccaatgagggtccctctcagagcgggagaacgccagagccctggatggtgatgcgctggctgggggtgaatcccaatgagggtccctctcagaaagggagaacgccagagccctggctggtgacatgctggctgggggtgaatccgaatgacagtgcagacgttctcccatccaccatgtctgagcttgggggaattgcctcatttcccctggaaaagaaacatggtccattagaggggaaagcccaggggtgaatcttcacgccccaaacagtgcccggtggggaggaggcacccgctccttgttgagtaaaaccacccatggagactggaacctcatctccctgggtcggggggtgttcaaggccacaggacaaggggagcaccctgggccacacaggcgtggaggtgtccccaccccttccacctgtcccccagacccaaagctctctccccaccctacctgcccacctggggctcctgtgccccctccccactccagaggccaccctacaagttgtcctcaaggtcatcctggagatgggatccaggacgtggggccatgactctctgggaccttgccacagcccccattcccctgcttgcagtctgcaaggacacctttgcagggattcttgtcctgctggccaccccacccacacctgtccctggccagcaggccgcctgcaagcgtcaggcacacagggacagacatggcgagcacagtgcaggcccggggcccacgggcaacatggaaccctgggaactgccctcccccttagctcacagtgcctgcggtagccactctaggtcgttggccttccttgaccactccatttaattctctctgctgtttgggttgggtttttccccttagttatctgtgggtttcctgtattttatgttaatatttctattaagaacatgttgggcatgtggacccaagcacctgggaaggaggtggcatctgagacagcctgatacgttcccgtctgtgcacccatggagatccaggcgtgggcccgtgtctgtccctggttgtaaattcgagggtctgcatatctgatgttcaggtagacctgggcgcctgggaacgaggccatcagctgccatgcacataacaaagagacaatgcattccttcttatttttcctttttaaaaatcgatgaatcatttgtgatgcttttaacaaagattaaatgaatttgatcagcttttgccttaaaaaaaaa

SEQ ID NO: 528 - protein, 1009 aa, Homo sapiens
MVHWTGENSSVILILTKYYHADMGKVLESSLWRSSDFGTSYTKLTLQPGVTTVIDNFYICPTNKRKVILVSSSLSDRDQSLFLSADEGATFQKQPIPFFVETLIFHPKEEDKVLAYTKESKLYVSSDLGKKWTLLQERVTKDHVFWSVSGVDADPDLVHVEAQDLGGDFRYVTCAIHNCSEKMLTAPFAGPIDHGSLTVQDDYIFFKATSANQTKYYVSYRRNEFVLMKLPKYALPKDLQIISTDESQVFVAVQEWYQMDTYNLYQSDPRGVRYALVLQDVRSSRQAEESVLIDILEVRGVKGVFLANQKIDGKVMTLITYNKGRDWDYLRPPSMDMNGKPTNCKPPDCHLHLHLRWADNPYVSGTVHTKDTAPGLIMGAGNLGSQLVEYKEEMYITSDCGHTWRQVFEEEHHILYLDHGGVIVAIKDTSIPLKILKFSVDEGLTWSTHNFTSTSVFVDGLLSEPGDETLVMTVFGHISFRSDWELVKVDFRPSFSRQCGEEDYSSWELSNLQGDRCIMGQQRSFRKRKSTSWCIKGRSFTSALTSRVCECRDSDFLCDYGFERSSSSESSTNKCSANFWFNPLSPPDDCALGQTYTSSLGYRKVVSNVCEGGVDMQQSQVQLQCPLTPPRGLQVSIQGEAVAVRPGEDVLFVVRQEQGDVLTTKYQVDLGDGFKAMYVNLTLTGEPIRHRYESPGIYRVSVRAENTAGHDEAVLFVQVNSPLQALYLEVVPVIGLNQEVNLTAVLLPLNPNLTVFYWWIGHSLQPLLSLDNSVTTRFSDTGDVRVTVQAACGNSVLQDSRVLRVLDQFQVMPLQFSKELDAYNPNTPEWREDVGLVVTRLLSKETSVPQELLVTVVKPGLPTLADLYVLLPPPRPTRKRSLSSDKRLAAIQQVLNAQKISFLLRGGVRVLVALRDTGTGAEQLGGGGGYWAVVVLFVIGLFAAGAFILYKFKRKRPGRTVYAQMHNEKEQEMTSPVSHSEDVQGAVQGNHSGVVLSINSREMHSYLVS

SEQ ID NO: 529 - DNA, 2325 bp, Homo sapiens
agaagaaaaagaagaagaagccagaccaggaaagtgaaaggaaatggatatcgctgctggaggcaacgactaatttaagcagagtaggagaaaaactctttttttttttcctttgtgccagttccttttacacgacttcagaacattctatgacaacccagcgtgcaacttggcactgtcagaagagtcctgggaaagaaaggaaatgcgaaaatgagaaaaccaatattggactgtactggacaggacatatgtactatatcagattctccctggccacatgcatagagtctctgtcttttcccaccactttaaagacattgataaaatgccataccacagggcatgagatctggcatcccaagttgccaccagcaaacctagaagtgtgggttccaactctatgggtatatctcagtcatttagcatctgctctatctttgaggctgagtttccagaagacctgattcaaccagaagcaaaagacagtagccaagaagatggcatagcataagaatcttggaaattgataaaaacatcccagagatatccaacaaaattagtaactatgtgaagagattctgtaatattgggtctattgggctctgtgggaaggtattccctttggaaatgactgaaatggaaattttgaaccactttcaatgatacaagtttggggttaacatggagatggtgcttcacagaagacaccacatttcaataattgtattcttatcgaattgtttaaaattggtcagtgactaatattaagcctctaagaacaaaattcattaggtttatttagcctgtttttgcattactgctacaaaatccaatagtttaaatagctaactgaatacttttgatgttaaagagcaaaatttcatgaagattttagatcaagagagctaccactgagaaaaaacaatgcagatttgtggtaaagtcccatgaatttgttgaactgccaaggcttctgatcatcactgctgaagaacttctaatggtgacttccatctcagctttctcattgccaactattaagaatgtatggattatccagatgttgcaacacagttgtgtttttggcttcaccactccctctgggctgtgattctgttttttttttcttttattgttgatgttctttgtttttaatatgagaaagatttgtgtattatacttcagttttagtttccttaatcacagactagacaaaagaaaattggcttggtttcctattaggaaaccacttagaagccattatcagaatcgtagaccatcactgtgaactatatccaggtgttgtcatgaaagtatgacatcctagagtggaaaagcaacctgggtttccgagactgttttactcttttatctggaatgttgttttagctgctatggctccaacagggtgaacatagcattttatttaatctaaatatctttctgctttttttttctaagttgcaaaaagtcaatgaccacatttcatctctagcctctcgtgaggtttaaattacacaaggaagaaatatttacaatgtcaaatgctgaagattgtttggagtcagaagtgattgttcagaatctgtcttaatgacaagtcagaaattagacaaagagatgaaatgctaagcccccaatgtgttctgaaaagttaaataaccatcttacatcagttggtacgtttttgtaagagtccaggatgtaaaagtgataaataaattaatgaaaagcacttttaaaaatcaacaaaagacatggcaggaaatggaagaaaagagaagcaagggatgcattctaatagatattaagaacaagccaaagtgcagtatttgctctagggttttactgttcattgtgtcaagactcacagattttagatattttttttaattgggaaagtaaatgaggcaggtagataagtagaaaaagttgtgtgaaactcatcagtactgaaaataaatagttgtacttctctgtggttgtagttaaacttattcaaagctcagtgtcctagtggaagagtggaaatgaacctcacatagttgttcaactgtcctatgagtaggcaaaaatttccacacatcatgtttattgatcatgatttttcttttcttggactgttattttaagatcagtacacactttacctcatacctctacaagaaagtgtaggatctcatggtcctgtgtatgtgctctataaagtacatgatgaaggaaccttgtctgtcttttgctacacagcccaacatagaatagaacctgacacaatggagtcacaaaaagcatgtgtcaaatgaatgaataaagaatcagcac

SEQ ID NO: 530 - protein, 105 aa, Homo sapiens
MTTQRATWHCQKSPGKERKCENEKTNIGLYWTGHMYYIRFSLATCIESLSFPTTLKTLIKCHTTGHEIWHPKLPPANLEVWVPTLWVYLSHLASALSLRLSFQKT

SEQ ID NO: 531 - DNA, 855 bp, Homo sapiens
atgcctggatggttcaaaaaggcgtggtatgggctggcgtctttactcagcttctcctccttcatcctgatcatcgttgccctggtagtgccccactggctgagtgggaaaatcctttgtcagactggagtggatctggtcaacgccacagacagagagctggtcaagttcattggggacatttactacgggctcttccgagggtgtaaagtgcggcagtgtgggcttgggggccgccaatcccaattcacgagaacagaggcttgttggtcaactgacaagcatgaatctgggggccatgagttcatctcagaaagtctcccgctgtttgaaatccccacgcttgctgtcttgccctcacccctgtctgtcgaagccttcgtggtaagcaagcttggacttcatgaaatcttcccacacctggtgaaggagctcaacgcaggccttcatgtgatgattctgctgctcctcttcctggccttggccctggctctggtcagcatgggctttgccattcttaacatgatccaggtcccgtaccgggcagtcagcggtcctgggggcatctgcctatggaatgtcctggcaggcggcgtcgtggcgttagccatcgccagcttcgtggctgcggtgaaatttcacgacctgacggaacgaatcgccaactttcaggagaagctcttccagtttgtggtggtggaagaacagtatgaagagtcgttttggatctgcgtggccagcgcttcggcccatgctgcaaacttggtcgtggtggcgatcagtcaaattcccctccctgagattaagaccaaaatcgaagaggccacggtcacagctgaggatatcttgtattaa

SEQ ID NO: 532 - protein, 284 aa, Homo sapiens [sequence omitted]

SEQ ID NO: 533 - DNA, 638 bp, Homo sapiens
atgcctggtgaagccacagaaaccattcttgctacagagcaggagttgccacagccccaggtggagaccgggtctggaacagaagctgacagtgataaatcagtaccagagctcgaggaacaggattccacagagataccacacaagcagcccagctggcagcagcagctgaaatcaatgagtgtcaatcagtaaagcaaaacagagttagagtgaaaagaaggcacgtaaggctatgtccaaactcggtcttccgtagataacaggggttactacagtcactactggaaatctaagaatatcttctttgtcatcacaaaaccagatgtctacaagaatcctgcttcggatacctatgtgtgtgtttttggggaagccaagatcaaggatttatcttaacaagcatgggtagcacctgctaagacacagagtgagctgtctcaaacattcaagaaaacacacagactccaactatacaagacgagactggagaggaaaaggttgatgatacaggtgtggaagttaaggacgtagaattggtcatgtcacaagcaaatgtattgagagcaaaggaagtccgagccttgaagaacaagagtaatcatattgtaactgctattacagaattaacaatgtga

SEQ ID NO: 534 - DNA, 2100 bp, Homo sapiens
ctgcccatccgtcccgccccctagacgcacgtccgctcgcccggcgcccgagccagtccgcgcgcacgccgtctgcgccccgaaagccccgccccaaggcgcgcccgcccaccgctctccacgtgctcgctggagggcggtgcgaggggccgagccgacaagatgttcttgctgcctcttccggctgcggggcgagtagtcgtccgacgtctggccgtgagacgtttcgggagccggagtctctccaccgcagacatgacgaagggccttgttttaggaatctattccaaagaaaaagaagatgatgtgccacagttcacaagtgcaggagagaattttgataaattgttagctggaaagctgagagagactttgaacatatctggaccacctctgaaggcagggaagactcgaaccttttatggtctgcatcaggacttccccagcgtggtgctagttggcctcggcaaaaaggcagctggaatcgacgaacaggaaaactggcatgaaggcaaagaaaacatcagagctgctgttgcagcggggtgcaggcagattcaagacctggagctctcgtctgtggaggtggatccctgtggagacgctcaggctgctgcggagggagcggtgcttggtctctatgaatacgatgacctaaagcaaaaaaagaagatggctgtgtcggcaaagctctatggaagtggggatcaggaggcctggcagaaaggagtcctgtttgcttctgggcagaacttggcacgccaattgatggagacgccagccaatgagatgacgccaaccagatttgctgaaattattgagaagaatctcaaaagtgctagtagtaaaaccgaggtccatatcagacccaagtcttggattgaggaacaggcaatgggatcattcctcagtgtggccaaaggatctgacgagcccccagtcttcttggaaattcactacaaaggcagccccaatgcaaacgaaccacccctggtgtttgttgggaaaggaattacctttgacagtggtggtatctccatcaaggcttctgcaaatatggacctcatgagggctgacatgggaggagctgcaactatatgctcagccatcgtgtctgctgcaaagcttaatttgcccattaatattataggtctggcccctctttgtgaaaatatgcccagcggcaaggccaacaagccgggggatgttgttagagccaaaaacgggaagaccatccaggttgataacactgatgctgaggggaggctcatactggctgatgcgctctgttacgcacacacgtttaacccgaaggtcatcctcaatgccgccaccttaacaggtgccatggatgtagctttgggatcaggtgccactggggtctttaccaattcatcctggctctggaacaaactcttcgaggccagcattgaaacaggggaccgtgtctggaggatgcctctcttcgaacattatacaagacaggttgtagattgccagcttgctgatgttaacaacattggaaaatacagatctgcaggagcatgtacagctgcagcattcctgaaagaattcgtaactcatcctaagtgggcacatttagacatagcaggcgtgatgaccaacaaagatgaagttccctatctacggaaaggcatgactgggaggcccacaaggactctcattgagttcttacttcgtttcagtcaagacaatgcttagttcagatactcaaaaatgtcttcactctgtcttaaattggacagttgaacttaaaaggtttttgaataaatggatgaaaatcttttaacggagacaaaggatggtatttaaaaatgtagaacacaatgaaatttgtatgccttgatttttttttcatttcacacaaagatttataaaggtaaagttaatatcttacttgataaggatttttaagatactctataaatgattaaaatttttagaacttcctaatcacttttcagagtatatgtttttcattgagaagcaaaattgtaactcagatttgtgatgctaggaacatgagcaaactgaaaattactatgcacttgtcagaaacaataaatgcaacttgttgtg

SEQ ID NO: 535 - protein, 519 aa, Homo sapiens
MFLLPLPAAGRVVVRRLAVRRFGSRSLSTADMTKGLVLGIYSKEKEDDVPQFTSAGENFDKLLAGKLRETLNISGPPLKAGKTRTFYGLHQDFPSVVLVGLGKKAAGIDEQENWHEGKENIRAAVAAGCRQIQDLELSSVEVDPCGDAQAAAEGAVLGLYEYDDLKQKKKMAVSAKLYGSGDQEAWQKGVLFASGQNLARQLMETPANEMTPTRFAEIIEKNLKSASSKTEVHIRPKSWIEEQAMGSFLSVAKGSDEPPVFLEIHYKGSPNANEPPLVFVGKGITFDSGGISIKASANMDLMRADMGGAATICSAIVSAAKLNLPINIIGLAPLCENMPSGKANKPGDVVRAKNGKTIQVDNTDAEGRLILADALCYAHTFNPKVILNAATLTGAMDVALGSGATGVFTNSSWLWNKLFEASIETGDRVWRMPLFEHYTRQVVDCQLADVNNIGKYRSAGACTAAAFLKEFVTHPKWAHLDIAGVMTNKDEVPYLRKGMTGRPTRTLIEFLLRFSQDNA

SEQ ID NO: 536 - DNA, 1363 bp, Homo sapiens
ggcacagcaaacatggcggctccactagggggtatgttttctgggcagccacccggtccccctcaggccccgccgggccttccgggccaagcttcgcttcttcaggcagctccaggcgctcctagaccttccagcagtactttggtggacgagttggagtcatctttcgaggcttgctttgcatctctggtgagtcaggactatgtcaatggcaccgatcaggaagaaattcgaaccggtgttgatcagtgtatccagaagtttctggatattgcaagacagacagaatgttttttcttacaaaaaagattgcagttatctgtccagaaaccagagcaagttatcaaagaggatgtgtcagaactaaggaatgaattacagcggaaagatgcactagtccagaagcacttgacaaagctgaggcattggcagcaggtgctggaggacatcaacgtgcagcacaaaaagcccgccgacatccctcagggctccttggcctacctggagcaggcatctgccaacatccctgcacctctgaagccaacgtgagcaaagggcagaggcagttggcctatgagtgggctgatgcgtgaggttggccacacattccttcctgtggacttgacattttggaagaactctttgccagataatgagttcattttagttttatgctcccattgaaaaattttccactatttttataagctgttaatttcttgagtactttataacatgtctgtagcttggataaaccaagtaagtattttttttttgtctttagcaaagtttagactgtgaatatgatgacacagattcttttttatggtggctttgcttgttttaaatttttgcatgacttttcatctttttatgtgtgtttcctgtagtttgatccgaaggaaaagagtatagtagcctgagaatcaggagatgggagttttagtcgtaggccttatgataattaccccgcggtggtgtgtagaaaagtatgtaaatttgctctgttttaagactttgaactacctcaagaagaggaatctaatacaatatttgtaatgtttccagagctctcagaatgaggatttttttgtaaataggtcagaagacgatggaactgtcctgggttagtatagtaatcttacagtaggatccttaggttgatgctgacttctgtttggggtatgtttatattttatgtggtgtttactttttttttttgacataaaaggatatagtgggagcagtgatacgctaacattcattacattctgcagtaatgaatctgaaaaaaaaaaaaaaaaaaaaaaaaaaaaaaaaaaaaaaaaaaaaaaaaaaaaaaaaaaaaaaaaaaaaaaaaaaa

SEQ ID NO: 537 - protein, 178 aa, Homo sapiens
MAAPLGGMFSGQPPGPPQAPPGLPGQASLLQAAPGAPRPSSSTLVDELESSFEACFASLVSQDYVNGTDQEEIRTGVDQCIQKFLDIARQTECFFLQKRLQLSVQKPEQVIKEDVSELRNELQRKDALVQKHLTKLRHWQQVLEDINVQHKKPADIPQGSLAYLEQASANIPAPLKPT

SEQ ID NO: 538 - DNA, 4236 bp, Homo sapiens
atgtcctggctcctctccaagatccaaaaaggaaggctaccatccccagccccgctgtgcactcgcgcaactcaggcgctggcccacaccgtgcgccccggatcccacacctccttgagtcccgatggctcgccctcacctacccgcccctctcttagcatctcgtcccccaccgccatctccgctatcagctcggagactcgggagccgccagtcactgtgccctgtccctctccggaggccgccagtcactgtgccctgtccctctccggaggctcttcttcctctttagcctgggatccccacctcgggcaggcggcacgtgcggggcgccgacgcctcgccgcagggtgcgggtgcccgcggagccagccagccagagaaccagcaggagaggaaaaagggtgggcgcgcgggtgggcccgggaggcggagaccttcgggaagctggggccacgcggcggtgcaggcgacgggactgcagtgccacctctcccgagaaacccacacgctcgcacgcccgcgcgcgcacgcacgtgcacacggtgggcagggagaaaacgagagagtctgagtgctgggcgcgttttagcgatggcttctgctctcaacagcaaaattaacccgcccggcacttgccagggctccaaagccgacggtggcgccggctggagaatggactgtgatccccagatgcacgtgaaaatgtgcaagaagatcgcccagctcaccaaggtgatttatgccctgaacacccgccaggatgaggctgaggccagcatggaggcgctgcgggaagcgcaccaggaggagctccagaatgcggtggcagagaccaaggccaggctcctgcaggaacagggctgcgcagaggaggaagcccttctacagcgcatccaggccctggagagcgccctggagctgcaaaagaggctgacggaggaggcgctggctgagtcggcctcgtgcaggctggagacgaaggagagagagctgagggtggaggcagagcacgccgagcgagtcctcacgctctccagggaaatgctggagctcaaggctgactacgagaggaggctccagcacctgacgagccacgaggctaccccgcagggccggctgccccaggagagccctgaaaccaagtcggagccaggccagggcccggagatgcaggaggtcctgctagaggtgcagcggctgcgagtggagaaccagcagctgagcaaggactacgcccgcaaggccgaggagctgcaggccacctacgagagggaaaacgaggccatccggcaggccatgcagcagtcggtgagccaggccctgtggcagtggcaggagaaggagtcggacctccgcaagaacttccaggtccaggagtcagccctgcaggctcaggtccggaagctggaaggagacctggagcacagaggccgcaagataagtgacctgaagaagtacgcccagaagctgaaggagaggattcaggacctggatgtgcagcttaaggaggctcgacaggagaattcagagttgaaaggcactgcaaaaaaacttggggagaagctggctgttgccaaagacagaatgatgctgcaggagtgtcgtgggacacagcagacagatgccatgaagactgagttagtttcagagaacaaagtcctgcgggaagagaatgacttggaagccggcaatcttcatcctcagcaggatcaaagctgtctcaaggagtgcccttgcatgaaaggaggcacagatatgcagaccaagaaagaggcaagtgctgagacagaatatatgaagcaacaatatgaagaagaccttcgtaaaatcaaacatcagacagaagaggagaagaaacatctcaaagaccagctagtgaagcgactagaagacttggtaaagaagcacaccgtggaaatcaaatccgttcgctcgtccgtggaggctgaaagaaagaaactgcagagggaagtagaagcacagttggaggaagtgaggaagaaatcagaaaaggagataaagcagctggaagaagagaaagcagccctcaatgtgaagcttcagaattctctgcttgaggttttaaggctggaagaatttatccaacaaaataagacacgccccacaggagctgaggaaagtccccaggaattaggccgccagcactgcagcattctggagacccaggatccatgcttgaagctggatgaaacttcgccgagaggagaggagtatcaagataagttagcagctgaagaaggaaccagcagtgatgaagaagaaaggaccaaagtgcttctcaaggagggaagtgacccacaacctccactgggctctttgttgaaggagaaaacatccaaaatccagcgtctagaggaggactggcaaagccagaaggccaaattgcaagcccaggtctcacagatgcagcaggctctggagcagtgcaccagcaactacagggaggacctgcaggcactcaagcagctctcggacctggagagggagaagctgcagcgtgagctccaggagaccactcagcagaaccacgccatgaaagcccagctcgaggcttcccaccagagagccctgcgcatgctggagaaggccagacatcaggaactcaaggccacagaggaacgcttgaagaaggaatccagccacagcctccagatccaacaccagacacaccgactggagctccaggccttggaggaaaaggccaggcaagagctgcaggaggagcgtgagaggatgcaggcacagcaggccctgctgctagagtcgctcagacaggagctgtcggagcagcaagctgcctgttctgggcaccagaaggacttggaggcactgcaggccgagctgagggctctgggcagacagcaagccagcagccagtgtccaggagacagcaaggatcacataatcgccacagaggagcggggcggcccgggccaggccggctccccaccgggcgctgctgggcagggttccggcgagggatgcgggctctgggaggagaacgcgcagctccaggacgcggtgcggcggctgcgcgcggaggtggagcagcatcagcaggaggcgcagaagctccgagaccagcgcaggttcctggaggagactcagcaagcccagcgggccagggaggtggagacactgcgccaggaacaccggaaggagatgcaggccatggtggcagatttcagtagtgcccaggcccagctccaggcccggctggctgccctggaagccgaactgaaagattccggagagaagccagggaagggagcgtccaggcccgaggaccttcagctcattggccgcctgcagacccgcctgaaggagagagaggacatcatcaagcagctcacggaagagagaagatttcactacgcagcattccccagtgccatgtcccaccggaatcggtctttctctttcaatcctcacccgggatatttgaccccttccatgaagaaaaagaaggtggaggacgtgcccagccgcgtggtcagcgtgccgaacctcgcctcctatgcaaagaactttctgagtggcgatctgagttccaggattaatgcccctccaataactacatcacccagcttggacccaagccccagctgtggccggacctacaaacccaaccagtctacagatgcaaaaactgccacaaggaccccagatggtgaaacggcccaagccaaagaagtccagcagaaacagggctctccgcaccaggaatggttcaccaagtacttttctttctaagctaacctttgggatacatcacagaggatacttgaaaaacatttattttaaatcatccgattgaaggaatgaactaacaccaaccaaccaaataatatgcttatgatttatatatgatagctaaaacaaattttggcgttaacacttcatactgttctgccaggcacagcagctcacgcctgtaatcccatcactttgggaggctgaggcagatggactgcttgagtccaggaatttgagaccagcctggccaatatggtgaaaccccatctctacaaaatatacaaaaattagccaggcatggtggcgtgtgcctgtggtcccaggtacttgggggactgaggcgggaggatcacttgaacctaggaggcagaggttgcagtgagccaagttcgaactcctgcattccaaccagcctgggtgacagagggagaccctgtctccaaaaaaaaaaaaaaa

SEQ ID NO: 539 - protein, 1258 aa, Homo sapiens
MSWLLSKIQKGRLPSPAPLCTRATQALAHTVRPGSHTSLSPDGSPSPTRPSLSISSPTAISAISSETREPPVTVPCPSPEAASHCALSLSGGSSSSLAWDPHLGQAARAGRRRLAAGCGCPRSQPAREPAGEEKGWARGWAREAETFGKLGPRGGAGDGTAVPPLPRNPHARTPARARTCTRWAGRKRESLSAGRVLAMASALNSKINPPGTCQGSKADGGAGWRMDCDPQMHVKMCKKIAQLTKVIYALNTRQDEAEASMEALREAHQEELQNAVAETKARLLQEQGCAEEEALLQRIQALESALELQKRLTEEALAESASCRLETKERELRVEAEHAERVLTLSREMLELKADYERRLQHLTSHEATPQGRLPQESPETKSEPGQGPEMQEVLLEVQRLRVENQQLSKDYARKAEELQATYERENEAIRQAMQQSVSQALWQWQEKESDLRKNFQVQESALQAQVRKLEGDLEHRGRKISDLKKYAQKLKERIQDLDVQLKEARQENSELKGTAKKLGEKLAVAKDRMMLQECRGTQQTDAMKTELVSENKVLREENDLEAGNLHPQQDQSCLKECPCMKGGTDMQTKKEASAETEYMKQQYEEDLRKIKHQTEEEKKHLKDQLVKRLEDLVKKHTVEIKSVRSSVEAERKKLQREVEAQLEEVRKKSEKEIKQLEEEKAALNVKLQNSLLEVLRLEEFIQQNKTRPTGAEESPQELGRQHCSILETQDPCLKLDETSPRGEEYQDKLAAEEGTSSDEEERTKVLLKEGSDPQPPLGSLLKEKTSKIQRLEEDWQSQKAKLQAQVSQMQQALEQCTSNYREDLQALKQLSDLEREKLQRELQETTQQNHAMKAQLEASHQRALRMLEKARHQELKATEERLKKESSHSLQIQHQTHRLELQALEEKARQELQEERERMQAQQALLLESLRQELSEQQAACSGHQKDLEALQAELRALGRQQASSQCPGDSKDHIIATEERGGPGQAGSPPGAAGQGSGEGCGLWEENAQLQDAVRRLRAEVEQHQQEAQKLRDQRRFLEETQQAQRAREVETLRQEHRKEMQAMVADFSSAQAQLQARLAALEAELKDSGEKPGKGASRPEDLQLIGRLQTRLKEREDIIKQLTEERRFHYAAFPSAMSHRNRSFSFNPHPGYLTPSMKKKKVEDVPSRVVSVPNLASYAKNFLSGDLSSRINAPPITTSPSLDPSPSCGRTYKPNQSTDAKTATRTPDGETAQAKEVQQKQGSPHQEWFTKYFSF

SEQ ID NO: 540 - DNA, 1679 bp, Homo sapiens
atggaggccgccgtccaattcttggtccagagccaggacgtggtctttggcctcgaggccatcgaggctcagtacaagtaccagacaacgcgcgtcagaagcaagggcggcgtcctcgaggtgcacctcaagtccacgcacttcaccttccggaccgcccggcccgcatgtgcccaggctacgggtcatgcttgtcgcctgcggtggtaacaacggatccacgctcaccgccgcggtgctggccaacctactgcgtctgtcctggcccacgcgcaggggtcgcaagggggccaactactacggttcactgtctcaggtgggcaccgtgagcccggtcttggacgccaagggccaggaggtgttcgcgcccttccgcggctgctgcccatggtggcgcccaacgacctcgtgttcgatggctgggacatcttgtcgccgaacctggccgaggcgatgcggctcgcgaaggtgctgattgagggctgcaggagcaactgtggccgcacatggaggccctgcagccccggcctttggtatacatcccacagttcatcgcggccaaccagaacgcgcgcgcggacagcctcatcccgggcacgcgcgcgcagcagctagagcagatccgccgggacatccgatgacttccggtctagcgcagggctggacaaagtcatagcgctgtgaacggcgaacatggagcgcttctgtgaggtggtcccaggtctcaacaacacggccgagaccctgctgcgcaccatcgagcttggtctgaaggtgtcgccctccacgctcttcgccgtggccagcatcctggagggctgtgccttcctctgggtccccacagaacactctggtgcccggagcccttgggctcgcgtggcagcgccaggtttacgtgggcagagatgacttcaagtcaggccagaccaaagtcaagtccgtgctcgtggacttcctcatcggctatggcctcaagaccaagtcgattgtgaattataaccacctggggaacaacgaccggcagaacctgttggcgccatcgctgttccctctgaggcggtgtccaagagcaacgtagtggacgacatggcgcaaagacacccagtgctctacgcgcctggcgaggagcctgaccgctgcgtggtcatcaagtacatgccgtacgcgggtgaccccaagcgtgcgctggatgagtctaccttggagctgatgctgggcgtaaccaacacgctggtactgcacaacacgtgcgaggactcgctgctggccgcccccatcatcctggacctggcgctggtgaccgagctgtgccactgcgtgagcttctgcaccaatgacaacaccgagccacagaccttccaccccatgccgtccctgcttagcatctcttcaaggcgccgctggtgccgccgggcagcccggtggtcagtgcgcttttccgccagctcagctgcatcgagaacatccacagggcctgtgtggggcttccgccacagaaccacgtggtcctggtgcacaagatggagctcccagtgcctggcctcaggtgagtcggacccgtggctgccgcctgccctgtgtcgaacaagaaaggaccggtacccgctgccaccaatggctgtaccagtgataccaatggacacccacaagtggaggaaccccagatgcacaccacctga

SEQ ID NO: 541 - DNA, 4646 bp, Homo sapiens
gaatgcaggtgagaaaaggcacggactctgcggctgcgaacccaaacttgggcaccgcacggtgcgcactgctcagccttcgcccccgtgggcgaaaggctgctgcggtttcaggcggctgcttcgtgactaatgaccttgcgcagagttgttaagaaaaaagagaaacccgcgctctccggggtgagaagggactgactctgggcgtctctgaagatggctcgggcttctctttggcgcgccggggggaccctgacactgaccgctctgtgacgcgagtagtctcccctgcaccgtgcccgaagcgacgtgccgggggatttttcattctcgatctgttgactggctcccccgctgcatgagcagagtcggagttgagactggcttgttgctggccccagcgcctggtgcaggaagcgactcacgtttgtctgggtggccggagccggagcagagcctgggtttggagtgagtgcctggaacgtgaattggactcaactcgagtagcagcaaagaccagcgggctggcaggcgggggaggctgcaggctcattccccacctcttcccagccccactgcccgtctgccggagcggttctggccccttccgacagagcggggactagagccggggattctccgcccgctgaggggatgactctgggttgggggagcgccgaacccgcggcgcgcagtgtcccgtgaactgtgagtactgcgactgaacggcggcaggcgagcgggcgattagcacccattgcatgaattatgaaacaataactttcggaagaagcaggaggaaaaaaagaagcatctatcgctgccctcccacccccattcccggccaactctccacgccgcttttgccccctccctcccctccctctcgctccttcctttccgggagaggggagaggactcgggggagggcaggcggccggccccggaggaggggggcgccgagggggctgtggttagaaggagcagtagcagcagcagcaggagaagatgctgaggatgcggaccgcgggatgggcgcgcggctggtgcttgggctgctgcctcctcctgccgctctcgctcagcctggcggccgccaagcagctcctccggtaccggctggccgaggagggccccgccgacgtccgcatcggcaacgtggcttcagacctgggcatcgtgaccggatcgggtgaggtgactttcagcctggagtccggttccgagtacctgaagatcgacaacctcactggcgagctgagcacgagcgagcggcgcatcgaccgcgagaagctgccccagtgtcagatgatcttcgacgagaacgagtgcttcctggacttcgaggtgtcggtgatcgggccctcgcagagctgggtggacctgtttgagggtcaggtcatcgtgcttgacatcaacgacaacacgcccaccttcccgtcgcccgtgctcacgctcacggtggaggagaatcggccggtgggcacactttacctgctgcccacagccaccgaccgcgacttcggccgcaacggcatcgagcgctacgagctgctccaggagcccggaggcggcggcagcggcggcgagagccggcgcgccggggcggccgacagcgccccctaccccgggggcggcgggaacggcgcgagcggcggcggctcgggaggctccaagcggcggctggacgcatcagagggcggcggcggcaccaaccccggcggccgcagcagcgtgttcgagctgcaggtggcggacaccccggacggcgagaagcagccgcagctgatcgtgaagggggcgctggaccgcgagcagcgcgactcctacgagctgaccctgcgagtgcgcgacggcggcgacccgcctcgctcctcgcaggccatcctacgggtcctcatcaccgacgtgaacgacaacagcccccgcttcgagaagagcgtgtacgaggccgacttggctgagaacagcgccccggggacccccatcctgcaactgcgcgcagccgacttggacgtgggggtcaacgggcagatcgaatacgtgttcggggcggccaccgagtcggtgaggcggctgctgcgccttgacgagacgtccggctggctcagcgtcctgcaccggatcgaccgcgaggaggtgaaccagctgcgcttcacggtcatggcccgcgaccgcgggcagccccccaagaccgacaaggccaccgtggtccttaacatcaaagacgagaacgacaacgtgccgtccattgaaatccgcaagattgggcgcatccccctcaaggacggggtggccaacgtggccgaggacgttctggtcgacacccccatcgctctggtgcaggtgtccgaccgagaccaaggcgagaacggggtggtcacctgcaccgtggtgggcgacgtgcccttccagctcaagccagccagcgacaccgagggcgaccagaacaagaaaaagtacttcttgcacacctcgacccctctggactatgaggccacccgggagttcaacgtggtcatcgtggcggtggactcaggcagccccagcctctcgagcaacaactccctgattgtcaaggtgggagacaccaacgacaacccgcccatgttcggccagtcggtggtggaggtttacttccctgagaacaacatcccgggcgagagggtggccacggtgctggcgacagacgcagacagcggtaagaacgccgagatcgcctactcgctggactcctctgtgatggggatctttgccatcgatcccgattctggggacatcctggtcaataccgtgctggaccgcgagcagactgacaggtatgagtttaaagttaacgccaaagacaaaggcatccccgtgctgcagggcagcactacggtgattgtgcaggtggctgataaaaatgacaatgaccctaagtttatgcaggacgtcttcaccttttatgtgaaagaaaacttgcagcccaacagccctgtggggatggtcaccgtgatggatgctgacaaggggcggaatgcagagatgagcctgtacatagaggagaacaataacattttttctattgaaaatgacacggggaccatttactccacaatgtcttttgaccgggaacatcagaccacatacactttcagagtcaaggctgtggatgggggagatcctcccagatctgccacagctacagtctcgctttttgtgatggatgaaaatgacaatgctcccacagttacccttcccaaaaacatttcctacactttactgccaccttcgagtaatgtcaggacagtagtagctacagtgttggcaacagacagtgatgatggcatcaatgcagacctgaactacagcattgtgggaggaaatcccttcaagctgtttgaaattgatcccactagtggtgtggtttccttagtgggaaaactcacccaaaagcattatggcttgcacaggttggtggtgcaagtgaatgacagtgggcagccttcccagtccaccacgactctggtgcacgtgtttgtcaatgaaagtgtttctaatgcaactgcgattgactcccagatagctagaagtttgcacatcccactcacccaggatatagctggtgacccaagctatgaaattagcaaacagagactcagtattgtcattggcgtggttgctggcattatgacggtgattctaatcatcttaattgtagtgatggcaaggtactgcaggtccaaaaataaaaatggctatgaagccggcaaaaaagatcacgaagacttttttacaccccaacagcatgacaaatctaaaaagcctaaaaaggacaagaaaaacaaaaaatctaagcagcctctctacagcagcattgtcactgtggaggcttctaagccaaatggacagaggtatgatagtgtcaatgagaagctgtcagacagcccaagcatggggcgatacaggtccgttaatggtgggcccggcagtcctgacctggcaaggcattacaaatctagttccccattgcctactgttcagcttcatccccagtcaccaactgcaggaaaaaaacaccaggccgtacaagatctaccaccagccaacacatttgtgggagcaggagacaacatttcaattggatcagatcactgctctgagtacagctgtcaaaccaataacaagtacagcaaacagatgcgtctacatccatacattactgtgtttggctgaattccactctaatatgatgctccattatgcaccatactgtgatgacctttctactccgaaacctgctggagcctgcccttggccgtggggtgtcagccaatcactgcttgttccacttgttgtacattttatttttgagtctttttctttctcatatacagaaaaatagtatgaaaataaaataaatgtatgaaacagtattaatgcagaaatgtgctactaatggatgtctgagtcaccagaaattccattcttaaagaggcggttagcacctattagacgtaacagtgatgtcttttaaaaaatccaaaagcatattgcaacaataagtttgagactttgtgtgaacaaagggaaattcagcctcttatgtctttgtctttaatacattaaatactgattttgaataaaaatctaaattgatcaat

SEQ ID NO: 542 - protein, 1069 aa, Homo sapiens
MLRMRTAGWARGWCLGCCLLLPLSLSLAAAKQLLRYRLAEEGPADVRIGNVASDLGIVTGSGEVTFSLESGSEYLKIDNLTGELSTSERRIDREKLPQCQMIFDENECFLDFEVSVIGPSQSWVDLFEGQVIVLDINDNTPTFPSPVLTLTVEENRPVGTLYLLPTATDRDFGRNGIERYELLQEPGGGGSGGESRRAGAADSAPYPGGGGNGASGGGSGGSKRRLDASEGGGGTNPGGRSSVFELQVADTPDGEKQPQLIVKGALDREQRDSYELTLRVRDGGDPPRSSQAILRVLITDVNDNSPRFEKSVYEADLAENSAPGTPILQLRAADLDVGVNGQIEYVFGAATESVRRLLRLDETSGWLSVLHRIDREEVNQLRFTVMARDRGQPPKTDKATVVLNIKDENDNVPSIEIRKIGRIPLKDGVANVAEDVLVDTPIALVQVSDRDQGENGVVTCTVVGDVPFQLKPASDTEGDQNKKKYFLHTSTPLDYEATREFNVVIVAVDSGSPSLSSNNSLIVKVGDTNDNPPMFGQSVVEVYFPENNIPGERVATVLATDADSGKNAEIAYSLDSSVMGIFAIDPDSGDILVNTVLDREQTDRYEFKVNAKDKGIPVLQGSTTVIVQVADKNDNDPKFMQDVFTFYVKENLQPNSPVGMVTVMDADKGRNAEMSLYIEENNNIFSIENDTGTIYSTMSFDREHQTTYTFRVKAVDGGDPPRSATATVSLFVMDENDNAPTVTLPKNISYTLLPPSSNVRTVVATVLATDSDDGINADLNYSIVGGNPFKLFEIDPTSGVVSLVGKLTQKHYGLHRLVVQVNDSGQPSQSTTTLVHVFVNESVSNATAIDSQIARSLHIPLTQDIAGDPSYEISKQRLSIVIGVVAGIMTVILIILIVVMARYCRSKNKNGYEAGKKDHEDFFTPQQHDKSKKPKKDKKNKKSKQPLYSSIVTVEASKPNGQRYDSVNEKLSDSPSMGRYRSVNGGPGSPDLARHYKSSSPLPTVQLHPQSPTAGKKHQAVQDLPPANTFVGAGDNISIGSDHCSEYSCQTNNKYSKQMRLHPYITVFG

SEQ ID NO: 543 - DNA, 4921 bp, Homo sapiens
gaatgcaggtgagaaaaggcacggactctgcggctgcgaacccaaacttgggcaccgcacggtgcgcactgctcagccttcgcccccgtgggcgaaaggctgctgcggtttcaggcggctgcttcgtgactaatgaccttgcgcagagttgttaagaaaaaagagaaacccgcgctctccggggtgagaagggactgactctgggcgtctctgaagatggctcgggcttctctttggcgcgccggggggaccctgacactgaccgctctgtgacgcgagtagtctcccctgcaccgtgcccgaagcgacgtgccgggggatttttcattctcgatctgttgactggctcccccgctgcatgagcagagtcggagttgagactggcttgttgctggccccagcgcctggtgcaggaagcgactcacgtttgtctgggtggccggagccggagcagagcctgggtttggagtgagtgcctggaacgtgaattggactcaactcgagtagcagcaaagaccagcgggctggcaggcgggggaggctgcaggctcattccccacctcttcccagccccactgcccgtctgccggagcggttctggccccttccgacagagcggggactagagccggggattctccgcccgctgaggggatgactctgggttgggggagcgccgaacccgcggcgcgcagtgtcccgtgaactgtgagtactgcgactgaacggcggcaggcgagcgggcgattagcacccattgcatgaattatgaaacaataactttcggaagaagcaggaggaaaaaaagaagcatctatcgctgccctcccacccccattcccggccaactctccacgccgcttttgccccctccctcccctccctctcgctccttcctttccgggagaggggagaggactcgggggagggcaggcggccggccccggaggaggggggcgccgagggggctgtggttagaaggagcagtagcagcagcagcaggagaagatgctgaggatgcggaccgcgggatgggcgcgcggctggtgcttgggctgctgcctcctcctgccgctctcgctcagcctggcggccgccaagcagctcctccggtaccggctggccgaggagggccccgccgacgtccgcatcggcaacgtggcttcagacctgggcatcgtgaccggatcgggtgaggtgactttcagcctggagtccggttccgagtacctgaagatcgacaacctcactggcgagctgagcacgagcgagcggcgcatcgaccgcgagaagctgccccagtgtcagatgatcttcgacgagaacgagtgcttcctggacttcgaggtgtcggtgatcgggccctcgcagagctgggtggacctgtttgagggtcaggtcatcgtgcttgacatcaacgacaacacgcccaccttcccgtcgcccgtgctcacgctcacggtggaggagaatcggccggtgggcacactttacctgctgcccacagccaccgaccgcgacttcggccgcaacggcatcgagcgctacgagctgctccaggagcccggaggcggcggcagcggcggcgagagccggcgcgccggggcggccgacagcgccccctaccccgggggcggcgggaacggcgcgagcggcggcggctcgggaggctccaagcggcggctggacgcatcagagggcggcggcggcaccaaccccggcggccgcagcagcgtgttcgagctgcaggtggcggacaccccggacggcgagaagcagccgcagctgatcgtgaagggggcgctggaccgcgagcagcgcgactcctacgagctgaccctgcgagtgcgcgacggcggcgacccgcctcgctcctcgcaggccatcctacgggtcctcatcaccgacgtgaacgacaacagcccccgcttcgagaagagcgtgtacgaggccgacttggctgagaacagcgccccggggacccccatcctgcaactgcgcgcagccgacttggacgtgggggtcaacgggcagatcgaatacgtgttcggggcggccaccgagtcggtgaggcggctgctgcgccttgacgagacgtccggctggctcagcgtcctgcaccggatcgaccgcgaggaggtgaaccagctgcgcttcacggtcatggcccgcgaccgcgggcagccccccaagaccgacaaggccaccgtggtccttaacatcaaagacgagaacgacaacgtgccgtccattgaaatccgcaagattgggcgcatccccctcaaggacggggtggccaacgtggccgaggacgttctggtcgacacccccatcgctctggtgcaggtgtccgaccgagaccaaggcgagaacggggtggtcacctgcaccgtggtgggcgacgtgcccttccagctcaagccagccagcgacaccgagggcgaccagaacaagaaaaagtacttcttgcacacctcgacccctctggactatgaggccacccgggagttcaacgtggtcatcgtggcggtggactcaggcagccccagcctctcgagcaacaactccctgattgtcaaggtgggagacaccaacgacaacccgcccatgttcggccagtcggtggtggaggtttacttccctgagaacaacatcccgggcgagagggtggccacggtgctggcgacagacgcagacagcggtaagaacgccgagatcgcctactcgctggactcctctgtgatggggatctttgccatcgatcccgattctggggacatcctggtcaataccgtgctggaccgcgagcagactgacaggtatgagtttaaagttaacgccaaagacaaaggcatccccgtgctgcagggcagcactacggtgattgtgcaggtggctgataaaaatgacaatgaccctaagtttatgcaggacgtcttcaccttttatgtgaaagaaaacttgcagcccaacagccctgtggggatggtcaccgtgatggatgctgacaaggggcggaatgcagagatgagcctgtacatagaggagaacaataacattttttctattgaaaatgacacggggaccatttactccacaatgtcttttgaccgggaacatcagaccacatacactttcagagtcaaggctgtggatgggggagatcctcccagatctgccacagctacagtctcgctttttgtgatggatgaaaatgacaatgctcccacagttacccttcccaaaaacatttcctacactttactgccaccttcgagtaatgtcaggacagtagtagctacagtgttggcaacagacagtgatgatggcatcaatgcagacctgaactacagcattgtgggaggaaatcccttcaagctgtttgaaattgatcccactagtggtgtggtttccttagtgggaaaactcacccaaaagcattatggcttgcacaggttggtggtgcaagtgaatgacagtgggcagccttcccagtccaccacgactctggtgcacgtgtttgtcaatgaaagtgtttctaatgcaactgcgattgactcccagatagctagaagtttgcacatcccactcacccaggatatagctggtgacccaagctatgaaattagcaaacagagactcagtattgtcattggcgtggttgctggcattatgacggtgattctaatcatcttaattgtagtgatggcaaggtactgcaggtccaaaaataaaaatggctatgaagccggcaaaaaagatcacgaagacttttttacaccccaacagcatgacaaatctaaaaagcctaaaaaggacaagaaaaacaaaaaatctaagcagcctctctacagcagcattgtcactgtggaggcttctaagccaaatggacagaggtatgatagtgtcaatgagaagctgtcagacagcccaagcatggggcgatacaggtccgttaatggtgggcccggcagtcctgacctggcaaggcattacaaatctagttccccattgcctactgttcagcttcatccccagtcaccaactgcaggaaaaaaacaccaggccgtacaagatctaccaccagccaacacatttgtgggagcaggagacaacatttcaattggatcagatcactgctctgagtacagctgtcaaaccaataacaagtacagcaaacaggtaagatgtatcccaaatatatttaaatatcccagggagggctaataactctgagacagattatcttctgtaaagttttgtcttctcgtttttaaagttattaaaattttaacagtaggaatttaatgttaatttttgcaccattaatttagcaaaggccatctacaagaggtataccactgtattttgcaaattagaattaaggttcactaaactactgaaagaagtattcagagtaggcagtgtttggcagttctctttgcacttgacatccctaattcatactacatttttttgtttccagaataaatatgtgtgtattacttagatggttagttttcacctgaaattattttcttctgtggcaactaagtggataattacatccagagaaaaagtttctaaagttactactggtgtctatgcaaattggattccatagaagttttagctatgttatttacaatgcaggattttacagataaatagatgctgattcatgcagatgtagtactaagtctgagatattgaaatactgactactttgatgaaactgctggtttaaaaatatttactgatatgcaaatgtcatgcaaaactccactttcaatcttttatatctataataatcgatacctataacaattagtgttctataatgatatgcaattaccatttgcattctttctgtttggtattaaaagtttgcaaacaaaaatacattgcatgagccatttat

SEQ ID NO: 544 - protein, 1072 aa, Homo sapiens
MLRMRTAGWARGWCLGCCLLLPLSLSLAAAKQLLRYRLAEEGPADVRIGNVASDLGIVTGSGEVTFSLESGSEYLKIDNLTGELSTSERRIDREKLPQCQMIFDENECFLDFEVSVIGPSQSWVDLFEGQVIVLDINDNTPTFPSPVLTLTVEENRPVGTLYLLPTATDRDFGRNGIERYELLQEPGGGGSGGESRRAGAADSAPYPGGGGNGASGGGSGGSKRRLDASEGGGGTNPGGRSSVFELQVADTPDGEKQPQLIVKGALDREQRDSYELTLRVRDGGDPPRSSQAILRVLITDVNDNSPRFEKSVYEADLAENSAPGTPILQLRAADLDVGVNGQIEYVFGAATESVRRLLRLDETSGWLSVLHRIDREEVNQLRFTVMARDRGQPPKTDKATVVLNIKDENDNVPSIEIRKIGRIPLKDGVANVAEDVLVDTPIALVQVSDRDQGENGVVTCTVVGDVPFQLKPASDTEGDQNKKKYFLHTSTPLDYEATREFNVVIVAVDSGSPSLSSNNSLIVKVGDTNDNPPMFGQSVVEVYFPENNIPGERVATVLATDADSGKNAEIAYSLDSSVMGIFAIDPDSGDILVNTVLDREQTDRYEFKVNAKDKGIPVLQGSTTVIVQVADKNDNDPKFMQDVFTFYVKENLQPNSPVGMVTVMDADKGRNAEMSLYIEENNNIFSIENDTGTIYSTMSFDREHQTTYTFRVKAVDGGDPPRSATATVSLFVMDENDNAPTVTLPKNISYTLLPPSSNVRTVVATVLATDSDDGINADLNYSIVGGNPFKLFEIDPTSGVVSLVGKLTQKHYGLHRLVVQVNDSGQPSQSTTTLVHVFVNESVSNATAIDSQIARSLHIPLTQDIAGDPSYEISKQRLSIVIGVVAGIMTVILIILIVVMARYCRSKNKNGYEAGKKDHEDFFTPQQHDKSKKPKKDKKNKKSKQPLYSSIVTVEASKPNGQRYDSVNEKLSDSPSMGRYRSVNGGPGSPDLARHYKSSSPLPTVQLHPQSPTAGKKHQAVQDLPPANTFVGAGDNISIGSDHCSEYSCQTNNKYSKQVRCIPNIFKYPREG

SEQ ID NO: 545 - DNA, 4893 bp, Homo sapiens
gaatgcaggtgagaaaaggcacggactctgcggctgcgaacccaaacttgggcaccgcacggtgcgcactgctcagccttcgcccccgtgggcgaaaggctgctgcggtttcaggcggctgcttcgtgactaatgaccttgcgcagagttgttaagaaaaaagagaaacccgcgctctccggggtgagaagggactgactctgggcgtctctgaagatggctcgggcttctctttggcgcgccggggggaccctgacactgaccgctctgtgacgcgagtagtctcccctgcaccgtgcccgaagcgacgtgccgggggatttttcattctcgatctgttgactggctcccccgctgcatgagcagagtcggagttgagactggcttgttgctggccccagcgcctggtgcaggaagcgactcacgtttgtctgggtggccggagccggagcagagcctgggtttggagtgagtgcctggaacgtgaattggactcaactcgagtagcagcaaagaccagcgggctggcaggcgggggaggctgcaggctcattccccacctcttcccagccccactgcccgtctgccggagcggttctggccccttccgacagagcggggactagagccggggattctccgcccgctgaggggatgactctgggttgggggagcgccgaacccgcggcgcgcagtgtcccgtgaactgtgagtactgcgactgaacggcggcaggcgagcgggcgattagcacccattgcatgaattatgaaacaataactttcggaagaagcaggaggaaaaaaagaagcatctatcgctgccctcccacccccattcccggccaactctccacgccgcttttgccccctccctcccctccctctcgctccttcctttccgggagaggggagaggactcgggggagggcaggcggccggccccggaggaggggggcgccgagggggctgtggttagaaggagcagtagcagcagcagcaggagaagatgctgaggatgcggaccgcgggatgggcgcgcggctggtgcttgggctgctgcctcctcctgccgctctcgctcagcctggcggccgccaagcagctcctccggtaccggctggccgaggagggccccgccgacgtccgcatcggcaacgtggcttcagacctgggcatcgtgaccggatcgggtgaggtgactttcagcctggagtccggttccgagtacctgaagatcgacaacctcactggcgagctgagcacgagcgagcggcgcatcgaccgcgagaagctgccccagtgtcagatgatcttcgacgagaacgagtgcttcctggacttcgaggtgtcggtgatcgggccctcgcagagctgggtggacctgtttgagggtcaggtcatcgtgcttgacatcaacgacaacacgcccaccttcccgtcgcccgtgctcacgctcacggtggaggagaatcggccggtgggcacactttacctgctgcccacagccaccgaccgcgacttcggccgcaacggcatcgagcgctacgagctgctccaggagcccggaggcggcggcagcggcggcgagagccggcgcgccggggcggccgacagcgccccctaccccgggggcggcgggaacggcgcgagcggcggcggctcgggaggctccaagcggcggctggacgcatcagagggcggcggcggcaccaaccccggcggccgcagcagcgtgttcgagctgcaggtggcggacaccccggacggcgagaagcagccgcagctgatcgtgaagggcgtgtacgaggccgacttggctgagaacagcgccccggggacccccatcctgcaactgcgcgcagccgacttggacgtgggggtcaacgggcagatcgaatacgtgttcggggcggccaccgagtcggtgaggcggctgctgcgccttgacgagacgtccggctggctcagcgtcctgcaccggatcgaccgcgaggaggtgaaccagctgcgcttcacggtcatggcccgcgaccgcgggcagccccccaagaccgacaaggccaccgtggtccttaacatcaaagacgagaacgacaacgtgccgtccattgaaatccgcaagattgggcgcatccccctcaaggacggggtggccaacgtggccgaggacgttctggtcgacacccccatcgctctggtgcaggtgtccgaccgagaccaaggcgagaacggggtggtcacctgcaccgtggtgggcgacgtgcccttccagctcaagccagccagcgacaccgagggcgaccagaacaagaaaaagtacttcttgcacacctcgacccctctggactatgaggccacccgggagttcaacgtggtcatcgtggcggtggactcaggcagccccagcctctcgagcaacaactccctgattgtcaaggtgggagacaccaacgacaacccgcccatgttcggccagtcggtggtggaggtttacttccctgagaacaacatcccgggcgagagggtggccacggtgctggcgacagacgcagacagcggtaagaacgccgagatcgcctactcgctggactcctctgtgatggggatctttgccatcgatcccgattctggggacatcctggtcaataccgtgctggaccgcgagcagactgacaggtatgagtttaaagttaacgccaaagacaaaggcatccccgtgctgcagggcagcactacggtgattgtgcaggtggctgataaaaatgacaatgaccctaagtttatgcaggacgtcttcaccttttatgtgaaagaaaacttgcagcccaacagccctgtggggatggtcaccgtgatggatgctgacaaggggcggaatgcagagatgagcctgtacatagaggagaacaataacattttttctattgaaaatgacacggggaccatttactccacaatgtcttttgaccgggaacatcagaccacatacactttcagagtcaaggctgtggatgggggagatcctcccagatctgccacagctacagtctcgctttttgtgatggatgaaaatgacaatgctcccacagttacccttcccaaaaacatttcctacactttactgccaccttcgagtaatgtcaggacagtagtagctacagtgttggcaacagacagtgatgatggcatcaatgcagacctgaactacagcattgtgggaggaaatcccttcaagctgtttgaaattgatcccactagtggtgtggtttccttagtgggaaaactcacccaaaagcattatggcttgcacaggttggtggtgcaagtgaatgacagtgggcagccttcccagtccaccacgactctggtgcacgtgtttgtcaatgaaagtgtttctaatgcaactgcgattgactcccagatagctagaagtttgcacatcccactcacccaggatatagctggtgacccaagctatgaaattagcaaacagagactcagtattgtcattggcgtggttgctggcattatgacggtgattctaatcatcttaattgtagtgatggcaaggtactgcaggtccaaaaataaaaatggctatgaagccggcaaaaaagatcacgaagacttttttacaccccaacagcatgacaaatctaaaaagcctaaaaaggacaagaaaaacaaaaaatctaagcagcctctctacagcagcattgtcactgtggaggcttctaagccaaatggacagaggtatgatagtgtcaatgagaagctgtcagacagcccaagcatggggcgatacaggtccgttaatggtgggcccggcagtcctgacctggcaaggcattacaaatctagttccccattgcctactgttcagcttcatccccagtcaccaactgcaggaaaaaaacaccaggccgtacaagatctaccaccagccaacacatttgtgggagcaggagacaacatttcaattggatcagatcactgctctgagtacagctgtcaaaccaataacaagtacagcaaacagccatttcgtagagtgacgttttctgttgtgagtcagcctcaggacccacatcaggggtcactgcagagttgctatgacagcgggctggaggagtcagaaacaccaagcagtaagagttcatcagggccaagactgggtgcgcttccactcccagaggacaactatgaaaggaccacgccggatggcagtgttgattcaaggcctcttccagatgtagccctgactgggaagtgcactcgtgagtgtgatgagtatggccactcagactcctgctggatgccggtccgcacttctccggagaggaagaagagccagcctaaactgtccactttcatgcctgttgatgaacgaggaagccaggaaaagctggccaatggggaggccgccatcatgggtgaccgcaacagaaacctcctgaacaaaaagttgacctcatcctatgagaccttcagtgcagctagtttcagcaaaaatgaggaagccaaccctgaggatattccccttacaaaaacaggggaatataagccatctcctgtcaatactctcactagaagagaagtttacctgtaggctataaaggagcaacagcaaagttctttacatgtatgaaaaggagaataaggggcaaaaaccttacaaagcaaaacgtttaatcacaaagagggggctaccaaagagacaaagctttgcctgccacttctgcctccagatcaggcctttagtgatactgttagcctgattctactgtacaatgtagaaaccatccttgttacttgcatgtctaaccccttcactgattcccaacactcactttctcttccccacccctctccaaaaaaaaaaaaacaaaaa

SEQ ID NO: 546 - protein, 1200 aa, Homo sapiens
MLRMRTAGWARGWCLGCCLLLPLSLSLAAAKQLLRYRLAEEGPADVRIGNVASDLGIVTGSGEVTFSLESGSEYLKIDNLTGELSTSERRIDREKLPQCQMIFDENECFLDFEVSVIGPSQSWVDLFEGQVIVLDINDNTPTFPSPVLTLTVEENRPVGTLYLLPTATDRDFGRNGIERYELLQEPGGGGSGGESRRAGAADSAPYPGGGGNGASGGGSGGSKRRLDASEGGGGTNPGGRSSVFELQVADTPDGEKQPQLIVKGVYEADLAENSAPGTPILQLRAADLDVGVNGQIEYVFGAATESVRRLLRLDETSGWLSVLHRIDREEVNQLRFTVMARDRGQPPKTDKATVVLNIKDENDNVPSIEIRKIGRIPLKDGVANVAEDVLVDTPIALVQVSDRDQGENGVVTCTVVGDVPFQLKPASDTEGDQNKKKYFLHTSTPLDYEATREFNVVIVAVDSGSPSLSSNNSLIVKVGDTNDNPPMFGQSVVEVYFPENNIPGERVATVLATDADSGKNAEIAYSLDSSVMGIFAIDPDSGDILVNTVLDREQTDRYEFKVNAKDKGIPVLQGSTTVIVQVADKNDNDPKFMQDVFTFYVKENLQPNSPVGMVTVMDADKGRNAEMSLYIEENNNIFSIENDTGTIYSTMSFDREHQTTYTFRVKAVDGGDPPRSATATVSLFVMDENDNAPTVTLPKNISYTLLPPSSNVRTVVATVLATDSDDGINADLNYSIVGGNPFKLFEIDPTSGVVSLVGKLTQKHYGLHRLVVQVNDSGQPSQSTTTLVHVFVNESVSNATAIDSQIARSLHIPLTQDIAGDPSYEISKQRLSIVIGVVAGIMTVILIILIVVMARYCRSKNKNGYEAGKKDHEDFFTPQQHDKSKKPKKDKKNKKSKQPLYSSIVTVEASKPNGQRYDSVNEKLSDSPSMGRYRSVNGGPGSPDLARHYKSSSPLPTVQLHPQSPTAGKKHQAVQDLPPANTFVGAGDNISIGSDHCSEYSCQTNNKYSKQPFRRVTFSVVSQPQDPHQGSLQSCYDSGLEESETPSSKSSSGPRLGALPLPEDNYERTTPDGSVDSRPLPDVALTGKCTRECDEYGHSDSCWMPVRTSPERKKSQPKLSTFMPVDERGSQEKLANGEAAIMGDRNRNLLNKKLTSSYETFSAASFSKNEEANPEDIPLTKTGEYKPSPVNTLTRREVYL

SEQ ID NO: 547 - DNA, 7360 bp, Homo sapiens
gcggccgccgccaggcagcagaggcgactgcggacagccggcggggaccgggaaagaggaggcctggcgcctccggcagaggggcgaggaccgagcgcccaaggctgggagagacgccggcgctgagcttcccagcgccgcctcacctcgcttttcgaactccgcgacccgagcgcaaggcttaagcaggtaaagcagtcactgtgaagaaaataacattttaagaaacttttctgtcacaattgatagaggaaaagccagtagagaagtacatcttcttgtgtgtgtgtctcatcgtgccactttttgtaactcagcttagtaatgaagccaccattatgtcctcagtcagtgaagtaaatgtggatataaaagatttcctaatgagcattaatttggagcagtatctcttacatttccatgagtctggttttactactgtgaaggactgtgcagcaataaatgacagcctgctgcagaaaattggaatatcacctacaggtcaccgtaggaggatacttaaacagttacagataatcttgtcaaaaatgcaagatattccaatatatgcaaatgttcataaaactaagaagaatgatgacccttcaaaggattaccatgttccatcttctgatcagaatatctgcatagaactttccaattctggtagtgttcagacatctagcccaccgcagttggagactgttagaaaaaatcttgaagacagtgatgcaagtgtggaaagaagccagtatcctcaatcagatgataagctgtctcctcctaaacgcgacttccccactgcagaggaaccacacctgaatttgggttctttgaatgattctttatttggtagtgacaatattaaaatagaatcattgattacaaagaagactgtggatcacacagttgaagaacaacaaacagaaaaagttaaattgatcacagaaaatctcagtaagctccctaatgcagactctgaatgcctttcttttgttggctgttcaacatcaggaacaaattctggaaatggaacaaatggtttattagaaggatcaccaccatccccattctttaagtttcaaggagaaatgattgtaaatgacttgtatgttccatcatcaccaatcctagcacctgtgagaagtcgtagcaagttggtttcaagaccatctcgatcttttctgctaagacatcgacctgtaccagagattccagggtcaacaaaaggagtttctgggagctatttccgtgaaagaagaaatgttgctacctcaactgaaaaatctgtggcatggcaaaattcaaatgaggagaattcatcttccatctttccttatggagagacctttctcttccagagactagaaaattccaagaagcgatctataaagaatgaatttttgacccagggagaagcactcaaaggggaagcagctactgcaacaaactcttttatcatcaaatcaagcatatacgataacagaaaggagaaaataagcgaggacaaggtggaagatatttggatacctcgagaggacaaaaacaattttttgatagacactgcttctgaatcagaatactcaacagtagaagaatgctttcagagtttaagaagaaaaaattcaaaggcatctaaatctaggactcaaaaagccttgattttggactccgttaataggcacagttatccgttaagctcaacaagtggaaatgctgattcatcagccgtttcttcacaggcaatatctccctatgcctgcttttatggagcatctgcaaagaaggttaaatcaggatggctggataaactctctcctcaaggaaaacgcatgtttcaaaagagatgggtgaaatttgatggccttagcatttcttactacaataatgagaaggagatgtattcgaaaggaataattcccctttctgctatatcaacagtacgagttcaaggagacaacaaatttgaagttgttacaacacaaagaacttttgtttttagagtagaaaaagaagaggagagaaatgactggatcagcatactattaaatgcactgaaatcacaatcccttacctcgcagtctcaagctgttgttacacctgagaaatgtggatatcttgaattgagaggctataaggcaaaaatttttactgtgttaagtggaaacagtgtgtggctttgcaaaaacgaacaggattttaagagtggacttggtattaccataattcctatgaatgtagcaaatgtaaagcaagtggaccgaactgtgaaacaatcttttgaaataatcactccctacaggagtttcagctttacagccgagactgaaaaggagaaacaagactggattgaagctgtgcagcaatcaatagcagaaactctctctgattatgaagtagctgagaagatttggttcaatgaatccaacaggagctgtgcagattgtaaagccccagatcctgactgggcatccatcaatctctgtgttgtcatctgtaagaagtgtgcaggacagcatagatctttaggaccaaaagattccaaggttagaagtctaaaaatggatgctagcatttggagcaatgaactcatcgagctttttattgtcattggaaacaaaagagcaaatgacttttgggctggtaatcttcaaaaggatgaagaattacatatggactcaccagtagaaaagagaaaaaactttattactcagaaatataaagaaggaaaattcagaaaaactcttttggcatctctcaccaaagaagaattaaataaggctctatgtgctgctgtagtgaaaccggatgttctagaaacaatggctttgctgttcagtggagcagatgtcatgtgtgccaccggagaccccgtgcatagcaccccctatctgctagccaagaaagctgggcaaagtctgcaaatggaatttctctaccataacaaattctcagatttccctcaacatgatattcattccgagggtgtattaagtcaagagtcttcccagtccacattcctctgtgactttttatatcaagctccttctgctgcttctaaactctcttcagagaaaaaactgcttgaagagacaaataaaaaatggtgtgttttggaaggaggcttcttgagttactatgaaaatgataagtctaccacacctaatggcaccattaatatcaatgaagttatctgcctggctatacacaaagaggacttctatttaaatactgggcccatctttatctttgagatctacttaccctccgaacgtgtgtttttatttggagctgaaacatctcaagctcaaagaaaatggacagaggcaatagccaagcattttgttcccttatttgctgaaaacttaacagaagctgactatgatttgattggtcaactcttctacaaagactgccatgccctggatcagtggagaaaaggctggtttgctatggacaaatccagcttgcatttttgccttcaaatgcaagaagttcagggagatagaatgcacttaagaagactgcaagagctaacaatcagcacaatggttcaaaatggggaaaaactggatgttttactcttggtagaaaaagggagaacattatacatccatgggcataccaagttggatttcacagtctggcatactgcaattgaaaaagcagcaggtacagatggtaatgctttacaagatcagcagctcagcaaaaatgacgttcccattatagtgaacagctgtatagcatttgttacacagtatggtttaggatgcaaatatatctatcaaaagaatggtgatcctttgcatataagtgaactcctggagagtttcaaaaaggatgcaagaagctttaaattgagggctggaaaacatcagcttgaagatgtgacggctgtgttgaaaagttttctctctgacattgatgatgcactgcttactaaggagctctacccatattggatctctgctttagatacgcaagatgacaaggaaagaattaaaaaatatggagcatttatacgttctcttccaggggtcaaccgagcaacactagcagctatcattgaacacctgtatagggttcagaaatgctcagaaatcaatcacatgaatgcccataatttggccttggtcttttcatcctgtttgtttcaaacgaagggacaaactagtgaagaagtgaatgtaattgaggacctaattaataattatgtagaaatatttgaggttaaagaagatcaagtcaaacaaatggacatagaaaatagctttattaccaagtggaaagacacccaagtttcccaggctggagatttgttaattgaagtatatgtagaaaggaaggaacccgactgtagtattataattcggatatctcctgtgatggaagcagaagaattaactaatgatatattagcgataaaaaatattattcctacaaaaggtgatatttgggccacatttgaagtcattgaaaatgaagagctagagcgtcctcttcactacaaggaaaatgtactggagcaggtgcttcggtggagttcattagctgaacctggctctgcttacctggtggtgaagagattcttaaccgctgacacaattaaacactgcagtgaccggagtacactgggaagcatcaaagaaggaatcttgaaaatcaaagaagaaccatccaaaatactatctggaaataagtttcaagaccggtattttgttttacgagatgggtttctctttctttacaaggatgtgaagagtagtaaacatgacaagatgttttctctcagttccatgaagttttatcgtggagtgaaaaagaaaatgaagcctccaacaagctggggattgaccgcatattctgagaaacatcactggcacctgtgttgtgatagttcacgaactcagacggagtggatgaccagtatctttattgcccagcatgaatatgatatatggccaccagctggaaaggaacgaaaacgttcaataaccaaaaatcccaaaattggaggtttgcctctgattcctatacagcatgaggggaatgcaaccttggcccggaaaaatattgagagtgcaagagcagaacttgaaaggctgcggctcagtgaaaagtgtgataaagagtccgtggactctagcttaaaggagagagcttccatggtggcccactgcctggagcacaaggacgataaacttcgaaatcgaccccgaaaacatcggagtttcaactgcctggaggacacagagcctgaagccccacttgggcaaccaaaaggccataaaggcctaaagacattgaggaagactgaggacaggaatagcaaagctactttggactctgatcataagttaccatcaagggtaattgaagaacttaatgtggttctacaacggtcaagaacccttccaaaagaattacaggatgagcagattttgaagtaggaaataaaatgaattgctccccagattatttttttaatattgtatgcaatctttatgtgtaactccaaaactgaactataagataattcataagaatttgcctattgataggcaaatttgtctatgcttaggcatttaaggagcatttaaaaatatgtatatatgtgactgaatgtaagattaactttattttggtctgaacaaaccttgtaaagttccattgtattaacgtgtgtaagaagacattgggttacttaggtggtcagtccttttaaagtagttgtctgttaagtggtataatttatgagcagaaatctcaaactgtactgtattgtataaaatgctgtgtttaaatgaagcctaagaaactatctgtaacatattttgcactttgagaaaccttgtatattaaattaccatatgtttttaggtttacagaagttctaccttagggaaaagaaagggaagtaaattgaaaaaggggggagaatttattgtagtggctgcctaaaaaccactggagtttttaaaagaagcaaggagttaaatgtcctgcaaaacaaggaagtgagctaagattcattctagttcactaatgaccagaacttgtcaatgagaaaccacttgttaagaaaaagtccagtgtttatttctcaagagtaatattcggccaacagatgtaaataatagcactagccactcttattaatatttatagtgttagaaaaccagccacattacagattcactacgtttgagctcattgttggtggctgctaagaggaaacttacactgcattggagaggttgtgtacacaggacctggcctggatgctgattgcactgtcattgtatgcaagcattttgtcttttttcagaatttctgactatacttttggtacgaacaaaattcatcaccacagggtcctgttgttttgtttgatttttagatttttttaaattattattaaggttgtaatgtttttctccgagttgtcagaaataactggaagaatacaatatatggccattatggagccaggggctagttggtggtttactatacatttgggggctacctggtcacatttaatctaggtttttttttctttttttaagtaaaggtgtggtctcttccctgtacttatgaataaggacaaagccctatttttgtttccacataaagatcagctactgaattggtgaatttcctgacagacaatgctatctaaccatagttcatgttaggggaagcatttttccatcagtttctttaaaattggattgtctggtgagttttgatattaaacattatgtagctaagttttttttttttagcatttcttttttatttttcaatctatattcacaggcccatacttcagtcagtccaatcatagtacagtgatgtggtggtagatgctatgaatttcttcattgtaaaatacggatcatttgtattttggggtgataaaatagttcaccatgggtatgagatatttattctttaaatcaaagtaaattagaatttttaaaaagcacaaaactgcaggacagtttatgaaataggtggcactattagggaatcttcctttaaagcaagaaatcatgttatttagaaagaaaaactaatcttaaacatactatttctaataaatatttatatttttatgaaataaagaggtatgtggaaattaatatttggtgatgttggacagtggaaaagtatctagagtttttacctgccttatctgaattcttcttgaaacttgagcttaaactctaatagctgtttccctttctattctgaacaactgtctccatttttcaagtgtgagagataagggctaatgatgacatctcatttattttgagtaaacattaaaattgttttacaagtctacttg

SEQ ID NO: 548 - protein, 1704 aa, Homo sapiens
MSSVSEVNVDIKDFLMSINLEQYLLHFHESGFTTVKDCAAINDSLLQKIGISPTGHRRRILKQLQIILSKMQDIPIYANVHKTKKNDDPSKDYHVPSSDQNICIELSNSGSVQTSSPPQLETVRKNLEDSDASVERSQYPQSDDKLSPPKRDFPTAEEPHLNLGSLNDSLFGSDNIKIESLITKKTVDHTVEEQQTEKVKLITENLSKLPNADSECLSFVGCSTSGTNSGNGTNGLLEGSPPSPFFKFQGEMIVNDLYVPSSPILAPVRSRSKLVSRPSRSFLLRHRPVPEIPGSTKGVSGSYFRERRNVATSTEKSVAWQNSNEENSSSIFPYGETFLFQRLENSKKRSIKNEFLTQGEALKGEAATATNSFIIKSSIYDNRKEKISEDKVEDIWIPREDKNNFLIDTASESEYSTVEECFQSLRRKNSKASKSRTQKALILDSVNRHSYPLSSTSGNADSSAVSSQAISPYACFYGASAKKVKSGWLDKLSPQGKRMFQKRWVKFDGLSISYYNNEKEMYSKGIIPLSAISTVRVQGDNKFEVVTTQRTFVFRVEKEEERNDWISILLNALKSQSLTSQSQAVVTPEKCGYLELRGYKAKIFTVLSGNSVWLCKNEQDFKSGLGITIIPMNVANVKQVDRTVKQSFEIITPYRSFSFTAETEKEKQDWIEAVQQSIAETLSDYEVAEKIWFNESNRSCADCKAPDPDWASINLCVVICKKCAGQHRSLGPKDSKVRSLKMDASIWSNELIELFIVIGNKRANDFWAGNLQKDEELHMDSPVEKRKNFITQKYKEGKFRKTLLASLTKEELNKALCAAVVKPDVLETMALLFSGADVMCATGDPVHSTPYLLAKKAGQSLQMEFLYHNKFSDFPQHDIHSEGVLSQESSQSTFLCDFLYQAPSAASKLSSEKKLLEETNKKWCVLEGGFLSYYENDKSTTPNGTININEVICLAIHKEDFYLNTGPIFIFEIYLPSERVFLFGAETSQAQRKWTEAIAKHFVPLFAENLTEADYDLIGQLFYKDCHALDQWRKGWFAMDKSSLHFCLQMQEVQGDRMHLRRLQELTISTMVQNGEKLDVLLLVEKGRTLYIHGHTKLDFTVWHTAIEKAAGTDGNALQDQQLSKNDVPIIVNSCIAFVTQYGLGCKYIYQKNGDPLHISELLESFKKDARSFKLRAGKHQLEDVTAVLKSFLSDIDDALLTKELYPYWISALDTQDDKERIKKYGAFIRSLPGVNRATLAAIIEHLYRVQKCSEINHMNAHNLALVFSSCLFQTKGQTSEEVNVIEDLINNYVEIFEVKEDQVKQMDIENSFITKWKDTQVSQAGDLLIEVYVERKEPDCSIIIRISPVMEAEELTNDILAIKNIIPTKGDIWATFEVIENEELERPLHYKENVLEQVLRWSSLAEPGSAYLVVKRFLTADTIKHCSDRSTLGSIKEGILKIKEEPSKILSGNKFQDRYFVLRDGFLFLYKDVKSSKHDKMFSLSSMKFYRGVKKKMKPPTSWGLTAYSEKHHWHLCCDSSRTQTEWMTSIFIAQHEYDIWPPAGKERKRSITKNPKIGGLPLIPIQHEGNATLARKNIESARAELERLRLSEKCDKESVDSSLKERASMVAHCLEHKDDKLRNRPRKHRSFNCLEDTEPEAPLGQPKGHKGLKTLRKTEDRNSKATLDSDHKLPSRVIEELNVVLQRSRTLPKELQDEQILK

SEQ ID NO: 549 - DNA, 4816 bp, Homo sapiens
atcatagcaaccaaacaatgaattgagacctggaggtcttgggttgtaatttaaattcacataaaccaggccttttgtgcctattgcctaattcatggcataattattattagccgccttaggataaaaggaatacagactttatcccatacatgaaattatcagactttcactcattttaatagctagaatcttattttctttccttaagatgtatattttcttttaatgaccaggctctatgtgctgctgtagtgaaaccggatgttctagaaacaatggctttgctgttcagtggagcagatgtcatgtgtgccaccggagaccccgtgcatagcaccccctatctgctagccaagaaagctgggcaaagtctgcaaatggaatttctctaccataacaaattctcagatttccctcaacatgatattcattccgagggtgtattaagtcaagagtcttcccagtccacattcctctgtgactttttatatcaagctccttctgctgcttctaaactctcttcagagaaaaaactgcttgaagagacaaataaaaaatggtgtgttttggaaggaggcttcttgagttactatgaaaatgataagtctaccacacctaatggcaccattaatatcaatgaagttatctgcctggctatacacaaagaggacttctatttaaatactgggcccatctttatctttgagatctacttaccctccgaacgtgtgtttttatttggagctgaaacatctcaagctcaaagaaaatggacagaggcaatagccaagcattttgttcccttatttgctgaaaacttaacagaagctgactatgatttgattggtcaactcttctacaaagactgccatgccctggatcagtggagaaaaggctggtttgctatggacaaatccagcttgcatttttgccttcaaatgcaagaagttcagggagatagaatgcacttaagaagactgcaagagctaacaatcagcacaatggttcaaaatggggaaaaactggatgttttactcttggtagaaaaagggagaacattatacatccatgggcataccaagttggatttcacagtctggcatactgcaattgaaaaagcagcaggtacagatggtaatgctttacaagatcagcagctcagcaaaaatgacgttcccattatagtgaacagctgtatagcatttgttacacagtatggtttaggatgcaaatatatctatcaaaagaatggtgatcctttgcatataagtgaactcctggagagtttcaaaaaggatgcaagaagctttaaattgagggctggaaaacatcagcttgaagatgtgacggctgtgttgaaaagttttctctctgacattgatgatgcactgcttactaaggagctctacccatattggatctctgctttagatacgcaagatgacaaggaaagaattaaaaaatatggagcatttatacgttctcttccaggggtcaaccgagcaacactagcagctatcattgaacacctgtatagggttcagaaatgctcagaaatcaatcacatgaatgcccataatttggccttggtcttttcatcctgtttgtttcaaacgaagggacaaactagtgaagaagtgaatgtaattgaggacctaattaataattatgtagaaatatttgaggttaaagaagatcaagtcaaacaaatggacatagaaaatagctttattaccaagtggaaagacacccaagtttcccaggctggagatttgttaattgaagtatatgtagaaaggaaggaacccgactgtagtattataattcggatatctcctgtgatggaagcagaagaattaactaatgatatattagcgataaaaaatattattcctacaaaaggtgatatttgggccacatttgaagtcattgaaaatgaagagctagagcgtcctcttcactacaaggaaaatgtactggagcaggtgcttcggtggagttcattagctgaacctggctctgcttacctggtggtgaagagattcttaaccgctgacacaattaaacactgcagtgaccggagtacactgggaagcatcaaagaaggaatcttgaaaatcaaagaagaaccatccaaaatactatctggaaataagtttcaagaccggtattttgttttacgagatgggtttctctttctttacaaggatgtgaagagtagtaaacatgacaagatgttttctctcagttccatgaagttttatcgtggagtgaaaaagaaaatgaagcctccaacaagctggggattgaccgcatattctgagaaacatcactggcacctgtgttgtgatagttcacgaactcagacggagtggatgaccagtatctttattgcccagcatgaatatgatatatggccaccagctggaaaggaacgaaaacgttcaataaccaaaaatcccaaaattggaggtttgcctctgattcctatacagcatgaggggaatgcaaccttggcccggaaaaatattgagagtgcaagagcagaacttgaaaggctgcggctcagtgaaaagtgtgataaagagtccgtggactctagcttaaaggagagagcttccatggtggcccactgcctggagcacaaggacgataaacttcgaaatcgaccccgaaaacatcggagtttcaactgcctggaggacacagagcctgaagccccacttgggcaaccaaaaggccataaaggcctaaagacattgaggaagactgaggacaggaatagcaaagctactttggactctgatcataagttaccatcaagggtaattgaagaacttaatgtggttctacaacggtcaagaacccttccaaaagaattacaggatgagcagattttgaagtaggaaataaaatgaattgctccccagattatttttttaatattgtatgcaatctttatgtgtaactccaaaactgaactataagataattcataagaatttgcctattgataggcaaatttgtctatgcttaggcatttaaggagcatttaaaaatatgtatatatgtgactgaatgtaagattaactttattttggtctgaacaaaccttgtaaagttccattgtattaacgtgtgtaagaagacattgggttacttaggtggtcagtccttttaaagtagttgtctgttaagtggtataatttatgagcagaaatctcaaactgtactgtattgtataaaatgctgtgtttaaatgaagcctaagaaactatctgtaacatattttgcactttgagaaaccttgtatattaaattaccatatgtttttaggtttacagaagttctaccttagggaaaagaaagggaagtaaattgaaaaaggggggagaatttattgtagtggctgcctaaaaaccactggagtttttaaaagaagcaaggagttaaatgtcctgcaaaacaaggaagtgagctaagattcattctagttcactaatgaccagaacttgtcaatgagaaaccacttgttaagaaaaagtccagtgtttatttctcaagagtaatattcggccaacagatgtaaataatagcactagccactcttattaatatttatagtgttagaaaaccagccacattacagattcactacgtttgagctcattgttggtggctgctaagaggaaacttacactgcattggagaggttgtgtacacaggacctggcctggatgctgattgcactgtcattgtatgcaagcattttgtcttttttcagaatttctgactatacttttggtacgaacaaaattcatcaccacagggtcctgttgttttgtttgatttttagatttttttaaattattattaaggttgtaatgtttttctccgagttgtcagaaataactggaagaatacaatatatggccattatggagccaggggctagttggtggtttactatacatttgggggctacctggtcacatttaatctaggtttttttttctttttttaagtaaaggtgtggtctcttccctgtacttatgaataaggacaaagccctatttttgtttccacataaagatcagctactgaattggtgaatttcctgacagacaatgctatctaaccatagttcatgttaggggaagcatttttccatcagtttctttaaaattggattgtctggtgagttttgatattaaacattatgtagctaagttttttttttttagcatttcttttttatttttcaatctatattcacaggcccatacttcagtcagtccaatcatagtacagtgatgtggtggtagatgctatgaatttcttcattgtaaaatacggatcatttgtattttggggtgataaaatagttcaccatgggtatgagatatttattctttaaatcaaagtaaattagaatttttaaaaagcacaaaactgcaggacagtttatgaaataggtggcactattagggaatcttcctttaaagcaagaaatcatgttatttagaaagaaaaactaatcttaaacatactatttctaataaatatttatatttttatgaaataaagaggtatgtggaaattaatatttggtgatgttggacagtggaaaagtatctagagtttttacctgccttatctgaattcttcttgaaacttgagcttaaactctaatagctgtttccctttctattctgaacaactgtctccatttttcaagtgtgagagataagggctaatgatgacatctcatttattttgagtaaacattaaaattgttttacaagtctacttg

SEQ ID NO: 550 - protein, 876 aa, Homo sapiens
MALLFSGADVMCATGDPVHSTPYLLAKKAGQSLQMEFLYHNKFSDFPQHDIHSEGVLSQESSQSTFLCDFLYQAPSAASKLSSEKKLLEETNKKWCVLEGGFLSYYENDKSTTPNGTININEVICLAIHKEDFYLNTGPIFIFEIYLPSERVFLFGAETSQAQRKWTEAIAKHFVPLFAENLTEADYDLIGQLFYKDCHALDQWRKGWFAMDKSSLHFCLQMQEVQGDRMHLRRLQELTISTMVQNGEKLDVLLLVEKGRTLYIHGHTKLDFTVWHTAIEKAAGTDGNALQDQQLSKNDVPIIVNSCIAFVTQYGLGCKYIYQKNGDPLHISELLESFKKDARSFKLRAGKHQLEDVTAVLKSFLSDIDDALLTKELYPYWISALDTQDDKERIKKYGAFIRSLPGVNRATLAAIIEHLYRVQKCSEINHMNAHNLALVFSSCLFQTKGQTSEEVNVIEDLINNYVEIFEVKEDQVKQMDIENSFITKWKDTQVSQAGDLLIEVYVERKEPDCSIIIRISPVMEAEELTNDILAIKNIIPTKGDIWATFEVIENEELERPLHYKENVLEQVLRWSSLAEPGSAYLVVKRFLTADTIKHCSDRSTLGSIKEGILKIKEEPSKILSGNKFQDRYFVLRDGFLFLYKDVKSSKHDKMFSLSSMKFYRGVKKKMKPPTSWGLTAYSEKHHWHLCCDSSRTQTEWMTSIFIAQHEYDIWPPAGKERKRSITKNPKIGGLPLIPIQHEGNATLARKNIESARAELERLRLSEKCDKESVDSSLKERASMVAHCLEHKDDKLRNRPRKHRSFNCLEDTEPEAPLGQPKGHKGLKTLRKTEDRNSKATLDSDHKLPSRVIEELNVVLQRSRTLPKELQDEQILK

SEQ ID NO: 551 - DNA, 1046 bp, Homo sapiens
ggtgtggtgagtgaaatggagaaggctaaactttttcttcccacatgctcacttccttgcttgttcgctagctgctgcatctggcccctcaagggtaaagtcaaggggaaaaggagattgagaggaaggacagtctgtgaattgggtctcaccgtgtttcccaggctgaagtacagtgttgtgatatcagttcattgcaacttctgtcttctgagctcaagcaatcctcttgcctcagcctctcaagtagctgggactgactacaggcatgaaccaccacacctggctaattttttttgtatttttgtcgaaaagacagtttcgccatgttgtacagaactacttctcaaatcactattcacatcctggtagaagtcaagcaatgaagatggcacagaaacacatcccaaatactatgataccataaagtatactgtagcaatgcattggcacaccctcatttgaacatttgtctcagaagattttgacagaagataaaattgtctggtttttatttcattggtttcatgaaaatttatttcactggtttcatgtcacaggcccatgactgtataaagagtcataatctttacaaacacaacaatgactcacagcgacatgttgcaaagctgtaatcgaaaacactgatgttgatttcagaggccattaatggtgttaagaaggcgcttttgttaaccaaataattgaatactcgtaattacttttcagttctagttcagttcttgacaccaaaacaagccattttctttacatagtgaatgcagaacttgccagtaagaactttcatactaaacttctatgtaaaacaaaacatgtcaaaatcagtaactactttaatggaatggtaaagaatttacttaaacacaaaggaatgaaaatatctctgcaaatatgtctattgacttttcaaatttggtgacttctttcgaattaattcccttacgtctgttcctcatccacataaaaatgacaaaaatgaaagataattttccagcctataattaaatttctccattgttggtata

SEQ ID NO: 552 - DNA, 2346 bp, Homo sapiens
atgcatgatgaatgtactccacagcagacaatgtcctccattcaagataccaaagcagcagacattgctgcaagaggggaactaaatgtcatagaaacagctactgtttctcccacaaatggagaggaaagtcattacacaaaccaggtccagttagaaaaaaataaaacacatatgagttcagcattagtggaaaaagaaaacaatacatcactgaatggacgtgtactggggcaagaagagtcacagaataaaatgttcccagataatgcagaaaatgaagatgataaacaaatagaacacatgactgttgagaacataaatggcaacagggaagagactcatggcataattcagacaacagagacagaaattcaagagacttcagaaagcccaagagaagagatgaccacatcctcaataatatgtgatatctccaagaaatatataaatagtactcttcccaatgattcagagaatataaagcacaagaataacataatggaaaaggagtatcttgatgtgctgagtgatgttactggcccccaagtgtcttgttatattacagcaccatcatatgttctacaacaactagaatgccggataataaatcacatgagttctttaatagtgggtgataatgaagagttagttagcaacgtcataactattgaatgctcagataaggaaaagagagttccatttccaataggcattgcaattccatttactgcacgttacagaggaaattacagagatatcatggtgaaagtgtgtgacataaaccttcaatcaagttacctaaacccaaattcactagaaggaatgaagggaggttataaggggacctgtgcttcagtaaaagtttacaaattgggtatcttttctgttgtgtcttgtttaaagaaagagtcgttcacagtaacaaagaaaggcctcgctcttaagtcaagcatggattcccgaatatccttaaattaccctccaggagtttttacctctccagtgctggtgcagttaaagatccaaccagttgacccagctctggtggcacatttaaaagcacagcaagatactttctactcagtccaatccacaagccctctgattcacattcagcacccatcaacttatccttttcagaagccagtcactttgtttttaccttgttctccataccttgataaaaacaaccttggttctgagatagatcataaaagaagagcaagtgccacaataaataggattacaccttcgtatttcaaccggacaaaaattgcctccataagaaaacctaggaaaaatgccagtgaatgtttgaaattactgggattcagaagccaagacagtggttggtgtgggcttgatgatgttgtgaaaaccatacagagcggcttggtatcagttgaattgtatgaacatttggagaggtttattgtacttcacctctcttccaccatggacaatagtcatttggttacttttgtgaaatctttagaggaagccatgctcagcaccactgcctgcatagtactgtctcaccagaaggacaatccacatagaatagctgttttagtggtgccttccaaagatttaagccaggtgcttaaggacctgcacttggaagggtttggaggacctccagagccatctcgtcatttccaagttcgagaaggagaacaacttcttttaagatttactggaaacatatttgcttcaagcaacgggaaggattatggaaaagactacacacttatttttcacttgcaaagaaaacctaggctggaactccaaatcaaagaagtggacgaatttggaaactatagttgccctcattacaaaggcaccattgtcgtttataaagtacctaaaggaaagatagtccccaacttgaatcaatctctcgtaattaatgaaaaccattctcagttgccaatttgcaaattaccattgaaattgccaaagcataagaaattaatcaaccgtccacagagtaccaaaagagtttctaaggatcctgtagaagccctttgggataacttgctccattggctggctgaggagctctcagaagaaaatgctgagtctctttcctcaactctccctctgcgccgtagcaccattcagctcatcaaactcaagaaccctgatgatctcacagaacagatccacgagtttctttgcttctggaaaaaatcgcttccaactttcaccgacaaacttcgcctcctggctcgacatctccgcaagattggcaggagtgatcttgcagaagagctcaaattcaagtgggaaaataaagtgttcactgaaccacagcagtgttttgatgtagcccctgagtaa

SEQ ID NO: 553 - protein, 781 aa, Homo sapiens
MHDECTPQQTMSSIQDTKAADIAARGELNVIETATVSPTNGEESHYTNQVQLEKNKTHMSSALVEKENNTSLNGRVLGQEESQNKMFPDNAENEDDKQIEHMTVENINGNREETHGIIQTTETEIQETSESPREEMTTSSIICDISKKYINSTLPNDSENIKHKNNIMEKEYLDVLSDVTGPQVSCYITAPSYVLQQLECRIINHMSSLIVGDNEELVSNVITIECSDKEKRVPFPIGIAIPFTARYRGNYRDIMVKVCDINLQSSYLNPNSLEGMKGGYKGTCASVKVYKLGIFSVVSCLKKESFTVTKKGLALKSSMDSRISLNYPPGVFTSPVLVQLKIQPVDPALVAHLKAQQDTFYSVQSTSPLIHIQHPSTYPFQKPVTLFLPCSPYLDKNNLGSEIDHKRRASATINRITPSYFNRTKIASIRKPRKNASECLKLLGFRSQDSGWCGLDDVVKTIQSGLVSVELYEHLERFIVLHLSSTMDNSHLVTFVKSLEEAMLSTTACIVLSHQKDNPHRIAVLVVPSKDLSQVLKDLHLEGFGGPPEPSRHFQVREGEQLLLRFTGNIFASSNGKDYGKDYTLIFHLQRKPRLELQIKEVDEFGNYSCPHYKGTIVVYKVPKGKIVPNLNQSLVINENHSQLPICKLPLKLPKHKKLINRPQSTKRVSKDPVEALWDNLLHWLAEELSEENAESLSSTLPLRRSTIQLIKLKNPDDLTEQIHEFLCFWKKSLPTFTDKLRLLARHLRKIGRSDLAEELKFKWENKVFTEPQQCFDVAPE

SEQ ID NO: 554 - DNA, 1539 bp, Homo sapiens
ccagtctccgcgcctccacccagctcaggaacccgcgaaccctctcttgaccactatgagcctcccgtccagccgcgcggcccgtgtcccgggtccttcgggctccttgtgcgcgctgctcgcgctgctgctcctgctgacgccgccggggcccctcgccagcgctggtcctgtctctgctgtgctgacagagctgcgttgcacttgtttacgcgttacgctgagagtaaaccccaaaacgattggtaaactgcaggtgttccccgcaggcccgcagtgctccaaggtggaagtggtagcctccctgaagaacgggaagcaagtttgtctggacccggaagccccttttctaaagaaagtcatccagaaaattttggacagtggaaacaagaaaaactgagtaacaaaaaagaccatgcatcataaaattgcccagtcttcagcggagcagttttctggagatccctggacccagtaagaataagaaggaagggttggtttttttccattttctacatggattccctactttgaagagtgtgggggaaagcctacgcttctccctgaagtttacagctcagctaatgaagtactaatatagtatttccactatttactgttattttacctgataagttattgaaccctttggcaattgaccatattgtgagcaaagaatcactggttattagtctttcaatgaatattgaattgaagataactattgtatttctatcatacattccttaaagtcttaccgaaaaggctgtggatttcgtatggaaataatgttttattagtgtgctgttgagggaggtatcctgttgttcttactcactcttctcataaaataggaaatattttagttctgttttcttggggaatatgttactctttaccctaggatgctatttaagttgtactgtattagaacactgggtgtgtcataccgttatctgtgcagaatatatttccttattcagaatttctaaaaatttaagttctgtaagggctaatatattctcttcctatggttttagatgtttgatgtcttcttagtatggcataatgtcatgatttactcattaaactttgattttgtatgctattttttcactataggatgactataattctggtcactaaatatacactttagatagatgaagaagcccaaaaacagataaattcctgattgctaatttacatagaaatgtattctcttggttttttaaataaaagcaaaattaacaatgatctgtgctctgcaaagttttgaaaatatatttgaacaatttgaatataaattcatcatttagtcctcaaaatatatacagcattgctaagattttcagatatctattgtggatcttttaaaggttttgaccattttgttatgaggaattatacatgtatcacattcactatattaaaattgcacttttattttttcctgtgtgtcatgttggtttttggtacttgtattgtcatttggagaaacaataaaagatttctaaaccaaaaaaaaaaaaaaaaaaa

SEQ ID NO: 555 - protein, 114 aa, Homo sapiens
MSLPSSRAARVPGPSGSLCALLALLLLLTPPGPLASAGPVSAVLTELRCTCLRVTLRVNPKTIGKLQVFPAGPQCSKVEVVASLKNGKQVCLDPEAPFLKKVIQKILDSGNKKN

SEQ ID NO: 556 - DNA, 387 bp, Homo sapiens
atgagcctcagactcaaagccaccccttcctgtaacagtgccagaccatttcatgccctgcaggtgttgctgcttctgtcactgctgctgaccgctctgccttcctgcaccaatgggcaaagcaagagaaacttagggaaaagcaaagaaagactagctgacagtgacttgtacattgaactgtgctgcgtgtgtgtgaagtcagcctctggaattcatcccagcaacattcatcatttggaagtggtcaggtcaggagccccttgcaacaaagtccaagtgatagccatgctgaaagatgggaggaaaatgtacctggacccagaagctcccagaatcaagaagatagtccagaaaatgttggaaggtgatgggtcaggtgcttaa

SEQ ID NO: 557 - protein, 128 aa, Homo sapiens
MSLRLKATPSCNSARPFHALQVLLLLSLLLTALPSCTNGQSKRNLGKSKERLADSDLYIELCCVCVKSASGIHPSNIHHLEVVRSGAPCNKVQVIAMLKDGRKMYLDPEAPRIKKIVQKMLEGDGSGA

SEQ ID NO: 558 - DNA, 741 bp, Homo sapiens
actgcctgcagaaccccagcccgactttccctgcgcactgggatcctgctggaacctcagctgcaacatgagctccgcagccaggtcccgcctcacccgcgccacccgccaggagatgctgttcttggcgttgctgctcctgccagttgtggtcgccttcgccagagctgaagctgaagaagatggggacctgcagtgcctgtgtgtgaagaccacctcccaggtccgtcccaggcacatcaccagcctggaggtgatcaaggccggaccccactgccccactgcccaactcatagccacgctgaagaatgggaggaaaatttgcttggatctgcaagccctgctgtacaagaaaatcattaaggaacatttggagagttagctactagctgcctaagtgtgcactttcaatctaactgtgaaagaatcttctgatgtttgtattatccttcttatattatattaacaaaataaatcaagttgtggtatagtcaatctatttcttaataatactgcaaaaataatgctgacacatcacaatttcatattttaaaatttccagaattttaagcaaaaagcattatgaaggaaggcttggtttaataaagactgattttgttcagtgttatatgttagctgatacatatttgttcatttatgtgattgcagtactttatagctacatatttaccttgaatgttacaattagcttgccaataaatattagtagctcttaagcat

SEQ ID NO: 559 - protein, 104 aa, Homo sapiens
MSSAARSRLTRATRQEMLFLALLLLPVVVAFARAEAEEDGDLQCLCVKTTSQVRPRHITSLEVIKAGPHCPTAQLIATLKNGRKICLDLQALLYKKIIKEHLES

SEQ ID NO: 560 - DNA, 1103 bp, Homo sapiens
cacagagcccgggccgcaggcacctcctcgccagctcttccgctcctctcacagccgccagacccgcctgctgagccccatggcccgcgctgctctctccgccgcccccagcaatccccggctcctgcgagtggcactgctgctcctgctcctggtagccgctggccggcgcgcagcaggagcgtccgtggccactgaactgcgctgccagtgcttgcagaccctgcagggaattcaccccaagaacatccaaagtgtgaacgtgaagtcccccggaccccactgcgcccaaaccgaagtcatagccacactcaagaatgggcggaaagcttgcctcaatcctgcatcccccatagttaagaaaatcatcgaaaagatgctgaacagtgacaaatccaactgaccagaagggaggaggaagctcactggtggctgttcctgaaggaggccctgcccttataggaacagaagaggaaagagagacacagctgcagaggccacctggattgtgcctaatgtgtttgagcatcgcttaggagaagtcttctatttatttatttattcattagttttgaagattctatgttaatattttaggtgtaaaataattaagggtatgattaactctacctgcacactgtcctattatattcattctttttgaaatgtcaaccccaagttagttcaatctggattcatatttaatttgaaggtagaatgttttcaaatgttctccagtcattatgttaatatttctgaggagcctgcaacatgccagccactgtgatagaggctggcggatccaagcaaatggccaatgagatcattgtgaaggcaggggaatgtatgtgcacatctgttttgtaactgtttagatgaatgtcagttgttatttattgaaatgatttcacagtgtgtggtcaacatttctcatgttgaaactttaagaactaaaatgttctaaatatcccttggacattttatgtctttcttgtaaggcatactgccttgtttaatggtagttttacagtgtttctggcttagaacaaaggggcttaattattgatgttttcatagagaatataaaaataaagcacttatag

SEQ ID NO: 561 - protein, 107 aa, Homo sapiens
MARAALSAAPSNPRLLRVALLLLLLVAAGRRAAGASVATELRCQCLQTLQGIHPKNIQSVNVKSPGPHCAQTEVIATLKNGRKACLNPASPIVKKIIEKMLNSDKSN

SEQ ID NO: 562 - DNA, 1150 bp, Homo sapiens
atgaatgaccagaagaacaagaggaaggtctgggtggaaaactttgagagggtccctggatcaatgtttatctttggtactctagcccactgtcatttatatcaatgtattattggagcaagtcgtaatagcaaaacctgtggatgccaccaaagaagcagcattaaagtctctcttctccctgctgttacatctaagtcagagtctcctaaagaacccgaacagctgaggaagctcttcattggagggttgagctttgaaacaactgatgagagcctaaggagccattttgagcaaaggagaacgctcacggactgtgcggtaatgagagatccaaacacaaagtgctccaagggctttgggttcgtcacatatgccactatggaggaggtggatgcagccatgaatgcaaggccatgcaaggaggatggaagagttataaaaccaaagagagctgtctaagggaagattctcaaagaccaggtgcccacttatctgtgaaaaagatatttgttggtggcattaaagaagacactgaagaacatcacctaagagattattttgaacagtatgagaaaattgaagtgattgaaatcatgactgactgaggcagtggcaagaaaagaggctttgcctttgtaacctttgacgaccatgactccgtggataagactgtcattcagaaataccacactgtgaatggccacagctgtgaagctaggaaagccctgtcaaagcaagaggtggctagtgcttcctctagccaaagaggcgaagtggttctggaaactttggtggtggtcatggaggtggtttcggtggaaatgacaactttggtcatggagaaaacttcaggggtcatagtagctttggtggcagccacggtggtagtggatatggtggcagtggggatgactatagtggatttggtaatgatggaagcaattttggaggtggtggaagctacaatgattttggcaattacagcaatcagtcttcaaattttggacccatgaagggaggaaactttggaggtggaagctctgacccctatgggggtggaggccaatacttggccaaaccacaaaaccaaggtggctatggcggttccagtagcagcagtagctatggcaatggcagaagattttaa

SEQ ID NO: 563 - DNA, 439 bp, Homo sapiens
ccgcagcatgagctccgcagccgggttctgcgcctcacgccccgggctgctgttcctggggttgctgctcctgccacttgtggtcgccttcgccagcgctgaagctgaagaagatggggacctgcagtgcctgtgtgtgaagaccacctcccaggtccgtcccaggcacatcaccagcctggaggtgatcaaggccggaccccactgccccactgcccaactgatagccacgctgaagaatggaaggaaaatttgcttggacctgcaagccccgctgtacaagaaaataattaagaaacttttggagagttagctactagctgcctacgtgtgtgcatttgctatatagcatacttcttttttccagtttcaatctaactgtgaaagaaacttctgatatttgtgttatccttatgattttaaataaacaaaataaatc

SEQ ID NO: 564 - protein, 101 aa, Homo sapiens
MSSAAGFCASRPGLLFLGLLLLPLVVAFASAEAEEDGDLQCLCVKTTSQVRPRHITSLEVIKAGPHCPTAQLIATLKNGRKICLDLQAPLYKKIIKKLLES

SEQ ID NO: 565 - DNA, 715 bp, Homo sapiens
tgcagacttgtaggcagcaactcaccctcactcagaggtcttctggttctggaaacaactctagctcagccttctccaccatgagcctcagacttgataccaccccttcctgtaacagtgcgagaccacttcatgccttgcaggtgctgctgcttctgtcattgctgctgactgctctggcttcctccaccaaaggacaaactaagagaaacttggcgaaaggcaaagaggaaagtctagacagtgacttgtatgctgaactccgctgcatgtgtataaagacaacctctggaattcatcccaaaaacatccaaagtttggaagtgatcgggaaaggaacccattgcaaccaagtcgaagtgatagccacactgaaggatgggaggaaaatctgcctggacccagatgctcccagaatcaagaaaattgtacagaaaaaattggcaggtgatgaatctgctgattaatttgttctgtttctgccaaacttctttaactcccaggaagggtagaattttgaaaccttgattttctagagttctcatttattcaggatacctattcttactgtattaaaatttggatatgtgtttcattctgtctcaaaaatcacattttattctgagaaggttggttaaaagatggcagaaagaagatgaaaataaataagcctggtttcaaccctctaattcttgcctaaaaaaaaaaaaaaaaa

SEQ ID NO: 566 - protein, 128 aa, Homo sapiens
MSLRLDTTPSCNSARPLHALQVLLLLSLLLTALASSTKGQTKRNLAKGKEESLDSDLYAELRCMCIKTTSGIHPKNIQSLEVIGKGTHCNQVEVIATLKDGRKICLDPDAPRIKKIVQKKLAGDESAD

SEQ ID NO: 567 - DNA, 2475 bp, Homo sapiens
gtgcagaaggcacgaggaagccacagtgctccggatcctccaatcttcgctcctccaatctccgctcctccacccagttcaggaacccgcgaccgctcgcagcgctctcttgaccactatgagcctcctgtccagccgcgcggcccgtgtccccggtccttcgagctccttgtgcgcgctgttggtgctgctgctgctgctgacgcagccagggcccatcgccagcgctggtcctgccgctgctgtgttgagagagctgcgttgcgtttgtttacagaccacgcaaggagttcatcccaaaatgatcagtaatctgcaagtgttcgccataggcccacagtgctccaaggtggaagtggtagcctccctgaagaacgggaaggaaatttgtcttgatccagaagccccttttctaaagaaagtcatccagaaaattttggacggtggaaacaaggaaaactgattaagagaaatgagcacgcatggaaaagtttcccagtcttcagcagagaagttttctggaggtctctgaacccagggaagacaagaaggaaagattttgttgttgtttgtttatttgtttttccagtagttagctttcttcctggattcctcactttgaagagtgtgaggaaaacctatgtttgccgcttaagctttcagctcagctaatgaagtgtttagcatagtacctctgctatttgctgttattttatctgctatgctattgaagttttggcaattgactatagtgtgagccaggaatcactggctgttaatctttcaaagtgtcttgaattgtaggtgactattatatttccaagaaatattccttaagatattaactgagaaggctgtggatttaatgtggaaatgatgtttcataagaattctgttgatggaaatacactgttatcttcacttttataagaaataggaaatattttaatgtttcttggggaatatgttagagaatttccttactcttgattgtgggatactatttaattatttcactttagaaagctgagtgtttcacaccttatctatgtagaatatatttccttattcagaatttctaaaagtttaagttctatgagggctaatatcttatcttcctataattttagacattctttatctttttagtatggcaaactgccatcatttacttttaaactttgattttatatgctatttattaagtattttattaggagtaccataattctggtagctaaatatatattttagatagatgaagaagctagaaaacaggcaaattcctgactgctagtttatatagaaatgtattcttttagtttttaaagtaaaggcaaacttaacaatgacttgtactctgaaagttttggaaacgtattcaaacaatttgaatataaatttatcatttagttataaaaatatatagcgacatcctcgaggccctagcatttctccttggataggggaccagagagagcttggaatgttaaaaacaaaacaaaacaaaaaaaaacaaggagaagttgtccaagggatgtcaattttttatccctctgtatgggttagattttccaaaatcataatttgaagaaggccagcatttatggtagaatatataattatatataaggtggccacgctggggcaagttccctccccactcacagctttggcccctttcacagagtagaacctgggttagaggattgcagaagacgagcggcagcggggagggcagggaagatgcctgtcgggtttttagcacagttcatttcactgggattttgaagcatttctgtctgaatgtaaagcctgttctagtcctggtgggacacactggggttgggggtgggggaagatgcggtaatgaaaccggttagtcagtgttgtcttaatatccttgataatgctgtaaagtttatttttacaaatatttctgtttaagctatttcacctttgtttggaaatccttcccttttaaagagaaaatgtgacacttgtgaaaaggcttgtaggaaagctcctccctttttttctttaaacctttaaatgacaaacctaggtaattaatggttgtgaatttctatttttgctttgtttttaatgaacatttgtctttcagaataggattctgtgataatatttaaatggcaaaaacaaaacataattttgtgcaattaacaaagctactgcaagaaaaataaaacatttcttggtaaaaacgtatgtatttatatattatatatttatatataatatatattatatatttagcattgctgagctttttagatgcctattgtgtatcttttaaaggttttgaccattttgttatgagtaattacatatatattacattcactatattaaaattgtacttttttactatgtgtctcattggttcatagtctttattttgtcctttgaataaacattaaaagatttctaaacttcaaaaaaaaaaaaaaaaaa

SEQ ID NO: 568 - protein, 114 aa, Homo sapiens
MSLLSSRAARVPGPSSSLCALLVLLLLLTQPGPIASAGPAAAVLRELRCVCLQTTQGVHPKMISNLQVFAIGPQCSKVEVVASLKNGKEICLDPEAPFLKKVIQKILDGGNKEN

SEQ ID NO: 569 - DNA, 3024 bp, Homo sapiens
atggaagttttccccttgctcttggttttgtccgtctggtggtctcgaacctgggactcggcgaatgcggattcgatcattcacatcggagcaatttttgatgaatctgccaaaaaggatgatgaggtatttcgcactgcggttggtgaccttaaccagaatgaagagatcttacagactgagaaaatcacattttcagtgacgtttgttgatggcaacaaccctttccaagcagttcaagaagcctgtgaacttatgaatcaaggcatcttggccctggtcagctccattggctgcacgtcagcaggatccctccagtctttggcagacgccatgcatatcccccacctcttcattcagcgctcaacagctgggaccccaaggagtggctgtggactcacccggagcaacaggaatgatgactacactctctcagttcgcccacctgtctacttgcatgatgttatcctaagagtggtcacagagtatgcctggcagaaattcattatattctatgatagtgaatacgatatccgtggaatacaggagttcttggacaaagtctctcagcagggaatggatgttgcacttcagaaggtagaaaacaacatcaataaaatgattaccactctctttgacaccatgagaatagaagaactgaatcgctatcgagacactcttaggcgagcgatccttgttatgaatcctgctacagccaaatccttcattactgaggttgtggagactaatttggttgcttttgactgtcactggatcattataaatgaggaaataaacgatgtggacgtacaggaacttgtaagaaggtcaattggaaggttaacgattattcggcagacatttccaattccccagaacataagtcagcggtgtttccgtggcaaccatcgaatatcttcaacattgtgtgatccaaaggatccatttgctcagaatatggagatttccaacctttacatatatgacacggtgcttctgcttgctaatgcttttcataagaagctggaggaccgaaagtggcacagcatggcaagtctgtcatgtatcagaaagaactcaaagccctggcagggtgggcgctccatgttggagaccatcaagaagggtggagttagtgggttgactggagagctagaatttggagaaaatggaggcaatcccaatgtccactttgaaatccttggaaccaactatggagaagagcttggcagaggtgttcgaaaacttgggtgctggaatcctgtcacaggtctgaatgggtcactgactgacaagaaattggagaataacatgcgtggagtggttctacgtgtagtaactgttctggaagaaccttttgtgatggtctctgaaaatgtcttgtgtaagccgaagaaataccagggcttctccattgatgttttggatgccttatctaactacctgggttttaactacgaaatttacgtagcaccggatcacaaatacggaagcccacaagaagatgggacatggaatggcttggtaggagaacttgtctttaagagagccgacatagggatttctgctttaaccatcactccagatcgtgaaaatgtggtggactttacgacacgttacatggactactcagtgggggtactacttcgaagggctgaaaagacagtggatatgtttgcctgtcttgcaccatttgatctctctctatgggcttgcattgctggcacagtccttctggtgggtctactggtctacctcttgaactggcttaatcccccacgattacaaatgggatcaatgacgtctactactctctacaactccatgtggtttgtgtatggatcttttgtacaacaaggcggggaagtcccgtacacgactctggctacccgaatgatgatgggggcttggtggctatttgctttgattgttatctcatcttacacggcaaacctcgctgctttcctcactattacacgcattgaaagttccatccagtctctccaggacctttccaagcaaacagaaatcccttatggcacagtcctagactctgcggtatatgagcatgtccgcatgaaaggactgaatccttttgagagggacagcatgtattcccaaatgtggcggatgatcaaccgaagcaatggatcggagaacaatgttctggagtcccaggcaggcattcaaaaggtaaaatatggaaattatgctttcgtatgggatgcagctgtattggaatatgtggctatctatgacccagattgttccttttacaccattggaaatactgttgctgatcggggatatggaattgcattacaacatggcagtccttaccgagatgttttttcacaaaggatcctggagcttcagcagaatggtgacatggacatcctgaagcacaaatggtggcctaagaatggccagtgtgacctgtactcgtcagtggacacaaagcagaaaggaggcgccctggacataaagagctttgcaggggtcttttgtatcctggctgctggaattgtcctctcctgcttcatagccatgctggagacgtggtggaacaagaggaaaggctcccgggttccatcaaaagaggatgacaaggaaattgacctggagcacctccatagacgtgtaaatagcttgtgcacagatgacgacagcccccataaacagttttccacctcgtcaattgatttgacccctctggacattgacactttgccaacacgacaagcactggagcaaatcagtgatttcaggaacactcatattaccacaacaacctttatcccagagcagatccagactcttagccgcacactgtcagctaaagctgcttctggtttcacttttggcaacgtgcctgagcaccgaactggcccttttaggcacagggcacctaatgggggctttttcaggagtcctataaaaacaatgtcatctattccttatcaaccaactcctaccctggggctcaatctgggtaatgatccagaccgaggcacctccatatga

SEQ ID NO: 570 - protein, 1007 aa, Homo sapiens
MEVFPLLLVLSVWWSRTWDSANADSIIHIGAIFDESAKKDDEVFRTAVGDLNQNEEILQTEKITFSVTFVDGNNPFQAVQEACELMNQGILALVSSIGCTSAGSLQSLADAMHIPHLFIQRSTAGTPRSGCGLTRSNRNDDYTLSVRPPVYLHDVILRVVTEYAWQKFIIFYDSEYDIRGIQEFLDKVSQQGMDVALQKVENNINKMITTLFDTMRIEELNRYRDTLRRAILVMNPATAKSFITEVVETNLVAFDCHWIIINEEINDVDVQELVRRSIGRLTIIRQTFPIPQNISQRCFRGNHRISSTLCDPKDPFAQNMEISNLYIYDTVLLLANAFHKKLEDRKWHSMASLSCIRKNSKPWQGGRSMLETIKKGGVSGLTGELEFGENGGNPNVHFEILGTNYGEELGRGVRKLGCWNPVTGLNGSLTDKKLENNMRGVVLRVVTVLEEPFVMVSENVLCKPKKYQGFSIDVLDALSNYLGFNYEIYVAPDHKYGSPQEDGTWNGLVGELVFKRADIGISALTITPDRENVVDFTTRYMDYSVGVLLRRAEKTVDMFACLAPFDLSLWACIAGTVLLVGLLVYLLNWLNPPRLQMGSMTSTTLYNSMWFVYGSFVQQGGEVPYTTLATRMMMGAWWLFALIVISSYTANLAAFLTITRIESSIQSLQDLSKQTEIPYGTVLDSAVYEHVRMKGLNPFERDSMYSQMWRMINRSNGSENNVLESQAGIQKVKYGNYAFVWDAAVLEYVAIYDPDCSFYTIGNTVADRGYGIALQHGSPYRDVFSQRILELQQNGDMDILKHKWWPKNGQCDLYSSVDTKQKGGALDIKSFAGVFCILAAGIVLSCFIAMLETWWNKRKGSRVPSKEDDKEIDLEHLHRRVNSLCTDDDSPHKQFSTSSIDLTPLDIDTLPTRQALEQISDFRNTHITTTTFIPEQIQTLSRTLSAKAASGFTFGNVPEHRTGPFRHRAPNGGFFRSPIKTMSSIPYQPTPTLGLNLGNDPDRGTSI

SEQ ID NO: 571 - DNA, 1065 bp, Homo sapiens
atgtcccgcctgctgcatgcagaagagtgggctgaagtgaaggagttgggagaccaccatcgccagccccagccgcatcatctcccgcaaccgccgccgccgccgcagccacctgcaactttgcaggcgagagagcatcccgtctacccgcctgagctgtccctcctggacagcaccgacccacgcgcctggctggctcccactttgcagggcatctgcacggcacgcgccgcccagtatttgctacattccccggagctgggtgcctcagaggccgctgcgccccgggacgaggtggacggccggggggagctggtaaggaggagcagcggcggtgccagcagcagcaagagccccgggccggtgaaagtgcgggaacagctgtgcaagctgaaaggcggggtggtggtagacgagctgggctgcagccgccaacgggccccttccagcaaacaggtgaatggggtgcagaagcagagacggctagcagccaacgccagggagcggcgcaggatgcatgggctgaaccacgccttcgaccagctgcgcaatgttatcccgtcgttcaacaacgacaagaagctgtccaaatatgagaccctgcagatggcccaaatctacatcaacgccttgtccgagctgctacaaacgcccagcggaggggaacagccaccgccgcctccagcctcctgcaaaagcgaccaccaccaccttcgcaccgcggcctcctatgaagggggcgcgggcaacgcgaccgcagctggggctcagcaggcttccggagggagccagcggccgaccccgcccgggagttgccggactcgcttctcagccccagcttctgcgggagggtactcggtgcagctggacgctctgcacttctcgactttcgaggacagcgccctgacagcgatgatggcgcaaaagaatttgtctccttctctccccgggagcatcttgcagccagtgcaggaggaaaacagcaaaacttcgcctcggtcccacagaagcgacggggaattttccccccattcccattacagtgactcggatgaggcaagttag

SEQ ID NO: 572 - protein, 354 aa, Homo sapiens
MSRLLHAEEWAEVKELGDHHRQPQPHHLPQPPPPPQPPATLQAREHPVYPPELSLLDSTDPRAWLAPTLQGICTARAAQYLLHSPELGASEAAAPRDEVDGRGELVRRSSGGASSSKSPGPVKVREQLCKLKGGVVVDELGCSRQRAPSSKQVNGVQKQRRLAANARERRRMHGLNHAFDQLRNVIPSFNNDKKLSKYETLQMAQIYINALSELLQTPSGGEQPPPPPASCKSDHHHLRTAASYEGGAGNATAAGAQQASGGSQRPTPPGSCRTRFSAPASAGGYSVQLDALHFSTFEDSALTAMMAQKNLSPSLPGSILQPVQEENSKTSPRSHRSDGEFSPHSHYSDSDEAS

SEQ ID NO: 573 - DNA, 1699 bp, Homo sapiens
gctggcccaggtgagcgggcgcgctggtccaggtgagcgggcgcgtccccgcgacggcgctgcctgcccgaggcggttcacgtaaagacagcgagatcctgagggccagccgggaaggaggcgtggatatggagctggctgctgccaagtccggggcccgcgccgctgcctagcgcgtcctggggactctgtggggacgcgccccgcgccgcggctcggggacccgtagagcccggcgctgcgcgcatggccctgctctcgcgccccgcgctcaccctcctgctcctcctcatggccgctgttgtcaggtgccaggagcaggcccagaccaccgactggagagccaccctgaagaccatccggaacggcgttcataagatagacacgtacctgaacgccgccttggacctcctgggaggcgaggacggtctctgccagtataaatgcagtgacggatctaagcctttcccacgttatggttataaaccctccccaccgaatggatgtggctctccactgtttggtgttcatcttaacattggtatcccttccctgacaaagtgttgcaaccaacacgacaggtgctatgagacctgtggcaaaagcaagaatgactgtgatgaagaattccagtattgcctctccaagatctgccgagatgtacagaaaacactaggactaactcagcatgttcaggcatgtgaaacaacagtggagctcttgtttgacagtgttatacatttaggttgtaaaccatatctggacagccaacgagccgcatgcaggtgtcattatgaagaaaaaactgatctttaaaggagatgccgacagctagtgacagatgaagatggaagaacatacctttgacaaataactaatgtttttacaacataaaactgtcttatttttgtgaaaggattattttgagaccttaaaataatttatatcttgatgttaaaacctcaaagcaaaaaaagtgagggagatagtgaggggagggcacgcttgtcttctcaggtatcttccccagcattgctcccttacttagtatgccaaatgtcttgaccaatatcaaaaacaagtgcttgtttagcggagaattttgaaaagaggaatatataactcattttcacaaccacatttaccaaaaaaagagatcaaatataaaattcatcataatgtctgttcaacattatcttatttggaaaatggggaaattatcacttacaagtatttgtttactatgaaattttaaatacacatttatgcctagaaggaacggacttttttttttctattttaattacacataatatgtaattaaagtacaacataatatgttgtttctctgtagcccgttgagcatatgagtaagtcacatttctattaggactacttacaaggacaaggtttccatttttccagttgtaaaattggaaccatcagctgataacctcgtagggagcaaccccaggatagctaagtgttatgtaatatgcctagaaggtgatgtgaatgcgattcagaagcatagccactcccattttatgagctactcacatgacaaatgtcatcttttgctataacctttgccaagttagagaaaagatggatttaatgagataaatgaaaagatatttaacctaatatatcaaggcaaaaaaaaaaaaaaaaaaaaaaaaaaaaaaaaaaaaaaaaa

SEQ ID NO: 574 - protein, 189 aa, Homo sapiens
MALLSRPALTLLLLLMAAVVRCQEQAQTTDWRATLKTIRNGVHKIDTYLNAALDLLGGEDGLCQYKCSDGSKPFPRYGYKPSPPNGCGSPLFGVHLNIGIPSLTKCCNQHDRCYETCGKSKNDCDEEFQYCLSKICRDVQKTLGLTQHVQACETTVELLFDSVIHLGCKPYLDSQRAACRCHYEEKTDL

SEQ ID NO: 575 - DNA, 1963 bp, Homo sapiens
cgaacacctccaacatgaagcttcttcatgttttcctgttatttctgtgcttccacttaaggttttgcaaggtcacttatacatctcaagaggatctggtggagaaaaagtgcttagcaaaaaaatatactcacctctcctgcgataaagtcttctgccagccatggcagagatgcattgagggcacctgtgtttgtaaactaccgtatcagtgcccaaagaatggcactgcagtgtgtgcaactaacaggagaagcttcccaacatactgtcaacaaaagagtttggaatgtcttcatccagggacaaagtttttaaataacggaacatgcacagccgaaggaaagtttagtgtttccttgaagcatggaaatacagattcagagggaatagttgaagtaaaacttgtggaccaagataagacaatgttcatatgcaaaagcagctggagcatgagggaagccaacgtggcctgccttgaccttgggtttcaacaaggtgctgatactcaaagaaggtttaagttgtctgatctctctataaattccactgaatgtctacatgtgcattgccgaggattagagaccagtttggctgaatgtacttttactaagagaagaactatgggttaccaggatttcgctgatgtggtttgttatacacagaaagcagattctccaatggatgacttctttcagtgtgtgaatgggaaatacatttctcagatgaaagcctgtgatggtatcaatgattgtggagaccaaagtgatgaactgtgttgtaaagcatgccaaggcaaaggcttccattgcaaatcgggtgtttgcattccaagccagtatcaatgcaatggtgaggtggactgcattacaggggaagatgaagttggctgtgcaggctttgcatctgtggctcaagaagaaacagaaattttgactgctgacatggatgcagaaagaagacggataaaatcattattacctaaactatcttgtggagttaaaaacagaatgcacattcgaaggaaacgaattgtgggaggaaagcgagcacaactgggagacctcccatggcaggtggcaattaaggatgccagtggaatcacctgtgggggaatttatattggtggctgttggattctgactgctgcacattgtctcagagccagtaaaactcatcgttaccaaatatggacaacagtagtagactggatacaccccgaccttaaacgtatagtaattgaatacgtggatagaattattttccatgaaaactacaatgcaggcacttaccaaaatgacatcgctttgattgaaatgaaaaaagacggaaacaaaaaagattgtgagctgcctcgttccatccctgcctgtgtcccctggtctccttacctattccaacctaatgatacatgcatcgtttctggctggggacgagaaaaagataacgaaagagtcttttcacttcagtggggtgaagttaaactaataagcaactgctctaagttttacggaaatcgtttctatgaaaaagaaatggaatgtgcaggtacatatgatggttccatcgatgcctgtaaaggggactctggaggccccttagtctgtatggatgccaacaatgtgacttatgtctggggtgttgtgagttggggggaaaactgtggaaaaccagagttcccaggtttttacaccaaagtggccaattattttgactggattagctaccatgtaggaaggccttttatttctcagtacaatgtataaaattgtgatctctctcttcattctattctttttctctcaagagttccatttaatggaaataaaacggtataattaataattctctaggggggaaaaatgaagcaaatctcattggatatttttaaaggtctccacagagtttatgccatattggaattttgttgtataattctcaaataaatattttggtgaagcat

SEQ ID NO: 576 - protein, 583 aa, Homo sapiens
MKLLHVFLLFLCFHLRFCKVTYTSQEDLVEKKCLAKKYTHLSCDKVFCQPWQRCIEGTCVCKLPYQCPKNGTAVCATNRRSFPTYCQQKSLECLHPGTKFLNNGTCTAEGKFSVSLKHGNTDSEGIVEVKLVDQDKTMFICKSSWSMREANVACLDLGFQQGADTQRRFKLSDLSINSTECLHVHCRGLETSLAECTFTKRRTMGYQDFADVVCYTQKADSPMDDFFQCVNGKYISQMKACDGINDCGDQSDELCCKACQGKGFHCKSGVCIPSQYQCNGEVDCITGEDEVGCAGFASVAQEETEILTADMDAERRRIKSLLPKLSCGVKNRMHIRRKRIVGGKRAQLGDLPWQVAIKDASGITCGGIYIGGCWILTAAHCLRASKTHRYQIWTTVVDWIHPDLKRIVIEYVDRIIFHENYNAGTYQNDIALIEMKKDGNKKDCELPRSIPACVPWSPYLFQPNDTCIVSGWGREKDNERVFSLQWGEVKLISNCSKFYGNRFYEKEMECAGTYDGSIDACKGDSGGPLVCMDANNVTYVWGVVSWGENCGKPEFPGFYTKVANYFDWISYHVGRPFISQYNV

SEQ ID NO: 577 - DNA, 1280 bp, Homo sapiens
ccgctgttatacgtcacttccacggctcagcgtcaggcaagttggcctctctgttgtaaattagtggttaaggttatctattattgccacttttccagcgctaaaggctgttttggaaccagtgttgcttgttccgcgggtgattggcttttttttttggcaaaccagttattcaagtttctggtctttaaaaaactctgtggcggtacggtaaccgaggaggttccagcgcggcggaagtaccccgcgggtgggtgtgtgcgcaaggccagggccagaggggcacgtggcgccgggaggagagagaatgtcttttcgaggcggaggtcgtggaggctttaatcgaggtggtggaggtggcggcttcaaccgaggtggcagcagcaaccacttccgaggtggaggcggcggtggaggcggcggcaatttcagaggcggcggcaggggaggatttggacgagggggtggccgcggaggctttaacaaaggccaagaccaaggacctccagaacgtgtagtcttattaggagagttcctgcatccctgtgaagatgacatagtttgtaaatgtaccacagatgaaaataaggtgccttatttcaatgctcctgtttacttagaaaacaaagaacaaattggaaaagtggatgaaatatttggacaactcagagatttttatttttcagttaagttgtcagaaaacatgaaggcttcatcctttaaaaaactacagaagttttatatagacccatataagctgctgccactgcagaggtttttacctcgacctccaggtgagaaaggacctccaagaggtggtggcaggggaggccgaggaggaggaagaggaggaggtggcagaggtggtggcagaggcggtggttttagaggtggaagaggaggtggaggtgggggcttcagaggaggaagaggtggtggtttcagagggagaggacattaagtgaaacagttgacagacatcaccagttgacttctgcattaacctgcatgatctgtttctactatggattggaaacttgtttcttgaacaagtcttgaagatcttggtcattttatgacaatggatctaaaatgtcagcatcatgcaaagtgcaacggaatagtgaattttgctctaaaagagcatgaacaagtctttctaatgttttgtacagtgcctggcactctgtgggtgctcaataaatggataggagttttcatttgaagcatatttgaatttttaaaataaagtgttttattcccttaaaaaaaaaaaaaaa

SEQ ID NO: 578 - protein, 217 aa, Homo sapiens
MSFRGGGRGGFNRGGGGGGFNRGGSSNHFRGGGGGGGGGNFRGGGRGGFGRGGGRGGFNKGQDQGPPERVVLLGEFLHPCEDDIVCKCTTDENKVPYFNAPVYLENKEQIGKVDEIFGQLRDFYFSVKLSENMKASSFKKLQKFYIDPYKLLPLQRFLPRPPGEKGPPRGGGRGGRGGGRGGGGRGGGRGGGFRGGRGGGGGGFRGGRGGGFRGRGH

SEQ ID NO: 579 - DNA, 1021 bp, Homo sapiens
ccgctgttatacgtcacttccacggctcagcgtcagggaggagagagaatgtcttttcgaggcggaggtcgtggaggctttaatcgaggtggtggaggtggcggcttcaaccgaggtggcagcagcaaccacttccgaggtggaggcggcggtggaggcggcggcaatttcagaggcggcggcaggggaggatttggacgagggggtggccgcggaggctttaacaaaggccaagaccaaggacctccagaacgtgtagtcttattaggagagttcctgcatccctgtgaagatgacatagtttgtaaatgtaccacagatgaaaataaggtgccttatttcaatgctcctgtttacttagaaaacaaagaacaaattggaaaagtggatgaaatatttggacaactcagagatttttatttttcagttaagttgtcagaaaacatgaaggcttcatcctttaaaaaactacagaagttttatatagacccatataagctgctgccactgcagaggtttttacctcgacctccaggtgagaaaggacctccaagaggtggtggcaggggaggccgaggaggaggaagaggaggaggtggcagaggtggtggcagaggcggtggttttagaggtggaagaggaggtggaggtgggggcttcagaggaggaagaggtggtggtttcagagggagaggacattaagtgaaacagttgacagacatcaccagttgacttctgcattaacctgcatgatctgtttctactatggattggaaacttgtttcttgaacaagtcttgaagatcttggtcattttatgacaatggatctaaaatgtcagcatcatgcaaagtgcaacggaatagtgaattttgctctaaaagagcatgaacaagtctttctaatgttttgtacagtgcctggcactctgtgggtgctcaataaatggataggagttttcatttgaagcatatttgaatttttaaaataaagtgttttattcccttaaaaaaaaaaaaaaa

SEQ ID NO: 580 - protein, 217 aa, Homo sapiens; identical to SEQ ID NO: 578

SEQ ID NO: 581 - DNA, 1558 bp, Homo sapiens
attatgaagggtgtttcggtatcttccctccaaaatgctaagaaataatttaggcaacagttcagactctaaaaatgaagatggctcggtcttttcacagactgaacacaatattgttgcaacttacttgattatggcaggtatgataagtattatcagcaacataatagttctgggcatcttcattaagtacaaggaacttcggacacccacaaatgcaattattattaacctggctgttactgatataggggtcagtagcattggctatcccatgtctgctgcctcagatctgtatggaagttggaaatttggatacgcaggctgtcaggtttatgctggattgaatattttttttggaatggcaagcattggattactcacggtcgtggctgtggaccgatacctgaccatctgccttcctgacgtagggagaagaatgaccaccaacacttacatcggcttgattctgggagcctggatcaatggcctgttttgggctttgatgcctatcatagggtgggctagttatgccccagatcctactggtgctacgtgtaccataaactggaggaaaaatgatagatcttttgtgtcttacaccatgacagttattgcgataaattttattgtgcccttgacagtgatgttttactgctattaccatgtcacgctatccattaaacatcacactaccagtgactgcactgagtccctcaacagagactggtcagatcagatagatgtaacaaagatgtctgtgatcatgatctgcatgtttctggtggcatggtccccttattccatcgtgtgcttatgggcttcttttggtgacccaaagaagattcctccccccatggccatcatagctccactgtttgcaaaatcttctacattctataacccctgcatttatgtggttgctaataaaaagtttcggagggcaatgcttgccatgttcaaatgtcagactcaccaaacaatgcctgtgacaagtattttacccatggatgtatctcaaaacccattggcttctggaagaatctgaaataagataaaaggacacactatcaaaacactttagttttttgacaatgcttttcttttaaatatgagcccatttagatcaagtgcagacatggatcattgtcctatgagagtgtaagctcctcaagcacagctcgtgcttctgtttgtgcactctggctgctgtagtgtatgcttctctgtgtcctgatatatcaacttattgctcatctcctttgatgaattaggcatcagaggttaaggtcccctttctttctccctattatggcatgcattacactgtactgatgacctttaacttgcctggctcctccattagaataaaagcagtcactaatttaatgttagaataaatgaataattctagataattactgaaatgagttgttggatgttcccagttagaatagaaagcattttttgaatttcaacattttaacatttaaatcaattaacttatgttattaaacaaaaataaatgaacattaaacatgattgtttctaaataaaa

SEQ ID NO: 582 - protein, 337 aa, Homo sapiens
MLRNNLGNSSDSKNEDGSVFSQTEHNIVATYLIMAGMISIISNIIVLGIFIKYKELRTPTNAIIINLAVTDIGVSSIGYPMSAASDLYGSWKFGYAGCQVYAGLNIFFGMASIGLLTVVAVDRYLTICLPDVGRRMTTNTYIGLILGAWINGLFWALMPIIGWASYAPDPTGATCTINWRKNDRSFVSYTMTVIAINFIVPLTVMFYCYYHVTLSIKHHTTSDCTESLNRDWSDQIDVTKMSVIMICMFLVAWSPYSIVCLWASFGDPKKIPPPMAIIAPLFAKSSTFYNPCIYVVANKKFRRAMLAMFKCQTHQTMPVTSILPMDVSQNPLASGRI

SEQ ID NO: 583 - DNA, 3781 bp, Homo sapiens
cttagaccttggttagatttgaaccaaggccctcctcggcctcccaaagtgctgggattacaggcgtgagccactgcccagctgaaaattgatacatttttcaaatgagaagtatttttttcaaatgggtgttggaaagtgagtttcctcacattgttcatgttgtgacactaggttggtgctatgtaatgacatggatatgaacgagctgcctacgaacctccccgtggacactgtgaagcttcgcatagagaagactgtcatccgcagaatctctgcggaggccttctattacctggtggagctccagtatctctgggtgacttacaattccgtggccagcattgaccccagcagcttttacaacctgaagcaactgcatgagttgcgcttggatgggaattctctggctgctttcccttgggcatctctgctggacatgccccttctgaggaccctggacttgcacaataacaaaataaccagtgtgccaaatgaggcgctcaggtatctgaagaaccttgcctacttggatttatcaagcaacagactcaccacattgccaccagatttcctggagaactggactcatttagtttcaacaccttctggagtcctggacctttccccaagcaggattattcttggctgatagaacgttatggctgtaaaaagctctagcatttatctagtcaactctcccattttgccgatgagaaaacaggctcagcaaggttgcatcacccaggtcacagaattaactaatggttgagcctcatcaggaacccaggcacagtaaagttggtctacaggacaatccttggttctgtgactgtcatatttccaaaatgattgagttgtcaaaggtcgttgaccctgctatagtgcttctggatccactgatgacttgcagtgaacctgagcgcctcacaggaattttgtttcagcgggctgaattggagcattgtctgaaaccatcagtgatgacctcagccaccaaaatcatgtctgctctgggcagtaatgttctactgcggtgtgatgccactggcttccccaccccacagatcacatggaccagatctgacagctcgccagttaattatacagtaatacaagaatctccagaggaaggagtcagatggtccataatgagcttgacaggcatttcttccaaagacgctggggattacaaatgtaaggccaaaaatctggctgggttgtcagaagctgtggttactgtgacagtgcttggcattaccacaactccaataccaccagacacttctgaaagaactggagatcatcctgagtgggatgtccagccgggatctggaagatctacatctgtatctagcgcatcatcatatctttggtcctcttccttctcccccacatcttctttttctgcttctactttgtctcctccctctactgcttccttctctttatctcctttctcctcctccactgtttcttcaaccacaactctgagcacaagcatctcagcaagtaccaccatggccaacaagcgatcattccagctccaccaaggtgggaaaagaaatttaaaggtggcaaagaatggaagtaagcttcctccagccagcacaagtaagaaagaagagctggcattgttggatcaaacaatgcttacggagacaaatgccgcaatagaaaacctcagggtggtcagtgagactaaagagagtgtgacattgacgtggaatatgatcaacaccacacataactctgcagtgactgtgttgtattccaagtatggtgggaaggacctgctgctgttgaatgcagactccagcaagaaccaagtaaccatagatggcttggaacccggtgggcaatacatggcctgtgtctgtccaaaaggagtgcctccccagaaagaccaatgcatcaccttttctactgaaagagttgaaggagatgattctcaatggtctctccttctcgtggtgaccagtactgcctgtgttgttatcttaccattgatttgtttcttgttgtacaaagtttgcaaactgcaatgtaaatcagaacctttttgggaagatgatttggcaaaggagacttatatccaatttgagaccctgtttcccaggtctcaaagtgtaggtgagctctggacacgaagccacagggatgactcagagaaattgctgctttgttctaggtcaagtgtggaatctcaggtgacttttaaaagtgaaggttccagaccagagtattattgctaaggttctgcagctcaggtgcatgtgagctacaaaactagcatctaagggtataattgaccctaggtttggatgacttttggacagactttcacattgtacatgaaaatcacaaatggaatgcttttaagtatgtttaaaaaataccatgagacctctgaactgaaaagacaaataatgttgatttttttttcttgtgtggaaaaggtctacagaaataatttttagagtggtgcttaataaattattaatactttttagggtaatgttttagttcttaaaaataagttcatgtgaaagtagcaagtgaactctgtatttaaaaatatagttttttgagtcatgaggaaacattagcaaaaccagctaagccttgatgtttattcatgttcgaagtgcattatagcatttgctgtggatgttttctgacattgcctaatggagagcgtgggatcataaaggattttgtgttcactaaggttaaatctaactcacgggagagagagggctctgtctcttggtaccattatgcattgtgatactatagagttgtgttcatatttcttgtaagaaaaatttttgcttttctttagaaatataggtattagcaaaagtaagtatacaaagaggattatgacaaatagaccatttctttaaaaatggtaactgttgcatttaaacacatcggctgacagattatatggatatttaaaaataactttaaatcaatcttttaatattttgctgtttgctcttatgttctcccttctttcttccttccttgtcttccctccctttccttccttcattctttctttcttctgctctgtcagaagatatacaagtagccaaagcatcacgagccaagctgtttgtcttttgccatattgtcttttgattctcttgataaagagaaagcttttgaaattacttactgccctttgaaagtctgttttacaaccccaaaggatattttaggactttaaaagggaagcttcagtggattcatttggttagattcttttcctaggttaaaaacatcggggaacttaaatacataggaaaggagttcacaaataaaatttagtttttttagaaagagaatattttaataactgtagtataccacaagaaacatctcatggctttaagattaacgatagcgataaggcccactcaagcatctcacagtggtgatattacatgtcacttagcaggatgcaacctggcctagggatttccagaagacaaggccacctcagcacagatgcaactttcataaattttagaacaaagcctaaccttactagattaaacttgctctatgaaagaaacacttggtaattgacccagactgaatacatgtataagaaatgggaaagatctcccaaactctgagaacggtcctcaaatagaagctctcctagtcagttggtcatctgacctctgactatatccggcctatgacaccagccagctcctgctttctgtcttgtaagagcactgctggaataaactacttgagcatt

SEQ ID NO: 584 - protein, 496 aa, Homo sapiens
MVEPHQEPRHSKVGLQDNPWFCDCHISKMIELSKVVDPAIVLLDPLMTCSEPERLTGILFQRAELEHCLKPSVMTSATKIMSALGSNVLLRCDATGFPTPQITWTRSDSSPVNYTVIQESPEEGVRWSIMSLTGISSKDAGDYKCKAKNLAGLSEAVVTVTVLGITTTPIPPDTSERTGDHPEWDVQPGSGRSTSVSSASSYLWSSSFSPTSSFSASTLSPPSTASFSLSPFSSSTVSSTTTLSTSISASTTMANKRSFQLHQGGKRNLKVAKNGSKLPPASTSKKEELALLDQTMLTETNAAIENLRVVSETKESVTLTWNMINTTHNSAVTVLYSKYGGKDLLLLNADSSKNQVTIDGLEPGGQYMACVCPKGVPPQKDQCITFSTERVEGDDSQWSLLLVVTSTACVVILPLICFLLYKVCKLQCKSEPFWEDDLAKETYIQFETLFPRSQSVGELWTRSHRDDSEKLLLCSRSSVESQVTFKSEGSRPEYYC

SEQ ID NO: 585 - DNA, 2140 bp, Homo sapiens
gcggccgctgggctcaggctgtccgctctgggctccgcggcctcggccccgctgcactccacctccgccccctcggactccctcccctctgcttctactcctcctgctccagtgcggatcgtttcgcaactgcttgccactcgtcccgtgcctggctgtttttccatttcccggccccctcttcttgagtactttaccccctgcatttggggacagggactggaaaaggggcgggtggagcgtccagtggagaagaaggaagcgaggcccgcaggaggaggaggatcggcggactgtggggaggagaccccacgccaccctttctggtcatctcccctcccgccccgcccctgcgcacactccctcgcgggcgagctactttcggaccaggaaagtaagagcggccctgggtgacagcgccgcggggccagtcccggggttagccgcgcgtctgctcgcttctggtccgtcgcgctcccagccagggcacagcccggaccgaggatggcttcgaccacaacctgcaccaggttcacggacgagtatcagcttttcgaggagcttggaaagggggcattctcagtggtgagaagatgtatgaaaattcctactggacaagaatatgctgccaaaattatcaacaccaaaaagctttctgctagggatcatcagaaactagaaagagaagctagaatctgccgtcttttgaagcaccctaatattgtgcgacttcatgatagcatatcagaagagggctttcactacttggtgtttgatttagttactggaggtgaactgtttgaagacatagtggcaagagaatactacagtgaagctgatgccagtcattgtatacagcagattctagaaagtgttaatcattgtcacctaaatggcatagttcacagggacctgaagcctgagaatttgcttttagctagcaaatccaagggagcagctgtgaaattggcagactttggcttagccatagaagttcaaggggaccagcaggcgtggtttggttttgctggcacacctggatatctttctccagaagttttacgtaaagatccttatggaaagccagtggatatgtgggcatgtggtgtcattctctatattctacttgtggggtatccacccttctgggatgaagaccaacacagactctatcagcagatcaaggctggagcttatgattttccatcaccagaatgggacacggtgactcctgaagccaaagacctcatcaataaaatgcttactatcaaccctgccaaacgcatcacagcctcagaggcactgaagcacccatggatctgtcaacgttctactgttgcttccatgatgcacagacaggagactgtagactgcttgaagaaatttaatgctagaagaaaactaaagggtgccatcttgacaactatgctggctacaaggaatttctcagcagccaagagtttgttgaagaaaccagatggagtaaaggagtcaactgagagttcaaatacaacaattgaggatgaagatgtgaaagcacgaaagcaagagattatcaaagtcactgaacaactgatcgaagctatcaacaatggggactttgaagcctacacaaaaatctgtgacccaggccttactgcttttgaacctgaagctttgggtaatttagtggaagggatggattttcaccgattctactttgaaaatgctttgtccaaaagcaataaaccaatccacactattattctaaaccctcatgtacatctggtaggggatgatgccgcctgcatagcatatattaggctcacacagtacatggatggcagtggaatgccaaagacaatgcagtcagaagagactcgtgtgtggcaccgccgggatggaaagtggcagaatgttcattttcatcgctcggggtcaccaacagtacccatcaagccaccctgtattccaaatgggaaagaaaacttctcaggaggcacctctttgtggcaaaacatctaaggcctgaaaaccattcacatatgggtcttctaaatttcaacagtgccacttctgcattctctgttctcaaggcacctggatggtgaccctgggccgtcctctcctcctcttcatgcatgtttctgagtgcatgaag

SEQ ID NO: 586 - protein, 499 aa, Homo sapiens
MASTTTCTRFTDEYQLFEELGKGAFSVVRRCMKIPTGQEYAAKIINTKKLSARDHQKLEREARICRLLKHPNIVRLHDSISEEGFHYLVFDLVTGGELFEDIVAREYYSEADASHCIQQILESVNHCHLNGIVHRDLKPENLLLASKSKGAAVKLADFGLAIEVQGDQQAWFGFAGTPGYLSPEVLRKDPYGKPVDMWACGVILYILLVGYPPFWDEDQHRLYQQIKAGAYDFPSPEWDTVTPEAKDLINKMLTINPAKRITASEALKHPWICQRSTVASMMHRQETVDCLKKFNARRKLKGAILTTMLATRNFSAAKSLLKKPDGVKESTESSNTTIEDEDVKARKQEIIKVTEQLIEAINNGDFEAYTKICDPGLTAFEPEALGNLVEGMDFHRFYFENALSKSNKPIHTIILNPHVHLVGDDAACIAYIRLTQYMDGSGMPKTMQSEETRVWHRRDGKWQNVHFHRSGSPTVPIKPPCIPNGKENFSGGTSLWQNI

SEQ ID NO: 587 - DNA, 2151 bp, Homo sapiens
gcggccgctgggctcaggctgtccgctctgggctccgcggcctcggccccgctgcactccacctccgccccctcggactccctcccctctgcttctactcctcctgctccagtgcggatcgtttcgcaactgcttgccactcgtcccgtgcctggctgtttttccatttcccggccccctcttcttgagtactttaccccctgcatttggggacagggactggaaaaggggcgggtggagcgtccagtggagaagaaggaagcgaggcccgcaggaggaggaggatcggcggactgtggggaggagaccccacgccaccctttctggtcatctcccctcccgccccgcccctgcgcacactccctcgcgggcgagctactttcggaccaggaaagtaagagcggccctgggtgacagcgccgcggggccagtcccggggttagccgcgcgtctgctcgcttctggtccgtcgcgctcccagccagggcacagcccggaccgaggatggcttcgaccacaacctgcaccaggttcacggacgagtatcagcttttcgaggagcttggaaagggggcattctcagtggtgagaagatgtatgaaaattcctactggacaagaatatgctgccaaaattatcaacaccaaaaagctttctgctagggatcatcagaaactagaaagagaagctagaatctgccgtcttttgaagcaccctaatattgtgcgacttcatgatagcatatcagaagagggctttcactacttggtgtttgatttagttactggaggtgaactgtttgaagacatagtggcaagagaatactacagtgaagctgatgccagtcattgtatacagcagattctagaaagtgttaatcattgtcacctaaatggcatagttcacagggacctgaagcctgagaatttgcttttagctagcaaatccaagggagcagctgtgaaattggcagactttggcttagccatagaagttcaaggggaccagcaggcgtggtttggttttgctggcacacctggatatctttctccagaagttttacgtaaagatccttatggaaagccagtggatatgtgggcatgtggtgtcattctctatattctacttgtggggtatccacccttctgggatgaagaccaacacagactctatcagcagatcaaggctggagcttatgattttccatcaccagaatgggacacggtgactcctgaagccaaagacctcatcaataaaatgcttactatcaaccctgccaaacgcatcacagcctcagaggcactgaagcacccatggatctgtcaacgttctactgttgcttccatgatgcacagacaggagactgtagactgcttgaagaaatttaatgctagaagaaaactaaagggtgccatcttgacaactatgctggctacaaggaatttctcagcagccaagagtttgttgaagaaaccagatggagtaaaggagtcaactgagagttcaaatacaacaattgaggatgaagatgtgaaagcacgaaagcaagagattatcaaagtcactgaacaactgatcgaagctatcaacaatggggactttgaagcctacacaaaaatctgtgacccaggccttactgcttttgaacctgaagctttgggtaatttagtggaagggatggattttcaccgattctactttgaaaatgctttgtccaaaagcaataaaccaatccacactattattctaaaccctcatgtacatctggtaggggatgatgccgcctgcatagcatatattaggctcacacagtacatggatggcagtggaatgccaaagacaatgcagtcagaagagactcgtgtgtggcaccgccgggatggaaagtggcagaatgttcattttcatcgctcggggtcaccaacagtacccatcaagtaaatatttccaggctgtcagcttctttgttaatacacccatggtcagctccttctacttattccattgttaatagcatggtatatgttatttaacgctagtagttggttacactgatgaaaataaatgccttcacgggaaaggttaaaaaaaaaaaaaaaaaaaaaaaaaaaaaaaaaaaaaaaaaaaaaaaaaaaaaaaaaaaaaaaaaaa

SEQ ID NO: 588 - protein, 478 aa, Homo sapiens
MASTTTCTRFTDEYQLFEELGKGAFSVVRRCMKIPTGQEYAAKIINTKKLSARDHQKLEREARICRLLKHPNIVRLHDSISEEGFHYLVFDLVTGGELFEDIVAREYYSEADASHCIQQILESVNHCHLNGIVHRDLKPENLLLASKSKGAAVKLADFGLAIEVQGDQQAWFGFAGTPGYLSPEVLRKDPYGKPVDMWACGVILYILLVGYPPFWDEDQHRLYQQIKAGAYDFPSPEWDTVTPEAKDLINKMLTINPAKRITASEALKHPWICQRSTVASMMHRQETVDCLKKFNARRKLKGAILTTMLATRNFSAAKSLLKKPDGVKESTESSNTTIEDEDVKARKQEIIKVTEQLIEAINNGDFEAYTKICDPGLTAFEPEALGNLVEGMDFHRFYFENALSKSNKPIHTIILNPHVHLVGDDAACIAYIRLTQYMDGSGMPKTMQSEETRVWHRRDGKWQNVHFHRSGSPTVPIK

SEQ ID NO: 589 - DNA, 4098 bp, Homo sapiens
gcggccgctgggctcaggctgtccgctctgggctccgcggcctcggccccgctgcactccacctccgccccctcggactccctcccctctgcttctactcctcctgctccagtgcggatcgtttcgcaactgcttgccactcgtcccgtgcctggctgtttttccatttcccggccccctcttcttgagtactttaccccctgcatttggggacagggactggaaaaggggcgggtggagcgtccagtggagaagaaggaagcgaggcccgcaggaggaggaggatcggcggactgtggggaggagaccccacgccaccctttctggtcatctcccctcccgccccgcccctgcgcacactccctcgcgggcgagctactttcggaccaggaaagtaagagcggccctgggtgacagcgccgcggggccagtcccggggttagccgcgcgtctgctcgcttctggtccgtcgcgctcccagccagggcacagcccggaccgaggatggcttcgaccacaacctgcaccaggttcacggacgagtatcagcttttcgaggagcttggaaagggggcattctcagtggtgagaagatgtatgaaaattcctactggacaagaatatgctgccaaaattatcaacaccaaaaagctttctgctagggatcatcagaaactagaaagagaagctagaatctgccgtcttttgaagcaccctaatattgtgcgacttcatgatagcatatcagaagagggctttcactacttggtgtttgatttagttactggaggtgaactgtttgaagacatagtggcaagagaatactacagtgaagctgatgccagtcattgtatacagcagattctagaaagtgttaatcattgtcacctaaatggcatagttcacagggacctgaagcctgagaatttgcttttagctagcaaatccaagggagcagctgtgaaattggcagactttggcttagccatagaagttcaaggggaccagcaggcgtggtttggttttgctggcacacctggatatctttctccagaagttttacgtaaagatccttatggaaagccagtggatatgtgggcatgtggtgtcattctctatattctacttgtggggtatccacccttctgggatgaagaccaacacagactctatcagcagatcaaggctggagcttatgattttccatcaccagaatgggacacggtgactcctgaagccaaagacctcatcaataaaatgcttactatcaaccctgccaaacgcatcacagcctcagaggcactgaagcacccatggatctgtcaacgttctactgttgcttccatgatgcacagacaggagactgtagactgcttgaagaaatttaatgctagaagaaaactaaagggtgccatcttgacaactatgctggctacaaggaatttctcagcagccaagagtttgttgaagaaaccagatggagtaaaggagtcaactgagagttcaaatacaacaattgaggatgaagatgtgaaagcacgaaagcaagagattatcaaagtcactgaacaactgatcgaagctatcaacaatggggactttgaagcctacacaaaaatctgtgacccaggccttactgcttttgaacctgaagctttgggtaatttagtggaagggatggattttcaccgattctactttgaaaatgctttgtccaaaagcaataaaccaatccacactattattctaaaccctcatgtacatctggtaggggatgatgccgcctgcatagcatatattaggctcacacagtacatggatggcagtggaatgccaaagacaatgcagtcagaagagactcgtgtgtggcaccgccgggatggaaagtggcagaatgttcattttcatcgctcggggtcaccaacagtacccatcaagtaaatatttccaggctgtcagcttctttgttaatacacccatgctaaatttcaacagtgccacttctgcattctctgttctcaaggcacctggatggtgaccctgggccgtcctctcctcctcttcatgcatgtttctgagtgcatgaagttgtgaaggtcctacatgtaatgcatatgtgatgcatcatcttatcatatattccttcctatacattgtttacacttcaactacggggatgttccacacaaacttaaattactgttggcaaaacaatagggggagattagacaaaaaaaaaaatccacaatattccaagtacaactcttcatcaagtttctctgttaatgccaagatttaacagacttaagaactattgttctctgaatgacagttgtaagagaaatgtaaattttttagaactctttgctgttaatctgttttggtttgtttggtttttttttttttttttaaggtaaaaaaaaaatacaccttcagtttcctggtgtgatcctggttaaaatggatgatttttcattgaaagttttgctgattaacaattaaagtgggatgatatgtgggcaaaatcacttatgaaagtagaagcaagaatcagttggtttgctaccacataaagccatgctgtttttggtcaaactgtgtaaactggaaaaattcacatcatttctgagtttaatcactttaggatatattcacattgttttggtgaatttgctgaattgaattgtttttctttctcaaatctgtgatctcttttctttatcctgtttctttgttcctttcgtttgctttcttatttttcttttgttccattcttttcttacttttttcccttttccttttttggggaggctggctagtagtgtgtgagaaaagaatagaagtgaaatttgcataatgaatgtaaaagggaaataaaagtcttttgaaggtagctatactagcacttttgatcatcttcagggcccacaaaaatgttgtcaagattttaaaggtttataattctgcttaagctctagtttggacttaggtatcctaactatgttggaggtatttgcattgtttaaagttaggataaaagcaagttcctcctgtgactgcaacgtcttactgattgggacagttgccaggaggataccaacttgatagcagagggggttttatgcaaacgcactcacctccgccttggggaatgaaagggtcacttctgcatcatcactagctagttttctagtgttagagaggcttacaaatgtttgccattctcataagtgttttgaacttgatctttgtgacttgtgcttttttagcttctctcttgaatcagagtatcattgtcttcctccaaggagttagaatttcccagtttaaaacaaaaagggaaatgtcctaggttttctttgtgcttctcatttttcctttgttgattcaattcctgtgatttttgttctcttccctgaagtgctttacagtgcatggaatctccatcattgttattttaacgatagtaattcacagtcctcagaagcctatttttaaagcagaagcaaaaaagaaaaacaaaataacaaaaacaacccttcctcttttctctcatctcacctctctgtgttgattactaatcatcttagatattattgctagtggatgtatggtagatgggttgaagcttttctgataattattacacaatttaaaacaacatatatatttaaaataaatatatacagtaaatatattgagccatgttaacctgccaatgagatctgtgaaaaaataatggcctcatttttctctttttaatttcttttacccttttgtgaagcagctatacgtggcatacatgtatttaaagaaaaaaaaatagatgtagagtgttttttttacacttttaacttagcatgtggtgttgaagtattactgtagatcaagtttgtcttccgcactaagatgtgaggaaattgtgatttgttctctccaccacaaatgaattacacatttattatcttctatcattttgaaacactgcagtttaccatgggacactgtatatatttcttgccataatggtaaaggactgattgatatatttaagagttaataaatttgtgatttctgctgaaaaaaaaaaaaaaaaaa

SEQ ID NO: 590 - protein, 478 aa, Homo sapiens; identical to SEQ ID NO: 588

SEQ ID NO: 591 - DNA, 4054 bp, Homo sapiens
gcggccgctgggctcaggctgtccgctctgggctccgcggcctcggccccgctgcactccacctccgccccctcggactccctcccctctgcttctactcctcctgctccagtgcggatcgtttcgcaactgcttgccactcgtcccgtgcctggctgtttttccatttcccggccccctcttcttgagtactttaccccctgcatttggggacagggactggaaaaggggcgggtggagcgtccagtggagaagaaggaagcgaggcccgcaggaggaggaggatcggcggactgtggggaggagaccccacgccaccctttctggtcatctcccctcccgccccgcccctgcgcacactccctcgcgggcgagctactttcggaccaggaaagtaagagcggccctgggtgacagcgccgcggggccagtcccggggttagccgcgcgtctgctcgcttctggtccgtcgcgctcccagccagggcacagcccggaccgaggatggcttcgaccacaacctgcaccaggttcacggacgagtatcagcttttcgaggagcttggaaagggggcattctcagtggtgagaagatgtatgaaaattcctactggacaagaatatgctgccaaaattatcaacaccaaaaagctttctgctagggatcatcagaaactagaaagagaagctagaatctgccgtcttttgaagcaccctaatattgtgcgacttcatgatagcatatcagaagagggctttcactacttggtgtttgatttagttactggaggtgaactgtttgaagacatagtggcaagagaatactacagtgaagctgatgccagtcattgtatacagcagattctagaaagtgttaatcattgtcacctaaatggcatagttcacagggacctgaagcctgagaatttgcttttagctagcaaatccaagggagcagctgtgaaattggcagactttggcttagccatagaagttcaaggggaccagcaggcgtggtttggttttgctggcacacctggatatctttctccagaagttttacgtaaagatccttatggaaagccagtggatatgtgggcatgtggtgtcattctctatattctacttgtggggtatccacccttctgggatgaagaccaacacagactctatcagcagatcaaggctggagcttatgattttccatcaccagaatgggacacggtgactcctgaagccaaagacctcatcaataaaatgcttactatcaaccctgccaaacgcatcacagcctcagaggcactgaagcacccatggatctgtcaacgttctactgttgcttccatgatgcacagacaggagactgtagactgcttgaagaaatttaatgctagaagaaaactaaagggtgccatcttgacaactatgctggctacaaggaatttctcagcagccaagagtttgttgaagaaaccagatggagtaaaggagtcaactgagagttcaaatacaacaattgaggatgaagatgtgaaagcacgaaagcaagagattatcaaagtcactgaacaactgatcgaagctatcaacaatggggactttgaagcctacacaaaaatctgtgacccaggccttactgcttttgaacctgaagctttgggtaatttagtggaagggatggattttcaccgattctactttgaaaatgctttgtccaaaagcaataaaccaatccacactattattctaaaccctcatgtacatctggtaggggatgatgccgcctgcatagcatatattaggctcacacagtacatggatggcagtggaatgccaaagacaatgcagtcagaagagactcgtgtgtggcaccgccgggatggaaagtggcagaatgttcattttcatcgctcggggtcaccaacagtacccatcaactaaatttcaacagtgccacttctgcattctctgttctcaaggcacctggatggtgaccctgggccgtcctctcctcctcttcatgcatgtttctgagtgcatgaagttgtgaaggtcctacatgtaatgcatatgtgatgcatcatcttatcatatattccttcctatacattgtttacacttcaactacggggatgttccacacaaacttaaattactgttggcaaaacaatagggggagattagacaaaaaaaaaaatccacaatattccaagtacaactcttcatcaagtttctctgttaatgccaagatttaacagacttaagaactattgttctctgaatgacagttgtaagagaaatgtaaattttttagaactctttgctgttaatctgttttggtttgtttggtttttttttttttttttaaggtaaaaaaaaaatacaccttcagtttcctggtgtgatcctggttaaaatggatgatttttcattgaaagttttgctgattaacaattaaagtgggatgatatgtgggcaaaatcacttatgaaagtagaagcaagaatcagttggtttgctaccacataaagccatgctgtttttggtcaaactgtgtaaactggaaaaattcacatcatttctgagtttaatcactttaggatatattcacattgttttggtgaatttgctgaattgaattgtttttctttctcaaatctgtgatctcttttctttatcctgtttctttgttcctttcgtttgctttcttatttttcttttgttccattcttttcttacttttttcccttttccttttttggggaggctggctagtagtgtgtgagaaaagaatagaagtgaaatttgcataatgaatgtaaaagggaaataaaagtcttttgaaggtagctatactagcacttttgatcatcttcagggcccacaaaaatgttgtcaagattttaaaggtttataattctgcttaagctctagtttggacttaggtatcctaactatgttggaggtatttgcattgtttaaagttaggataaaagcaagttcctcctgtgactgcaacgtcttactgattgggacagttgccaggaggataccaacttgatagcagagggggttttatgcaaacgcactcacctccgccttggggaatgaaagggtcacttctgcatcatcactagctagttttctagtgttagagaggcttacaaatgtttgccattctcataagtgttttgaacttgatctttgtgacttgtgcttttttagcttctctcttgaatcagagtatcattgtcttcctccaaggagttagaatttcccagtttaaaacaaaaagggaaatgtcctaggttttctttgtgcttctcatttttcctttgttgattcaattcctgtgatttttgttctcttccctgaagtgctttacagtgcatggaatctccatcattgttattttaacgatagtaattcacagtcctcagaagcctatttttaaagcagaagcaaaaaagaaaaacaaaataacaaaaacaacccttcctcttttctctcatctcacctctctgtgttgattactaatcatcttagatattattgctagtggatgtatggtagatgggttgaagcttttctgataattattacacaatttaaaacaacatatatatttaaaataaatatatacagtaaatatattgagccatgttaacctgccaatgagatctgtgaaaaaataatggcctcatttttctctttttaatttcttttacccttttgtgaagcagctatacgtggcatacatgtatttaaagaaaaaaaaatagatgtagagtgttttttttacacttttaacttagcatgtggtgttgaagtattactgtagatcaagtttgtcttccgcactaagatgtgaggaaattgtgatttgttctctccaccacaaatgaattacacatttattatcttctatcattttgaaacactgcagtttaccatgggacactgtatatatttcttgccataatggtaaaggactgattgatatatttaagagttaataaatttgtgatttctgctgaaaaaaaaaaaaaaaaaa

SEQ ID NO: 592 - protein, 478 aa, Homo sapiens
MASTTTCTRFTDEYQLFEELGKGAFSVVRRCMKIPTGQEYAAKIINTKKLSARDHQKLEREARICRLLKHPNIVRLHDSISEEGFHYLVFDLVTGGELFEDIVAREYYSEADASHCIQQILESVNHCHLNGIVHRDLKPENLLLASKSKGAAVKLADFGLAIEVQGDQQAWFGFAGTPGYLSPEVLRKDPYGKPVDMWACGVILYILLVGYPPFWDEDQHRLYQQIKAGAYDFPSPEWDTVTPEAKDLINKMLTINPAKRITASEALKHPWICQRSTVASMMHRQETVDCLKKFNARRKLKGAILTTMLATRNFSAAKSLLKKPDGVKESTESSNTTIEDEDVKARKQEIIKVTEQLIEAINNGDFEAYTKICDPGLTAFEPEALGNLVEGMDFHRFYFENALSKSNKPIHTIILNPHVHLVGDDAACIAYIRLTQYMDGSGMPKTMQSEETRVWHRRDGKWQNVHFHRSGSPTVPIN

SEQ ID NO: 593 - DNA, 6734 bp, Homo sapiens
cccagttgtctgcgggctgcggggagctaagtccccagattggaggaggctggctctggtcttcgatgcacaggagtggccgttatggaacgcagcagcagcgtgcagggtcaaagacagccggccccccatgtcagtggtctaggatggccagtgaaggcaccaacatcccaagtcctgtggtgcgccagattgacaagcagtttctgatttgcagtatatgcctggaacggtacaagaatcccaaggttctcccctgtctgcacactttctgcgagaggtgcctgcagaactacattcctgcccacagtttaaccctctcctgcccagtgtgccgccagacctccatcctgcccgagaaaggggtggccgcgctccagaacaatttcttcatcacaaacctgatggacgtgctgcagcgaactccaggcagcaacgctgaggagtcttccatcctggagacagtcactgctgtggctgcgggaaagcctctctcttgcccaaaccacgatgggaatgtgatggaattttactgccagtcctgtgagactgccatgtgtcgggagtgcacggagggggagcacgcagagcaccccacagttccactcaaggatgtggtggaacagcacaaggcctcgctccaggtccagctggatgctgtcaacaaaaggctcccagaaatagattctgctcttcagttcatctctgaaatcattcatcagttaaccaaccaaaaggccagcatcgtggatgacattcattccacctttgatgagctccagaagactttaaatgtgcgcaagagtgtgctgcttatggaattggaggtcaactatggcctcaaacacaaagtcctccagtcgcagctggatactctgctccaggggcaggagagcattaagagctgcagcaacttcacagcgcaggccctcaaccatggcacggagaccgaggtcctactggtgaagaagcagatgagcgagaagctgaacgagctggccgaccaggacttccccttgcacccgcgggagaacgaccagctggatttcatcgtggaaaccgaggggctgaagaagtccatccacaacctcgggacgatcttaaccaccaacgccgttgcctcagagacagtggccacgggcgaggggctgcggcagaccatcatcgggcagcccatgtccgtcaccatcaccaccaaggacaaagacggtgagctgtgcaaaaccggcaacgcctacctcaccgccgaactgagcacccccgacgggagcgtggcagacggggagatcctggacaacaagaacggcacctatgagtttttgtacactgtccagaaggaaggggactttaccctgtctctgagactctatgaccagcacatccgaggcagcccgtttaagctgaaagtgatccgatccgctgatgtgtctcccaccacagaaggcgtgaagaggcgcgttaagtccccggggagcggccacgtcaagcagaaagctgtgaaaagacccgcaagcatgtacagcactggaaaacgaaaagagaatcccatcgaagacgatttgatctttcgagtgggtaccaaaggaagaaataaaggagagtttacaaatcttcagggggtagctgcatctacaaatggaaagatattaattgcagacagtaacaaccaatgtgtgcagatattttccaatgatggccagttcaaaagtcgttttggcatacggggacgctctccggggcagctgcagcggcccacaggagtggctgtacatcccagtggggacataatcattgccgattatgataataaatgggtcagcattttctcctccgatgggaaatttaagacaaaaattggatcaggaaagctgatgggacccaaaggagtttctgtggaccgcaatgggcacattattgttgtggacaacaaggcgtgctgcgtgtttatcttccagccaaacgggaaaatagtcaccaggtttggtagccgaggaaatggggacaggcagtttgcaggtccccattttgcagctgtaaatagcaataatgagattattattacagatttccataatcattctgtcaaggtgtttaatcaggaaggagaattcatgttgaagtttggctcaaatggagaaggaaatgggcagtttaatgctccaacaggtgtagcagtggattcaaatggaaacatcattgtggccgactggggaaacagcaggatccaggtttttgatgggagtggatcatttttgtcctacattaacacatctgctgacccactctatggcccccaaggcctggccctaacttcagatggtcatgttgtggttgcagactctggaaatcactgtttcaaagtctatcgatacttacagtaatggtgggcaggtggatacccgcttccatggtcttgcactataaactggaatggatttctcaatgcgggaccagattatgactagagtttttatgccagaaggaatcattggtgaactttccaaggttatttctgaatgtaacaatttccttaaaaatgacttatccaatttctgtatttcacctttagggttaaaaaaaactcttctactgaatctataaaaactgcagttttacatctgtgaactatggcttaagggacaggatttatgtagctaaactaattttgcaaatcaaacagacacttaaaaaaactagcatatgtaaaggtattcgttaatcctgtgaatggtagcttttgcacagaacttccaaaagcaaaacaaaaacaaaatctattgtagttatatacttcatttaacctaggtcacaagacccagggaatcttctaacctcacttttacagtaggtattactcttgtgacatttttttggttatcaacaactaaatataaattactttggaaaaagtaaggctgtcttgcaaaatgatcccagctctgattagcagccctctggagttcagaacttaagtatcagtgcaaatttctcaacctttctgggttagacaaagatccttttttgtgtgttcttttcaccacccctttggctcaccttgtatcagcaaacaaagtacttcttcagggaaacctgaaatttctaatgccttgaaaagcatattacaaaagtaatgctaccttttgggaaacaaactgccccgttaactccagatcattgcactggaatgtaatcaagaaagttagtcatgttttatgtaccatgttttcacacgtgtctcttctcttcgacttcctgaaagcgaaagctttacctcctgcaaatgtcagcacatgtagtaggacaccagtatcctaggacagagagccataagtagccctttggaggactgatggtgtcaaccaaaggcatgtgattgattaatgattcccccttagaaagcaagtgttaccaaagttgtgttatcttgaaagcattacaggtaagggcatgttatggttatttatcattgtttaatgaatagtagaggtgtcaagggactatgtatacatgattagggtaagatagaatgtattatatatatatatatatatacacacacacatatatatagctgaatctttggtgtattgaaataggcagcactctgaaagacagaagcttcgtccagccactcttcagcacattcctttactaagcagtttaaagccgtcctagtggagcaagccctaaagcagatttaatttttgccattttccaagaatgacggtggtggcttttagtcagaaaatggccttctgtgctttcaaaaaaaaaacaaaaaaaaaaccacacacacacataaaaaacccaacaggtcaaaataaaagttgaacttgagttacatttaatttaaatataaatgcattttgagaaatgttaagaacaatttagtcaatcgttcatctgtcattggtactgtaaaataagctgtggtctatttccactgtttaattttctactcagttctaccaaataggatgtcatgtttgacatttttgatagtgactttggggtcttcttcactgaaagcaccttagaactgtactataagaaaacatttcccctatgtataattatatgaatgtgatgtttattgcttattaatttataattcagtcattctctatataggacttcttaaaatttagaagggaaatctagctacttcaaattgtctgttaaatttattatgcccaaatcaacctctgaaaaaaggtttttccaggaagatttacatttaggtttaatatttttttagttaggtagagttttaaaaaatacttgagcctgtccgtgataaagctataaaattcaataactttttagaatgttaaatgaagacactgtttcctaacatcagtgagatacatctttgaatttaaacattcatatttactgagtacctactaggtaccaagtactcttttaggcactggaaatacagtgatggacaaaacaggtaaaaaatcgctgccccctcagagctgacattctggggtgggaatttcattttgccacgtactaacgttctgcacaaaagacaggctagactcttgtctagattgtttaaaagaaacttttcaaattggttacattaattttagtttattttcacaagtaaaaatggctttttatttagattctttctgtcccaggctgttgatcttaaaactagttgatttaaagagtttttttgcacaacatttcaattatatttgtgaacttagaaattaacttacaatctaaccagccatcatatcatatcctatcaggctagatatctcaatagtagactgaatacaaagctaattttttttacatgtcaatattggcacaaactggaatgaaagaatagtttgattcagacctgctccactatgtgttgctaaaacacatgctatgagcactcgaggaaacactatattttttccaaaaaatatgtgattatatatgttaaagtatagataacatttcacacttggatacatatgtgcatttactgtatttcttggtaagcatatttttgggggaaagtgctgctgatatgatacaagtagacaaaatttaaatgaaattttgtcacattctatggaaaatggtttctggtaaactgagaaggatattaaaataagtggcttttttctgggctaccattattgtttgatttctctttgtcaagtgtatagaacctgtcatacattcatgataagtagcactgaaaaattactcattcaaatttcccctgggcacgtaaggcaaaatattgccggttgggatttcaaggtcagtgacgacgcatttcctcccagtacagaccccccagccccccttgctggacatggggaggcagagagtcacttgaccatccagaaatacatgactacaagtcctttatgactgtttgccattttttttaatggtacttagtattttgatcaaactttagtctccagaactaaacaagtccctaagtttccttattttaatttactgtgactagatttgaagcaaataaatactccagatccatgcagctagaacacacttgcttccactactaaatatacagggtatgtcctaacatggagttaactggaatagcagtacactagcaagtatctgtgaatccttagcactgacgggttaacagaaatgctttggtaatacctacttagttaattggaggaagtagtaaataaacattaggtaatctgcagattacttcaaatgggaaaaatctttttgtagactctatagtaccctctctattcactagcttctgaaaagggaggagtatttttagtttgacaatttaataatttaaaaacaagacatctccaggtaggaaaaaatgaaagctatttcatgcaaacattatctaatttagcttaaaagtgaaagtggtaatactgttggtttctgtaaatgttgcagggttttaaactttataattactttaatatttttgataactagaaatctagtattgccataaaggaaactaagtgcccatcaaagatttgtttggtataaataaagaattatttgttttgttttcaatgacagtaagctacaaatcatgatgcttaaaaactttctaaagatgaattgtgtggcagtgattggtctgtttgtggagaatgtatgaaagctattaatattctagaatagattaataaattggctatgttgttccaatgaatgtacagcacttccattaacttttgaaagcaacacagccttaaactcaatgcttttgctttatgacatgggaatgttctgtcatcaatggagtgtattcttgtaatagaattctttatatcgttctcaattctatagactttcaagcctatgtatgaatatgaaggggtttttttttttttgctttgttttctttttagattttgtacattccatctttataggtctgtttcatatgttttatgtatagaacactaagtcttgcactctctgacattgatactgatatattctcgtcatttgttcttttatgaatcaaaatgttgactgcctatttaaagaaaagaatgaacgctgtgcatcaaagtgtttgtatgttcgtagctacatacgtaccacagtattttggatgctttagtctacaatgaaactttcaattaattctgtcttgaaacataggagaaacaggattcatgtgtatctctttaccatgcacaaaatctcaaatcattataataaagcttgttttctcc

SEQ ID NO: 594 - protein, 744 aa, Homo sapiens
MASEGTNIPSPVVRQIDKQFLICSICLERYKNPKVLPCLHTFCERCLQNYIPAHSLTLSCPVCRQTSILPEKGVAALQNNFFITNLMDVLQRTPGSNAEESSILETVTAVAAGKPLSCPNHDGNVMEFYCQSCETAMCRECTEGEHAEHPTVPLKDVVEQHKASLQVQLDAVNKRLPEIDSALQFISEIIHQLTNQKASIVDDIHSTFDELQKTLNVRKSVLLMELEVNYGLKHKVLQSQLDTLLQGQESIKSCSNFTAQALNHGTETEVLLVKKQMSEKLNELADQDFPLHPRENDQLDFIVETEGLKKSIHNLGTILTTNAVASETVATGEGLRQTIIGQPMSVTITTKDKDGELCKTGNAYLTAELSTPDGSVADGEILDNKNGTYEFLYTVQKEGDFTLSLRLYDQHIRGSPFKLKVIRSADVSPTTEGVKRRVKSPGSGHVKQKAVKRPASMYSTGKRKENPIEDDLIFRVGTKGRNKGEFTNLQGVAASTNGKILIADSNNQCVQIFSNDGQFKSRFGIRGRSPGQLQRPTGVAVHPSGDIIIADYDNKWVSIFSSDGKFKTKIGSGKLMGPKGVSVDRNGHIIVVDNKACCVFIFQPNGKIVTRFGSRGNGDRQFAGPHFAAVNSNNEIIITDFHNHSVKVFNQEGEFMLKFGSNGEGNGQFNAPTGVAVDSNGNIIVADWGNSRIQVFDGSGSFLSYINTSADPLYGPQGLALTSDGHVVVADSGNHCFKVYRYLQ

SEQ ID NO: 595 - DNA, 1342 bp, Homo sapiens
cattcggggacgctctcagcgctctgctcacgacccagcttccttcaaaatatctgctgttcatgaaatcctgtgcaagctcagcttggagggtgatcactctacatccccaagtgcatttgggtcagtcaaagcctacaccaaatttgatgctgagcaggatgctttgaacattgaaatggccatcaagaccaaaggtgtggatgagatcaccactgtcaacattttgactaaccacagcaatgcacagagacaggatattgccttcacctaccagagaaggaccaaaaaggaacttgtatcagcacttaagtcagccttatctggccacctagatagtggctttgggcctattaaagacacctgctcagtatgatgcttctgagctaaaatcttccatgaaggggctgggaaccaacaaggactccctcattgagatcatctgctcaagaaccaaccaagagctgcaggaaattaacagagtctacaaggaaatgtacaagactgatctggagaaggacattatttcggacacatctggtgacttctgcaagctgatggttgccctggcaaagggtagaagagcagaggatggctctgtcattgattatgaactgattgaccaagatgcccgggatctctatgacgctggggtgaagaggaaaggaactgaagttcccaagtggatcagcgtcatgaccgagcggagcatgtcccacttccagaaagtatttgataggtacaagagctacagtccttatgacatgttggagagcatcaagaaagaggttaaaggagacctggaaaattctttcctgaacctggtccagtgtattcagaacaagcccctgtatttcgctgaccggctgtacgactccataatgggcatggggactcaagataaggtcctgatcagaatcatggtctcccacaatgaagtggacatgttgaaaattaggtctgaattcaagagaaagtatagcaagtccctgtactactatatccagcaagacactaagggtgctgtacctgtgtggtggagatggctgaagtccgacacagcacgagcgtccagaaatggtgctccccatgcttccagctaacaggtctagaaaacccgcttgtgactagcagtccctgtggctgttcctgtgaggatgacgttagcattacccccaacctcattttagttgcctaagcattgcctggctttcctgtctagtctctcctgtaagccaaagaaatgaacattccaaggaattggaagtgaagtctatgatgtaaacactttgcctcctgtgtactgtgtcataaacggattaataaactgaatttgtacttt

SEQ ID NO: 596 - DNA, 941 bp, Homo sapiens
agtcggcgccaaaatcaaacgcgtcctggcctgtcccgcccctctccccaagcgcgggcccggccagcggaagcccctgcgcccgcgccatgtcaaagaaaaaaggactgagtgcagaagaaaagagaactcgcatgatggaaatattttctgaaacaaaagatgtatttcaattaaaagacttggagaagattgctcccaaagagaaaggcattactgctatgtcagtaaaagaagtccttcaaagcttagttgatgatggtatggttgactgtgagaggatcggaacttctaattattattgggcttttccaagtaaagctcttcatgcaaggaaacataagttggaggttctggaatctcagttgtctgagggaagtcaaaagcatgcaagcctacagaaaagcattgagaaagctaaaattggccgatgtgaaacggaagagcgaaccaggctagcaaaagagctttcttcacttcgagaccaaagggaacagctaaaggcagaagtagaaaaatacaaagactgtgatccgcaagttgtggaagaaatacgccaagcaaataaagtagccaaagaagctgctaacagatggactgataacatattcgcaataaaatcttgggccaaaagaaaatttgggtttgaagaaaataaaattgatagaacttttggaattccagaagactttgactacatagactaaaatattccatggtggtgaaggatgtacaagcttgtgaatatgtaaattttaaactattatctaactaagtgtactgaattgtcgtttgcctgtaactgtgtttatcattttattaatgttaaataaagtgtaaaatgcagatgttcttcaccccttttggtagaacaaaagcaggatgataaccatatccccccagtgctcatcaaagtaggacaataaaaatccatccatctc

SEQ ID NO: 597 - protein, 205 aa, Homo sapiens
MSKKKGLSAEEKRTRMMEIFSETKDVFQLKDLEKIAPKEKGITAMSVKEVLQSLVDDGMVDCERIGTSNYYWAFPSKALHARKHKLEVLESQLSEGSQKHASLQKSIEKAKIGRCETEERTRLAKELSSLRDQREQLKAEVEKYKDCDPQVVEEIRQANKVAKEAANRWTDNIFAIKSWAKRKFGFEENKIDRTFGIPEDFDYID

SEQ ID NO: 598 - DNA, 607 bp, Homo sapiens
gcagttatggcatgggctgatctacccagtcagcaaggccagattgcagagaaactcagagtctaggaaaatgaatgtctaggaacattcctcaaatagtcctaccagaagacacaaagatgatgcatccggatgaagaatatatcactgagattaatggccctgggttgcagccaaaagcatctcagaggtagaacactgttgcagatggtgatgttaccatttgaaaggtatgatgcatttcctgactgtggtcggctttccatgggtgaaacagaaaagtcttcaaatatcctcaccaactgctttcctagatttttcagccagttacttgaccatattaggaaaagaaaggtgagcttgggcttcaggacatagaaaacaacattagttatgctggaaagtatcaccaaagaagtgcagctcagacaagctgtattctattttgttcttttgaacataaacacctataaagggaccaaaagaaatctaaatgatcaacgggagcaatcctgaataggcaacaacaatcattattgccaagtgattgtcttatcatttgtcatcagtttttttttcagagtaattacatttaaatgtaaatgtg

SEQ ID NO: 599 - protein, 81 aa, Homo sapiens
MKNISLRLMALGCSQKHLRGRTLLQMVMLPFERYDAFPDCGRLSMGETEKSSNILTNCFPRFFSQLLDHIRKRKVSLGFRT

SEQ ID NO: 600 - DNA, 4868 bp, Homo sapiens
gcctagggaggaggagcgagaatcagcctggttcagtgactgagacaaactggaggtgaaaggagctggtactgtccactgtgctgtcggtgctgaacctgagacgcgagcggaccagttgctccagcacctgaaggcaacgccctcttgcaccctctgtgccctgtgggacccgcttcaccaacaggacccatatcaacttgacaaaggagtgtggtatcggacgtgggagagagtcctctgtttgccacctgggcgctcattcaggcgtgactttggagatttctatagttttagactaaactatttttttttccccagctaagacgatcttttgagagtttttttttttttattgtgatttatatttccacagcgtttaggaatctttctgggggacttttgtgactgttaaaataaggtgaaaagcaataaggatgtttaagtgctggtcagttgtcttggttctcggattcatttttctggagtcggaaggaaggccaaccaaagaaggaggatatggccttaaatcctatcagcctctaatgagattgcgacataagcaggaaaaaaatcaagaaagttcaagagtcaaaggatttatgattcaggatggcccttttggatcttgtgaaaataagtactgtggtttgggaagacactgtgttaccagcagagagacagggcaagcagaatgtgcctgtatggacctttgcaaacgtcactacaaacctgtgtgtggatctgacggagaattctatgaaaaccactgtgaagtgcacagagctgcttgcctgaaaaaacaaaagattaccattgttcacaatgaagactgcttctttaaaggagataagtgcaagactactgaatacagcaagatgaaaaatatgctattagatttacaaaatcaaaaatatattatgcaagaaaatgaaaatcctaatggcgacgacatatctcggaagaagctattggtggatcaaatgtttaaatattttgatgcagacagtaatggacttgtagatattaatgaactaactcaggtgataaaacaggaagaacttggcaaggatctctttgattgtactttgtatgttctattgaaatatgatgattttaatgctgacaagcacctggctcttgaagaattttatagagcattccaagtgatccagttgagtctgccagaagatcagaaactaagcatcactgcagcaactgtgggacaaagtgctgttctgagctgtgccattcaaggaaccctgagacctcccattatctggaaaaggaacaatattattctaaataatttagatttggaagacatcaatgactttggagatgatgggtccttgtatattactaaggttaccacaactcacgttggcaattacacctgctatgcagatggctatgaacaagtctatcagactcacatcttccaagtgaatgttcctccagtcatccgggtgtatccagagagtcaggctagagagcctggggtaactgccagtcttaggtgccatgcagagggcataccaaagcctcagcttggctggttgaagaatggaattgatattacaccaaagctttccaaacaactcacgcttcaagcaaatggcagtgaggttcacataagcaatgtgcgctatgaagatactggagcatacacttgtatcgcaaagaatgaagcaggagtggatgaagacatctcttctctttttgtggaagactctgctagaaagaccctagctaacatattatggagagaagaaggtctgggaattgggaacatgttctatgttttttatgaagatggaatcaaagtgatacaacccatagaatgtgaatttcagaggcacattaagcctagtgaaaagctccttggatttcaggatgaagtctgtcccaaagctgagggagatgaagttcagaggtgtgtgtgggcatcagctgttaatgtcaaagacaagttcatttatgttgcacagccaactttggacagagtccttattgttgatgtgcagtcccaaaaagttgttcaggcagtgagcacagaccctgtcccagttaaattacactatgacaaatcacatgatcaggtctgggtgctaagctggggtaccttggagaagtcatcaccaacactacaggtaattaccctggccagtgggaatgtgcctcaccacacgatccacacccaaccagtgggaaagcaatttgacagagtggatgattttttcattcccaccacaacactcattatcacccatatgaggtttggatttattcttcataaagatgaagctgcactacaaaaaattgatattgaaaccatgtcatacatcaagacaattaacttgaaggactataagtgcgttcctcagtcattggcatatacacacttgggaggctactacttcattggctgcaaacctgacagcaccggagcagtttccccacaggtcatggtggacggtgtaactgactcagtcattgggttcaatagtgatgtgacgggcactccatatgtctctccagatggccactaccttgtcagcattaatgatgtgaaaggtcttgtaagggttcagtacattaccatcagaggagaaatacaggaggcttttgatatttacacaaatctgcacatatctgatctggcatttcaaccatcctttactgaagcccaccaatataacatctacggtagttcaagcacacaaactgatgtgctctttgtggagctctcttctgggaaggtcaagatgataaagagtctcaaggaaccactcaaggcagaagaatggccttggaaccggaaaaacaggcaaatccaggacagtggcttgtttggtcaatacctgatgacaccttccaaggactctctcttcatcctagatggacgactcaataaattaaactgtgagatcactgaagttgaaaaaggaaatacagtcatttgggttggagatgcctaaaaaccctacgatacaattattgaatgaagcgttttacaatacattgcacttaatccattgtttaaatttacaacttaactttccaagtttatatcctagtcaaacaaaatttacttggttggtccaaataaaataaattgtttttgactaagtgactaagacatacacaattaattatattggttaattagaaatactcagcacaatatttaatgagaaatcacatcagtcacaagaatcaaatatgtaaattatgctttaaacaataaagtaggatttaaatcatttaaaaaactaaactgcagggaatttcagatgacataaagcattatttcattttgagggtagtttattttttttctctgtccttttggtatgattaaacaagaaataaaaggtgttgtggaaacttaaaattcttaattcaaaatattcggtcctgtccactgtttataatattttgtgccttgaagggaatgtcacaggaggaaaaggaagactaaagcctgcatactaaatgctctcataactataaatctcttgttgttaaaaaacatctcttgcaccaaatcctgtcttcagtcttttgtttaaccctcaatgaactaccaattgaaggcataagttggtcttaggttgtatacaggtgtcaaactccacttgacatttactgtataatctgcagcatgctatagaaagtggggaggaagggaggaaaaataattacagtcaaaatatttgcaatctatctactcattttgctttcaatcactagagtgcattatgtttttaatgcaagtttgtctgggatgtcaactgcctacagatgtttattactagcagaatagattatttattaatagattgtttcttttcatatagtccaatgtttcatcatcaggaactttcggttttaaaaaagaaacattacttttgtctgctaaagtaaacaatatatagggaaattaacacctaggaaaagaaaactggcaagagaattgatgaggtattagtggcttagaagaattagtaatataagttgggaataaaggggtagcccgacagtggtaagtaaaaatgtagtactccattgtttttgctatttaaatataatgtatcaaaaacctttattctaaaatttccacaaatgattccttttatccatcttcttgtaatcctaaaagcatcttctcactatgtgctgtagtttgaaacctaacgaatcctcctacttgagacactgtagaaaagtaaaaattgttgcttctgttttcttttaagaggaaatgagaaggccagcagaagtagattaaaactagagagctggtttattaaaataagcagataattatccaggcttaaagtaatagcttacatgttttgaaaatccttgtacttatttttgtttttattgttgcaaaaaaatgttaatgggctgttgaaatgacctccatttacttaaggtaatccaataaggtcttttttaaatatacaaattttactcaagtttaaattgtataaaactgcttagaaacctgaaattttatagtgtgtaatatcttatgtgtatatagcatcctgagctgtgtgatacagtagatttcttcttagcagaaacatgcgaggtagatttaataaacaacaaaaatcagcttatgtttctacttattgaatctgctttactttttagcaattttcttccttgtgaacatgaaccatataaagtgtctgtgacttaatgatttcatgtaagtctgtcgcatacatccttcttttgtagcttacaccatgtggatgctctgtctgtagacactgcttgataaaaggagaataaacctcttacattttaaaaaaaaaaaaaaaaaaaaaaaagaaaaaaaaaaaaaa

SEQ ID NO: 601 - protein, 847 aa, Homo sapiens
MFKCWSVVLVLGFIFLESEGRPTKEGGYGLKSYQPLMRLRHKQEKNQESSRVKGFMIQDGPFGSCENKYCGLGRHCVTSRETGQAECACMDLCKRHYKPVCGSDGEFYENHCEVHRAACLKKQKITIVHNEDCFFKGDKCKTTEYSKMKNMLLDLQNQKYIMQENENPNGDDISRKKLLVDQMFKYFDADSNGLVDINELTQVIKQEELGKDLFDCTLYVLLKYDDFNADKHLALEEFYRAFQVIQLSLPEDQKLSITAATVGQSAVLSCAIQGTLRPPIIWKRNNIILNNLDLEDINDFGDDGSLYITKVTTTHVGNYTCYADGYEQVYQTHIFQVNVPPVIRVYPESQAREPGVTASLRCHAEGIPKPQLGWLKNGIDITPKLSKQLTLQANGSEVHISNVRYEDTGAYTCIAKNEAGVDEDISSLFVEDSARKTLANILWREEGLGIGNMFYVFYEDGIKVIQPIECEFQRHIKPSEKLLGFQDEVCPKAEGDEVQRCVWASAVNVKDKFIYVAQPTLDRVLIVDVQSQKVVQAVSTDPVPVKLHYDKSHDQVWVLSWGTLEKSSPTLQVITLASGNVPHHTIHTQPVGKQFDRVDDFFIPTTTLIITHMRFGFILHKDEAALQKIDIETMSYIKTINLKDYKCVPQSLAYTHLGGYYFIGCKPDSTGAVSPQVMVDGVTDSVIGFNSDVTGTPYVSPDGHYLVSINDVKGLVRVQYITIRGEIQEAFDIYTNLHISDLAFQPSFTEAHQYNIYGSSSTQTDVLFVELSSGKVKMIKSLKEPLKAEEWPWNRKNRQIQDSGLFGQYLMTPSKDSLFILDGRLNKLNCEITEVEKGNTVIWVGDA

SEQ ID NO: 602 - DNA, 3937 bp, Homo sapiens
gcggcgccctcgtccgcttccaagcccagcacagacttcggtttctccgcctccatcccctttacgagaagaggagatcaaaaaatattgccctttaggtgctcgtgatggtcctgtgggttcgttcagttgccagaaaagaatggtaacatgaacagcggagcgtgagagcgtcaccgggggaagggacgagattgatgggcagagcgctcacttctcagaggatcgcattccgaggaccgcgcgaggaagggacgtcgcggcgccaccacttcctggctggactccgctgacatctgtagcctcctttccaccaggttcccggggctcccagccgctgcctgcagaggagcgtgtagacagcgcgcgagggtccggcacttcgtggacctccatccgaaccggagttctgcccggatcccgagtccctggatcccggtggagcccgccggcaagctggctccggagggagttgaacttgagttcagatggccaactccctctgaatcctgcagattggtgctgagcacgcaacaaaagtttgtagcttctcagtttctggtgcttcgcaggggagaggaaaggaatttgacattaaacacaagaagcagtcagggagccatctcctttaacttttcttctctgttaccatttgcaatgaagaggaaacagaagagatttctgcagatgactttgttgttcacggtggctttaattttcctgcctaacgttggtctctggtctctgtacaaggataagcacctggtgaagtcagcggagcccggggagcagcagacatttccactgggcctgggagatgggcaattctattcatggacagatggtttgagaagaaaggactggcatgactatgaaagcattcagaaagaggctatgcgctcaaggaaaggtgaacatgggaaaccttacccccttactgaagaggaccatgatgactcagcttacagggaaaatggttttaatattttcgtcagcaacaatattgctctagagaggtctctgccagatattcgtcatgctaactgtaagcataagatgtatctggaaaggctgccaaacaccagcatcattatcccatttcataatgaaggttggacttcactcctgcggaccatacacagtataattaaccgaaccccagggagtctgatagcagaaatcattctagtagatgacttcagtgagagagaacacctgaaggataaattggaagaatacatggcccgattttccaaagtgaggattgttcgcaccaagaaaagagaaggactcatccggacccgtctcctgggggcatctatggccagaggagaagtcctgacattcctggactcccactgcgaggtcaatgtgaactggctgcccccactcctcaaccaaattccactaaaccacaaaaccatcgtgtgtcccatgatcgatgtcattgaccacaatcacttcgggtatgaggcacaagctggggatgccatgcgaggagccttcgactgggaaatgtactacaaaagaatccccatccctccagagctccagagggcagatcccagcgacccttttgagtctcctgttatggctggaggtctctttgctgtggatcggaaatggttttgggaattgggtggctatgatccaggtttagaaatctggggaggagaacagtatgaaatctcttttaaggtttggatgtgtggaggagaaatgtttgatgttccatgttctagagttggtcatatctacaggaagtacgttccatacaaagttccatctgggacaagcctggcaagaaacctgaagcgggtagctgagacctggatggatgaatttgccgagtacatttaccagcggcggccggagtacaggcatctctccacgggggacatctctgcccagaaggagctgcgcaagcagctcaagtgcaaggacttcaaatggttcatggctgctgtggcctgggacgtgcctaaatactaccctccagtggagcccccgcctgctgcctggggggagatccgaaatgtggcagcaaatctctgtgtggacagcaagcatggagccaccggaacagagctgaggctggacatctgtgtcaaggatggttctgaaagaacatggtctcatgaacagctttttacctttggatggagagaagatattcgacccggtgagccactgcatacccggaaattctgctttgatgcgatctcacacaacagccccgttacactctatgactgtcatggcatgaaggggaaccagctctggggataccggaaggacagaacattattccatcctgtgagcaacagctgcatggattgcaaccacgcagagaagaagattttcatggccagatgtgaccctctctctgagactcagcagtggatttttgaacacattaatatgactgttttagaaaaatttaaccaccatgccaactcctagaaagaagaaaggaagaaagagtgattacctacaggttataaattaaattttagccagcatctgggtcgaaggagtcaggaataacatttcctcgatccaggaaggctggtttaaaaatttgcaaatgccatgtcaaagtaggttgttttgaagaacttcctgcatctgaagaacttggctgagaatctcaccagctgcttctgagaactcgagactagcagttcccttgctggccaagggcaaagataatttagggacttttcaaaacaactgctgagctaataaatcctagcatttctcaggtcaaatcctgcagtagtgagtagctatgaatggatcctattaactgggtgggaggggggtgaaaatggagtgcatgactgctctgacaacctgaggatatcacaggtttagaactagccaagcttaaggggtgagctgtactctttggtgccattctctgactaagaatgggttcagcaggtttaacccttaaaagtgctgcagatgatttcagagtgctcacactattctgttttttttatttttatttttaaatgagggtgcaatatctaatgtaagacttaaattacataatgaaatggacatccagtgttcccattctttcgtttatatttgccatttttttttcagagcaaagtttcttttttatgaaagttcatgctccatgaatccactgaatttctaattcagtgcccttctatgaatccagttaaaaacaaaagcaaaagcaaaaatctatgctatcaagttactccaaagaaagatttcacagaagcagcaaaaccatataagatttaggagagggacttccctgggaaatctatttttacttttctattatttttaaaatcttaaaagtctgatatttgtccagtcataatttttattaagcaaggaaatggagtgagtttgatgtaatttgtttaggagattcttaaacccaaataaatctacactccaagtgatatgtgaaaatggcttagttcacttcaattctgtttagtcagtggtgggagcttagaagtggttttatttgttcgtttgtttgggttttgcttttgttttttatttttttcttgttttttttttgtagtgttgaattaatgatgttcttttatttggaagctcataaaaggaattaccattaataaagtgtttctgacaccattttctgttaatgggacaatatttcggggatgaagaaaggaatgctccgaaaactaaatggaacacttaatccttaaagcaattttttactgttcaataatatcacattgggggaagaaaacacaggtatcaaggtggttcttgggaaaaaagaatcatgtttattatatatctctcaagtttttttggtataaaaatgttttaactttgctttctttttggtttttgtttgaagttggttttcctgttaataaaaatttatataacaaaaaaaaaaaaaaaa

SEQ ID NO: 603 - protein, 601 aa, Homo sapiens
MKRKQKRFLQMTLLFTVALIFLPNVGLWSLYKDKHLVKSAEPGEQQTFPLGLGDGQFYSWTDGLRRKDWHDYESIQKEAMRSRKGEHGKPYPLTEEDHDDSAYRENGFNIFVSNNIALERSLPDIRHANCKHKMYLERLPNTSIIIPFHNEGWTSLLRTIHSIINRTPGSLIAEIILVDDFSEREHLKDKLEEYMARFSKVRIVRTKKREGLIRTRLLGASMARGEVLTFLDSHCEVNVNWLPPLLNQIPLNHKTIVCPMIDVIDHNHFGYEAQAGDAMRGAFDWEMYYKRIPIPPELQRADPSDPFESPVMAGGLFAVDRKWFWELGGYDPGLEIWGGEQYEISFKVWMCGGEMFDVPCSRVGHIYRKYVPYKVPSGTSLARNLKRVAETWMDEFAEYIYQRRPEYRHLSTGDISAQKELRKQLKCKDFKWFMAAVAWDVPKYYPPVEPPPAAWGEIRNVAANLCVDSKHGATGTELRLDICVKDGSERTWSHEQLFTFGWREDIRPGEPLHTRKFCFDAISHNSPVTLYDCHGMKGNQLWGYRKDRTLFHPVSNSCMDCNHAEKKIFMARCDPLSETQQWIFEHINMTVLEKFNHHANS

SEQ ID NO: 604 - DNA, 10810 bp, Homo sapiens
accagcaggactgatgtgcacacagaaggaatgaagtatggatgtgaaagaacgcaggccttactgctccctgaccaagagcagacgagagaaggaacggcgctacacaaattcctccgcagacaatgaggagtgccgggtacccacacagaagtcctacagttccagcgagacattgaaagcttttgatcatgattcctcgcggctgctttacggcaacagagtgaaggatttggttcacagagaagcagacgagttcactagacaaggacagaattttaccctaaggcagttaggagtttgtgaaccagcaactcgaagaggactggcattttgtgcggaaatggggctccctcacagaggttactctatcagtgcagggtcagatgctgatactgaaaatgaagcagtgatgtccccagagcatgccatgagactttggggcaggggggtcaaatcaggccgcagctcctgcctgtcaagtcggtccaactcagccctcaccctgacagatacggagcacgaaaacaagtccgacagtgagaatgagcaacctgcaagcaatcaaggccagtctaccctgcagcccttgccgccttcccataagcagcactctgcacagcatcatccatccatcacttctctcaacagaaactccctgaccaatagaaggaaccagagtccggccccgccggctgctttgcccgccgagctgcaaaccacacccgagtccgtccagctgcaggacagctgggtccttggcagtaatgtaccactggaaagcaggcatttcctattcaaaacaggaacaggtacaacgccactgttcagtactgcaaccccaggatacacaatggcatctggctctgtttattcaccacctactcggccactacctagaaacaccctatcaagaagtgcttttaaattcaagaagtcttcaaagtactgtagctggaaatgcactgcactgtgtgccgtaggggtctcggtgctcctggcaatactcctgtcttattttatagcaatgcatctctttggcctcaactggcagctacagcagactgaaaatgacacatttgagaatggaaaagtgaattctgataccatgccaacaaacactgtgtcattaccttctggagacaatggaaaattaggtggatttacgcaagaaaataacaccatagattccggagaacttgatattggccgaagagcaattcaagagattcctcccgggatcttctggagatcacagctcttcattgatcagccacagtttcttaaattcaatatctctcttcagaaggatgcattgattggagtatatggccggaaaggcttaccgccttcccatactcagtatgacttcgtggagctcctggatggcagcaggctgattgccagagagcagcggagcctgcttgagacggagagagccgggcggcaggcgagatccgtcagccttcatgaggccggctttatccagtacttggattctggaatctggcatctggctttttataatgatgggaaaaatgcagagcaggtgtcttttaataccattgttatagagtctgtggtggaatgtccccgaaattgccatggaaatggagaatgcgtttctggaacttgccattgttttccaggatttctgggtccggattgttcaagagccgcctgtccagtgttatgtagtggcaacgggcagtactccaagggccgctgcctgtgtttcagcggctggaagggcaccgagtgtgatgtgccgactacccagtgtattgacccacagtgtgggggtcgtgggatttgtatcatgggctcttgtgcttgcaactcaggatacaaaggagaaagttgtgaagaagctgactgtatagaccctgggtgttctaatcatggtgtgtgtatccacggggaatgtcactgcagtccaggatggggaggtagcaattgtgaaatactgaagaccatgtgtccagaccagtgctccggccacggaacgtatcttcaagaaagtggctcctgcacgtgtgaccctaactggactggcccagactgctcaaacgaaatatgttctgtggactgtggctcacacggcgtttgcatgggggggacgtgtcgctgtgaagaaggctggacgggcccagcctgtaatcagagagcctgccacccccgctgtgccgagcacgggacctgcaaggatggcaagtgtgaatgcagccagggctggaatggagagcactgcactatcgagggttgtcctggtctgtgcaacagcaatggaagatgtaccctggaccaaaatggctggcattgtgtgtgccagcctggatggagaggagcaggctgtgacgtagccatggagactctttgcacagatagcaaggacaatgaaggagatggactcattgactgcatggatcccgattgctgcctacagagttcctgccagaatcagccctattgtcggggactgccggatcctcaggacatcattagccaaagccttcaatcgccttctcagcaagctgccaaatccttttatgatcgaatcagtttccttataggatctgatagcacccatgttatacctggagaaagtcctttcaataagagccttgcatctgtcatcagaggccaagtactgactgctgatggaactccacttattggagtaaatgtctcgtttttccattacccagaatatggatatactattacccgccaggacggaatgtttgacttggtggcaaatggtggggcctctctaactttggtatttgaacgatccccattcctcactcagtatcatactgtgtggattccatggaatgtcttttatgtgatggataccctagtcatgaagaaagaagagaatgatattcccagctgtgatctgagtggattcgtgaggccaaatcccatcattgtgtcatcacctttatccacctttttcagatcttctcctgaagacagtcccatcattcccgaaacacaggtactccacgaggaaactacaattccaggaacagatttgaaactctcctacttgagttccagagctgcagggtataagtcagttctcaagatcaccatgacccagtctattattccatttaatttaatgaaggttcatcttatggtagctgtagtaggaagactcttccaaaagtggtttcctgcctcaccaaacttggcctatactttcatatgggataaaacagatgcatataatcagaaagtctatggtctatctgaagctgttgtgtcagttggatatgagtatgagtcgtgtttggacctgactctgtgggaaaagaggactgccattctgcagggctatgaattggatgcgtccaacatgggtggctggacattagataaacatcacgtgctggatgtacagaacggtatactgtacaagggaaacggggaaaaccagttcatctcccagcagcctccagtcgtgagtagcatcatgggcaatgggcgaaggcgcagcatttcctgccccagttgcaatggtcaagctgatggtaacaagttactggccccagtggcgctagcttgtgggatcgatggcagtctgtacgtaggcgatttcaactatgtgcggcggatattcccttctggaaatgtaacaagtgtcttagaactaagcagcaacccagctcatagatactaccttgcaacggatccagtcacgggagatctgtacgtttctgacacaaacacccgcagaatttatcgcccaaagtcacttacgggggcaaaagacttgactaaaaatgcagaagtcgtcgcagggacaggggagcaatgccttccgtttgacgaggcgagatgtggggatggagggaaggccgtggaagccacactcatgagtcccaaaggaatggcagttgataagaatggattaatctactttgttgatggaaccatgattaggaaagttgaccaaaatggaatcatatcaactcttctgggctctaacgatttgacttcagccagacctttaacttgtgacaccagcatgcacatcagccaggtacgtctggaatggcccactgacctagccattaaccctatggataactccatttatgtcctggataataatgtagttttacagatcactgaaaatcgtcaagttcgcattgctgctggacggcccatgcactgtcaggttcccggagtggaatatcctgtggggaagcacgcggtgcagacaacactggaatcagccactgccattgctgtgtcctacagtggggtcctgtacattactgaaactgatgagaagaaaattaaccggataaggcaggtcacaacagatggagaaatctccttagtggccggaataccttcagagtgtgactgcaaaaatgatgccaactgtgactgttaccagagtggagatggctacgccaaggatgccaaactcagtgccccatcctccctggctgcttctccagatggtacactgtatattgcagatctagggaatatccggatccgggctgtgtcaaagaataagcctttacttaactctatgaacttctatgaagttgcgtctccaactgatcaagaactctacatctttgacatcaatggtactcaccaatatactgtaagtttagtcactggtgattacctttacaattttagctacagcaatgacaatgatattactgctgtgacagacagcaatggcaacacccttagaattagacgggacccaaatcgcatgccagttcgagtggtgtctcctgataaccaagtgatatggttgacaataggaacaaatggatgtttgaaaagcatgactgctcaaggactggaattagttttgtttacttaccatggcaatagtggccttttagccactaaaagtgatgaaactggatggacaacgttttttgactatgacagtgaaggtcgtctgacaaatgttacgtttccaactggagtggtcacaaacctgcatggggacatggacaaggctatcacagtggacattgagtcatctagccgagaagaagatgtcagcatcacttcaaatctgtcctcgatcgattctttctacaccatggttcaagatcagttaagaaacagctaccagattggttatgacggctccctcagaattatctacgccagtggcctggactcacactaccaaacagagccgcacgttctggctggcaccgctaatccgacggttgccaaaagaaacatgactttgcctggcgagaacggtcaaaacttggtggaatggagattccgaaaagagcaagcccaagggaaagtcaatgtctttggccgcaagctcagggttaatggcagaaacctcctttcagttgactttgatcgaacaacaaagacagaaaagatctatgacgaccaccgtaaatttctactgaggatcgcctacgacacgtctgggcacccgactctctggctgccaagcagcaagctgatggccgtcaatgtcacctattcatccacaggtcaaattgccagcatccagcgaggcaccactagcgagaaagtagattatgacggacaggggaggatcgtgtctcgggtctttgctgatggtaaaacatggagttacacatatttagaaaagtccatggttcttctgcttcatagccagcggcagtacatcttcgaatacgatatgtgggaccgcctgtctgccatcaccatgcccagtgtggctcgccacaccatgcagaccatccgatccattggctactaccgcaacatatacaaccccccggaaagcaacgcctccatcatcacggactacaacgaggaagggctgcttctacaaacagctttcttgggtacaagtcggagggtcttattcaaatacagaaggcagactaggctctcagaaattttatatgatagcacaagagtcagttttacctatgatgaaacagcaggagtcctaaagacagtaaacctccagagtgatggttttatttgcaccattagatacaggcaaattggtcccctgattgacaggcagattttccgctttagtgaagatgggatggtaaatgcaagatttgactatagctatgacaacagctttcgagtgaccagcatgcagggtgtgatcaatgaaacgccactgcctattgatctgtatcagtttgatgacatttctggcaaagttgagcagtttggaaagtttggagttatatattatgatattaaccagatcatttctacagctgtaatgacctatacgaagcactttgatgctcatggccgtatcaaggagattcaatatgagatattcaggtcgctcatgtactggattacaattcagtatgataacatgggtcgggtaaccaagagagagattaaaatagggccctttgccaacaccaccaaatatgcttatgaatatgatgttgatggacagctccaaacagtttacctcaatgaaaagataatgtggcggtacaactacgatctgaatggaaacctccatttactgaacccaagtaacagtgcgcgtctgacaccccttcgctatgacctgcgagacagaatcactcgactgggtgatgttcaatatcggttggatgaagatggtttcctacgtcaaaggggcacggaaatctttgaatatagctccaaggggcttctaactcgagtttacagtaaaggcagtggctggacagtgatctaccgttatgacggcctgggaaggcgtgtttctagcaaaaccagtctaggacagcacctgcagtttttttatgctgacttaacttatcccactaggattactcatgtctacaaccattcgagttcagaaattacctccctgtattatgatctccaaggacatctttttgccatggaaatcagcagtggggatgaattctatattgcatcggataacacagggacaccactggctgtgttcagtagcaatgggcttatgctgaaacagattcagtacactgcatatggggaaatctattttgactctaatattgactttcaactggtaattggatttcatggtggcctgtatgacccactcaccaaattaatccactttggagaaagagattatgacattttggcaggacggtggacaacacctgacatagaaatctggaaaagaattgggaaggacccagctccttttaacttgtacatgtttaggaataacaaccctgcaagcaaaatccatgacgtgaaagattacatcacagatgttaacagctggctggtgacatttggtttccatctgcacaatgctattcctggattccctgttcccaaatttgatttaacagaaccttcttacgaacttgtgaagagtcagcagtgggatgatataccgcccatcttcggagtccagcagcaagtggcgcggcaggccaaggccttcctgtcgctggggaagatggccgaggtgcaggtgagccggcgccgggccggcggcgcgcagtcctggctgtggttcgccacggtcaagtcgctgatcggcaagggcgtcatgctggccgtcagccagggccgcgtgcagaccaacgtgctcaacatcgccaacgaggactgcatcaaggtggcggccgtgctcaacaacgccttctacctggagaacctgcacttcaccatcgagggcaaggacacgcactacttcatcaagaccaccacgcccgagagcgacctgggcacgctgcggttgaccagcggccgcaaggcgctggagaacggcatcaacgtgacggtgtcgcagtccaccacggtggtgaacggcaggacgcgcaggttcgcggacgtggagatgcagttcggcgcgctggcgctgcacgtgcgctacggcatgaccctggacgaggagaaggcgcgcatcctggagcaggcgcggcagcgcgcgctcgcccgggcctgggcgcgcgagcagcagcgcgtgcgcgacggcgaggagggcgcgcgcctctggacggagggcgagaagcggcagctgctgagcgccggcaaggtgcagggctacgacgggtactacgtactctcggtggagcagtaccccgagctggccgacagcgccaacaacatccagttcctgcggcagagcgagatcggcaggaggtaacgcccgggccgcgcccgccgagccgctcacgccctgcccacattgtcctgtggcacaacccgagtgggactctccaacgcccaagagccttcctcccgggggaatgagactgctgttacgacccacacccacaccgcgaaaacaaggaccgcttttttccgaatgaccttaaaggtgatcggctttaacgaatatgtttacatatgcatagcgctgcactcagtcggactgaacgtagccagaggaaaaaaaaatcatcaaggacaaaggcctcgacctgttgcgctgggccgtctgttccttctaggcactgtatttaactaactttaaaaaagaaaaaaaaatgtgtacagtgtttccaaatagtcccgaattgtcgacctttgcttacaagaagtagtctgtctgcataggatgtgatagctatctctgttcattttacaatgtggggcaaagttactgtttctagacaacccaactgctttccctgtgcagctttgtagaaggacattggcacagtgacttctgcggcggggatttattaatggattttacaatgctaacgtggtttcccttcggggaaaaaactggcaactagaatccttgtcactgataagcaaaggaaatcctgatttttttgtaaattatgtgagacaagttgtttatggatttttatatgaattacaatttactgtacatcaaatcttagtctcagaggagttaatttatgtaaagtgtttaaaaatttatacttaaaaataaaatgataaaaacgtgaactgtgtgatttttttaaaaggattgcaccttttgttatctgttatagctgtacagtatgaattattatattgtagagatataacaacttatgcctataatgtccagaagtgttaatatttttgtattaggttgaaaaaatgtgcaagcttctatcactagatggataggaccgtgcaattctaggtgggtggcgaatcagagagctcctttctcttccctctctcacgcatcaggccagtgtcctcagcattgtcaactgagaggcacagtagacaactagggctggtggaatgtaagggaagaagattgaaaaaacgggaggaagggttctctggccctctctcaaccttgcaagtcaatggggagttgttgatataattaaccccgaggtttttactgttactgttccaaagctctgtctcttgatggaggagagaccacatcagatgctggggaaataggaggaggaaaggttctgatgtagtcgtgatcctaaacacgtgtcttaagatctaggaaagacagcagaaaccgagcagtggtgggtgagccagatggagccggtcagggttactctaagcccacatgaccaaaccatcttggggggctggtttgaatgacagcctctgctctgtctcggggaagccgggggtggcagatccagctggaagtgaactgacagccgcgccctcctgcacacatgcatgcacgcgtgtgggaacgagcccagccgccatctgcacttccgtgtcggctcagctctgacaaatctctttcctgagcactaaattcagccacgaaaatatttttagaagatatttctcagttcatcgagctatagtacacactgttttcctctatgtataatggtgataaaatatagcaagtgaacatgtcgtaaatataaaggttcaagtgatgtattgaaaataattttctaactgctttgtatgtatcacatactctaaattgcacagtaggcgtgtttattaaacagatgattggctgggaaagtttcaaaatagctactgaatttacagtatcagtgctattactgtctttgtgtatttggtagagcataccgaagtaattaatcttctaatgaatgctgatgatattttattagaatgaaagcacagattagcattaatattttttattctggaaatcctttggcaagtattatgaagcccaaatttagaaaactatgagatttcaaaccacataaacatgattctgttttccattttattttttaactgttaggtatttgcagttctgttccgtggaacttctgcaggcctgtatttagcatgctgtaagtacttttgggtgaaataggctctgagtctaaattctcagacatgtttctgatgtattaccatgaaaagcttgtgccacatgacagaagtgagatcatagtcttaacctcttcttgacgtggactggtcttcactcgggcaccgataaataacagatttggagtatctcctggtgcttattttagatgatgaagtcaaatcaacccaattagtgtcctgttagtaggtataatgagcctatttctttctaaaaagacttgtgatctggacatgcttttacaagaaatagtgaccttggggaatatgtaaacaaaagacctttttctaagagttgggagggggtgggggactgtataatgaaaagaattagcttacaaaaaagaaattgatattcaaagtattttaggcaaagccagtcaaaatgctttcatgatattttgagatgtaaattttgtctgatttgtattgttcttttcatttgccttcttaactttatatgtgacctgaattttccataacttgatgactatagattgcacctaggcattccaataaaagccaacccaatgtg

SEQ ID NO: 605 - protein, 2699 aa, Homo sapiens
MDVKERRPYCSLTKSRREKERRYTNSSADNEECRVPTQKSYSSSETLKAFDHDSSRLLYGNRVKDLVHREADEFTRQGQNFTLRQLGVCEPATRRGLAFCAEMGLPHRGYSISAGSDADTENEAVMSPEHAMRLWGRGVKSGRSSCLSSRSNSALTLTDTEHENKSDSENEQPASNQGQSTLQPLPPSHKQHSAQHHPSITSLNRNSLTNRRNQSPAPPAALPAELQTTPESVQLQDSWVLGSNVPLESRHFLFKTGTGTTPLFSTATPGYTMASGSVYSPPTRPLPRNTLSRSAFKFKKSSKYCSWKCTALCAVGVSVLLAILLSYFIAMHLFGLNWQLQQTENDTFENGKVNSDTMPTNTVSLPSGDNGKLGGFTQENNTIDSGELDIGRRAIQEIPPGIFWRSQLFIDQPQFLKFNISLQKDALIGVYGRKGLPPSHTQYDFVELLDGSRLIAREQRSLLETERAGRQARSVSLHEAGFIQYLDSGIWHLAFYNDGKNAEQVSFNTIVIESVVECPRNCHGNGECVSGTCHCFPGFLGPDCSRAACPVLCSGNGQYSKGRCLCFSGWKGTECDVPTTQCIDPQCGGRGICIMGSCACNSGYKGESCEEADCIDPGCSNHGVCIHGECHCSPGWGGSNCEILKTMCPDQCSGHGTYLQESGSCTCDPNWTGPDCSNEICSVDCGSHGVCMGGTCRCEEGWTGPACNQRACHPRCAEHGTCKDGKCECSQGWNGEHCTIEGCPGLCNSNGRCTLDQNGWHCVCQPGWRGAGCDVAMETLCTDSKDNEGDGLIDCMDPDCCLQSSCQNQPYCRGLPDPQDIISQSLQSPSQQAAKSFYDRISFLIGSDSTHVIPGESPFNKSLASVIRGQVLTADGTPLIGVNVSFFHYPEYGYTITRQDGMFDLVANGGASLTLVFERSPFLTQYHTVWIPWNVFYVMDTLVMKKEENDIPSCDLSGFVRPNPIIVSSPLSTFFRSSPEDSPIIPETQVLHEETTIPGTDLKLSYLSSRAAGYKSVLKITMTQSIIPFNLMKVHLMVAVVGRLFQKWFPASPNLAYTFIWDKTDAYNQKVYGLSEAVVSVGYEYESCLDLTLWEKRTAILQGYELDASNMGGWTLDKHHVLDVQNGILYKGNGENQFISQQPPVVSSIMGNGRRRSISCPSCNGQADGNKLLAPVALACGIDGSLYVGDFNYVRRIFPSGNVTSVLELSSNPAHRYYLATDPVTGDLYVSDTNTRRIYRPKSLTGAKDLTKNAEVVAGTGEQCLPFDEARCGDGGKAVEATLMSPKGMAVDKNGLIYFVDGTMIRKVDQNGIISTLLGSNDLTSARPLTCDTSMHISQVRLEWPTDLAINPMDNSIYVLDNNVVLQITENRQVRIAAGRPMHCQVPGVEYPVGKHAVQTTLESATAIAVSYSGVLYITETDEKKINRIRQVTTDGEISLVAGIPSECDCKNDANCDCYQSGDGYAKDAKLSAPSSLAASPDGTLYIADLGNIRIRAVSKNKPLLNSMNFYEVASPTDQELYIFDINGTHQYTVSLVTGDYLYNFSYSNDNDITAVTDSNGNTLRIRRDPNRMPVRVVSPDNQVIWLTIGTNGCLKSMTAQGLELVLFTYHGNSGLLATKSDETGWTTFFDYDSEGRLTNVTFPTGVVTNLHGDMDKAITVDIESSSREEDVSITSNLSSIDSFYTMVQDQLRNSYQIGYDGSLRIIYASGLDSHYQTEPHVLAGTANPTVAKRNMTLPGENGQNLVEWRFRKEQAQGKVNVFGRKLRVNGRNLLSVDFDRTTKTEKIYDDHRKFLLRIAYDTSGHPTLWLPSSKLMAVNVTYSSTGQIASIQRGTTSEKVDYDGQGRIVSRVFADGKTWSYTYLEKSMVLLLHSQRQYIFEYDMWDRLSAITMPSVARHTMQTIRSIGYYRNIYNPPESNASIITDYNEEGLLLQTAFLGTSRRVLFKYRRQTRLSEILYDSTRVSFTYDETAGVLKTVNLQSDGFICTIRYRQIGPLIDRQIFRFSEDGMVNARFDYSYDNSFRVTSMQGVINETPLPIDLYQFDDISGKVEQFGKFGVIYYDINQIISTAVMTYTKHFDAHGRIKEIQYEIFRSLMYWITIQYDNMGRVTKREIKIGPFANTTKYAYEYDVDGQLQTVYLNEKIMWRYNYDLNGNLHLLNPSNSARLTPLRYDLRDRITRLGDVQYRLDEDGFLRQRGTEIFEYSSKGLLTRVYSKGSGWTVIYRYDGLGRRVSSKTSLGQHLQFFYADLTYPTRITHVYNHSSSEITSLYYDLQGHLFAMEISSGDEFYIASDNTGTPLAVFSSNGLMLKQIQYTAYGEIYFDSNIDFQLVIGFHGGLYDPLTKLIHFGERDYDILAGRWTTPDIEIWKRIGKDPAPFNLYMFRNNNPASKIHDVKDYITDVNSWLVTFGFHLHNAIPGFPVPKFDLTEPSYELVKSQQWDDIPPIFGVQQQVARQAKAFLSLGKMAEVQVSRRRAGGAQSWLWFATVKSLIGKGVMLAVSQGRVQTNVLNIANEDCIKVAAVLNNAFYLENLHFTIEGKDTHYFIKTTTPESDLGTLRLTSGRKALENGINVTVSQSTTVVNGRTRRFADVEMQFGALALHVRYGMTLDEEKARILEQARQRALARAWAREQQRVRDGEEGARLWTEGEKRQLLSAGKVQGYDGYYVLSVEQYPELADSANNIQFLRQSEIGRR

SEQ ID NO: 606 - DNA, 10858 bp, Homo sapiens
accagcaggactgatgtgcacacagaaggaatgaagtatggatgtgaaagaacgcaggccttactgctccctgaccaagagcagacgagagaaggaacggcgctacacaaattcctccgcagacaatgaggagtgccgggtacccacacagaagtcctacagttccagcgagacattgaaagcttttgatcatgattcctcgcggctgctttacggcaacagagtgaaggatttggttcacagagaagcagacgagttcactagacaaggacagaattttaccctaaggcagttaggagtttgtgaaccagcaactcgaagaggactggcattttgtgcggaaatggggctccctcacagaggttactctatcagtgcagggtcagatgctgatactgaaaatgaagcagtgatgtccccagagcatgccatgagactttggggcaggggggtcaaatcaggccgcagctcctgcctgtcaagtcggtccaactcagccctcaccctgacagatacggagcacgaaaacaagtccgacagtgagaatgagcaacctgcaagcaatcaaggccagtctaccctgcagcccttgccgccttcccataagcagcactctgcacagcatcatccatccatcacttctctcaacagaaactccctgaccaatagaaggaaccagagtccggccccgccggctgctttgcccgccgagctgcaaaccacacccgagtccgtccagctgcaggacagctgggtccttggcagtaatgtaccactggaaagcaggcatttcctattcaaaacaggaacaggtacaacgccactgttcagtactgcaaccccaggatacacaatggcatctggctctgtttattcaccacctactcggccactacctagaaacaccctatcaagaagtgcttttaaattcaagaagtcttcaaagtactgtagctggaaatgcactgcactgtgtgccgtaggggtctcggtgctcctggcaatactcctgtcttattttatagcaatgcatctctttggcctcaactggcagctacagcagactgaaaatgacacatttgagaatggaaaagtgaattctgataccatgccaacaaacactgtgtcattaccttctggagacaatggaaaattaggtggatttacgcaagaaaataacaccatagattccggagaacttgatattggccgaagagcaattcaagagattcctcccgggatcttctggagatcacagctcttcattgatcagccacagtttcttaaattcaatatctctcttcagaaggatgcattgattggagtatatggccggaaaggcttaccgccttcccatactcagtatgacttcgtggagctcctggatggcagcaggctgattgccagagagcagcggagcctgcttgagacggagagagccgggcggcaggcgagatccgtcagccttcatgaggccggctttatccagtacttggattctggaatctggcatctggctttttataatgatgggaaaaatgcagagcaggtgtcttttaataccattgttatagagtctgtggtggaatgtccccgaaattgccatggaaatggagaatgcgtttctggaacttgccattgttttccaggatttctgggtccggattgttcaagagccgcctgtccagtgttatgtagtggcaacgggcagtactccaagggccgctgcctgtgtttcagcggctggaagggcaccgagtgtgatgtgccgactacccagtgtattgacccacagtgtgggggtcgtgggatttgtatcatgggctcttgtgcttgcaactcaggatacaaaggagaaagttgtgaagaagctgactgtatagaccctgggtgttctaatcatggtgtgtgtatccacggggaatgtcactgcagtccaggatggggaggtagcaattgtgaaatactgaagaccatgtgtccagaccagtgctccggccacggaacgtatcttcaagaaagtggctcctgcacgtgtgaccctaactggactggcccagactgctcaaacgaaatatgttctgtggactgtggctcacacggcgtttgcatgggggggacgtgtcgctgtgaagaaggctggacgggcccagcctgtaatcagagagcctgccacccccgctgtgccgagcacgggacctgcaaggatggcaagtgtgaatgcagccagggctggaatggagagcactgcactatcgctcactatttggataagatagttaaagagggttgtcctggtctgtgcaacagcaatggaagatgtaccctggaccaaaatggctggcattgtgtgtgccagcctggatggagaggagcaggctgtgacgtagccatggagactctttgcacagatagcaaggacaatgaaggagatggactcattgactgcatggatcccgattgctgcctacagagttcctgccagaatcagccctattgtcggggactgccggatcctcaggacatcattagccaaagccttcaatcgccttctcagcaagctgccaaatccttttatgatcgaatcagtttccttataggatctgatagcacccatgttatacctggagaaagtcctttcaataagagccttgcatctgtcatcagaggccaagtactgactgctgatggaactccacttattggagtaaatgtctcgtttttccattacccagaatatggatatactattacccgccaggacggaatgtttgacttggtggcaaatggtggggcctctctaactttggtatttgaacgatccccattcctcactcagtatcatactgtgtggattccatggaatgtcttttatgtgatggataccctagtcatgaagaaagaagagaatgatattcccagctgtgatctgagtggattcgtgaggccaaatcccatcattgtgtcatcacctttatccacctttttcagatcttctcctgaagacagtcccatcattcccgaaacacaggtactccacgaggaaactacaattccaggaacagatttgaaactctcctacttgagttccagagctgcagggtataagtcagttctcaagatcaccatgacccagtctattattccatttaatttaatgaaggttcatcttatggtagctgtagtaggaagactcttccaaaagtggtttcctgcctcaccaaacttggcctatactttcatatgggataaaacagatgcatataatcagaaagtctatggtctatctgaagctgttgtgtcagttggatatgagtatgagtcgtgtttggacctgactctgtgggaaaagaggactgccattctgcagggctatgaattggatgcgtccaacatgggtggctggacattagataaacatcacgtgctggatgtacagaacggtatactgtacaagggaaacggggaaaaccagttcatctcccagcagcctccagtcgtgagtagcatcatgggcaatgggcgaaggcgcagcatttcctgccccagttgcaatggtcaagctgatggtaacaagttactggccccagtggcgctagcttgtgggatcgatggcagtctgtacgtaggcgatttcaactatgtgcggcggatattcccttctggaaatgtaacaagtgtcttagaactaagaaataaagattttagacatagcagcaacccagctcatagatactaccttgcaacggatccagtcacgggagatctgtacgtttctgacacaaacacccgcagaatttatcgcccaaagtcacttacgggggcaaaagacttgactaaaaatgcagaagtcgtcgcagggacaggggagcaatgccttccgtttgacgaggcgagatgtggggatggagggaaggccgtggaagccacactcatgagtcccaaaggaatggcagttgataagaatggattaatctactttgttgatggaaccatgattaggaaagttgaccaaaatggaatcatatcaactcttctgggctctaacgatttgacttcagccagacctttaacttgtgacaccagcatgcacatcagccaggtacgtctggaatggcccactgacctagccattaaccctatggataactccatttatgtcctggataataatgtagttttacagatcactgaaaatcgtcaagttcgcattgctgctggacggcccatgcactgtcaggttcccggagtggaatatcctgtggggaagcacgcggtgcagacaacactggaatcagccactgccattgctgtgtcctacagtggggtcctgtacattactgaaactgatgagaagaaaattaaccggataaggcaggtcacaacagatggagaaatctccttagtggccggaataccttcagagtgtgactgcaaaaatgatgccaactgtgactgttaccagagtggagatggctacgccaaggatgccaaactcagtgccccatcctccctggctgcttctccagatggtacactgtatattgcagatctagggaatatccggatccgggctgtgtcaaagaataagcctttacttaactctatgaacttctatgaagttgcgtctccaactgatcaagaactctacatctttgacatcaatggtactcaccaatatactgtaagtttagtcactggtgattacctttacaattttagctacagcaatgacaatgatattactgctgtgacagacagcaatggcaacacccttagaattagacgggacccaaatcgcatgccagttcgagtggtgtctcctgataaccaagtgatatggttgacaataggaacaaatggatgtttgaaaagcatgactgctcaaggactggaattagttttgtttacttaccatggcaatagtggccttttagccactaaaagtgatgaaactggatggacaacgttttttgactatgacagtgaaggtcgtctgacaaatgttacgtttccaactggagtggtcacaaacctgcatggggacatggacaaggctatcacagtggacattgagtcatctagccgagaagaagatgtcagcatcacttcaaatctgtcctcgatcgattctttctacaccatggttcaagatcagttaagaaacagctaccagattggttatgacggctccctcagaattatctacgccagtggcctggactcacactaccaaacagagccgcacgttctggctggcaccgctaatccgacggttgccaaaagaaacatgactttgcctggcgagaacggtcaaaacttggtggaatggagattccgaaaagagcaagcccaagggaaagtcaatgtctttggccgcaagctcagggttaatggcagaaacctcctttcagttgactttgatcgaacaacaaagacagaaaagatctatgacgaccaccgtaaatttctactgaggatcgcctacgacacgtctgggcacccgactctctggctgccaagcagcaagctgatggccgtcaatgtcacctattcatccacaggtcaaattgccagcatccagcgaggcaccactagcgagaaagtagattatgacggacaggggaggatcgtgtctcgggtctttgctgatggtaaaacatggagttacacatatttagaaaagtccatggttcttctgcttcatagccagcggcagtacatcttcgaatacgatatgtgggaccgcctgtctgccatcaccatgcccagtgtggctcgccacaccatgcagaccatccgatccattggctactaccgcaacatatacaaccccccggaaagcaacgcctccatcatcacggactacaacgaggaagggctgcttctacaaacagctttcttgggtacaagtcggagggtcttattcaaatacagaaggcagactaggctctcagaaattttatatgatagcacaagagtcagttttacctatgatgaaacagcaggagtcctaaagacagtaaacctccagagtgatggttttatttgcaccattagatacaggcaaattggtcccctgattgacaggcagattttccgctttagtgaagatgggatggtaaatgcaagatttgactatagctatgacaacagctttcgagtgaccagcatgcagggtgtgatcaatgaaacgccactgcctattgatctgtatcagtttgatgacatttctggcaaagttgagcagtttggaaagtttggagttatatattatgatattaaccagatcatttctacagctgtaatgacctatacgaagcactttgatgctcatggccgtatcaaggagattcaatatgagatattcaggtcgctcatgtactggattacaattcagtatgataacatgggtcgggtaaccaagagagagattaaaatagggccctttgccaacaccaccaaatatgcttatgaatatgatgttgatggacagctccaaacagtttacctcaatgaaaagataatgtggcggtacaactacgatctgaatggaaacctccatttactgaacccaagtaacagtgcgcgtctgacaccccttcgctatgacctgcgagacagaatcactcgactgggtgatgttcaatatcggttggatgaagatggtttcctacgtcaaaggggcacggaaatctttgaatatagctccaaggggcttctaactcgagtttacagtaaaggcagtggctggacagtgatctaccgttatgacggcctgggaaggcgtgtttctagcaaaaccagtctaggacagcacctgcagtttttttatgctgacttaacttatcccactaggattactcatgtctacaaccattcgagttcagaaattacctccctgtattatgatctccaaggacatctttttgccatggaaatcagcagtggggatgaattctatattgcatcggataacacagggacaccactggctgtgttcagtagcaatgggcttatgctgaaacagattcagtacactgcatatggggaaatctattttgactctaatattgactttcaactggtaattggatttcatggtggcctgtatgacccactcaccaaattaatccactttggagaaagagattatgacattttggcaggacggtggacaacacctgacatagaaatctggaaaagaattgggaaggacccagctccttttaacttgtacatgtttaggaataacaaccctgcaagcaaaatccatgacgtgaaagattacatcacagatgttaacagctggctggtgacatttggtttccatctgcacaatgctattcctggattccctgttcccaaatttgatttaacagaaccttcttacgaacttgtgaagagtcagcagtgggatgatataccgcccatcttcggagtccagcagcaagtggcgcggcaggccaaggccttcctgtcgctggggaagatggccgaggtgcaggtgagccggcgccgggccggcggcgcgcagtcctggctgtggttcgccacggtcaagtcgctgatcggcaagggcgtcatgctggccgtcagccagggccgcgtgcagaccaacgtgctcaacatcgccaacgaggactgcatcaaggtggcggccgtgctcaacaacgccttctacctggagaacctgcacttcaccatcgagggcaaggacacgcactacttcatcaagaccaccacgcccgagagcgacctgggcacgctgcggttgaccagcggccgcaaggcgctggagaacggcatcaacgtgacggtgtcgcagtccaccacggtggtgaacggcaggacgcgcaggttcgcggacgtggagatgcagttcggcgcgctggcgctgcacgtgcgctacggcatgaccctggacgaggagaaggcgcgcatcctggagcaggcgcggcagcgcgcgctcgcccgggcctgggcgcgcgagcagcagcgcgtgcgcgacggcgaggagggcgcgcgcctctggacggagggcgagaagcggcagctgctgagcgccggcaaggtgcagggctacgacgggtactacgtactctcggtggagcagtaccccgagctggccgacagcgccaacaacatccagttcctgcggcagagcgagatcggcaggaggtaacgcccgggccgcgcccgccgagccgctcacgccctgcccacattgtcctgtggcacaacccgagtgggactctccaacgcccaagagccttcctcccgggggaatgagactgctgttacgacccacacccacaccgcgaaaacaaggaccgcttttttccgaatgaccttaaaggtgatcggctttaacgaatatgtttacatatgcatagcgctgcactcagtcggactgaacgtagccagaggaaaaaaaaatcatcaaggacaaaggcctcgacctgttgcgctgggccgtctgttccttctaggcactgtatttaactaactttaaaaaagaaaaaaaaatgtgtacagtgtttccaaatagtcccgaattgtcgacctttgcttacaagaagtagtctgtctgcataggatgtgatagctatctctgttcattttacaatgtggggcaaagttactgtttctagacaacccaactgctttccctgtgcagctttgtagaaggacattggcacagtgacttctgcggcggggatttattaatggattttacaatgctaacgtggtttcccttcggggaaaaaactggcaactagaatccttgtcactgataagcaaaggaaatcctgatttttttgtaaattatgtgagacaagttgtttatggatttttatatgaattacaatttactgtacatcaaatcttagtctcagaggagttaatttatgtaaagtgtttaaaaatttatacttaaaaataaaatgataaaaacgtgaactgtgtgatttttttaaaaggattgcaccttttgttatctgttatagctgtacagtatgaattattatattgtagagatataacaacttatgcctataatgtccagaagtgttaatatttttgtattaggttgaaaaaatgtgcaagcttctatcactagatggataggaccgtgcaattctaggtgggtggcgaatcagagagctcctttctcttccctctctcacgcatcaggccagtgtcctcagcattgtcaactgagaggcacagtagacaactagggctggtggaatgtaagggaagaagattgaaaaaacgggaggaagggttctctggccctctctcaaccttgcaagtcaatggggagttgttgatataattaaccccgaggtttttactgttactgttccaaagctctgtctcttgatggaggagagaccacatcagatgctggggaaataggaggaggaaaggttctgatgtagtcgtgatcctaaacacgtgtcttaagatctaggaaagacagcagaaaccgagcagtggtgggtgagccagatggagccggtcagggttactctaagcccacatgaccaaaccatcttggggggctggtttgaatgacagcctctgctctgtctcggggaagccgggggtggcagatccagctggaagtgaactgacagccgcgccctcctgcacacatgcatgcacgcgtgtgggaacgagcccagccgccatctgcacttccgtgtcggctcagctctgacaaatctctttcctgagcactaaattcagccacgaaaatatttttagaagatatttctcagttcatcgagctatagtacacactgttttcctctatgtataatggtgataaaatatagcaagtgaacatgtcgtaaatataaaggttcaagtgatgtattgaaaataattttctaactgctttgtatgtatcacatactctaaattgcacagtaggcgtgtttattaaacagatgattggctgggaaagtttcaaaatagctactgaatttacagtatcagtgctattactgtctttgtgtatttggtagagcataccgaagtaattaatcttctaatgaatgctgatgatattttattagaatgaaagcacagattagcattaatattttttattctggaaatcctttggcaagtattatgaagcccaaatttagaaaactatgagatttcaaaccacataaacatgattctgttttccattttattttttaactgttaggtatttgcagttctgttccgtggaacttctgcaggcctgtatttagcatgctgtaagtacttttgggtgaaataggctctgagtctaaattctcagacatgtttctgatgtattaccatgaaaagcttgtgccacatgacagaagtgagatcatagtcttaacctcttcttgacgtggactggtcttcactcgggcaccgataaataacagatttggagtatctcctggtgcttattttagatgatgaagtcaaatcaacccaattagtgtcctgttagtaggtataatgagcctatttctttctaaaaagacttgtgatctggacatgcttttacaagaaatagtgaccttggggaatatgtaaacaaaagacctttttctaagagttgggagggggtgggggactgtataatgaaaagaattagcttacaaaaaagaaattgatattcaaagtattttaggcaaagccagtcaaaatgctttcatgatattttgagatgtaaattttgtctgatttgtattgttcttttcatttgccttcttaactttatatgtgacctgaattttccataacttgatgactatagattgcacctaggcattccaataaaagccaacccaatgtg

SEQ ID NO: 607 - protein, 2715 aa, Homo sapiens
MDVKERRPYCSLTKSRREKERRYTNSSADNEECRVPTQKSYSSSETLKAFDHDSSRLLYGNRVKDLVHREADEFTRQGQNFTLRQLGVCEPATRRGLAFCAEMGLPHRGYSISAGSDADTENEAVMSPEHAMRLWGRGVKSGRSSCLSSRSNSALTLTDTEHENKSDSENEQPASNQGQSTLQPLPPSHKQHSAQHHPSITSLNRNSLTNRRNQSPAPPAALPAELQTTPESVQLQDSWVLGSNVPLESRHFLFKTGTGTTPLFSTATPGYTMASGSVYSPPTRPLPRNTLSRSAFKFKKSSKYCSWKCTALCAVGVSVLLAILLSYFIAMHLFGLNWQLQQTENDTFENGKVNSDTMPTNTVSLPSGDNGKLGGFTQENNTIDSGELDIGRRAIQEIPPGIFWRSQLFIDQPQFLKFNISLQKDALIGVYGRKGLPPSHTQYDFVELLDGSRLIAREQRSLLETERAGRQARSVSLHEAGFIQYLDSGIWHLAFYNDGKNAEQVSFNTIVIESVVECPRNCHGNGECVSGTCHCFPGFLGPDCSRAACPVLCSGNGQYSKGRCLCFSGWKGTECDVPTTQCIDPQCGGRGICIMGSCACNSGYKGESCEEADCIDPGCSNHGVCIHGECHCSPGWGGSNCEILKTMCPDQCSGHGTYLQESGSCTCDPNWTGPDCSNEICSVDCGSHGVCMGGTCRCEEGWTGPACNQRACHPRCAEHGTCKDGKCECSQGWNGEHCTIAHYLDKIVKEGCPGLCNSNGRCTLDQNGWHCVCQPGWRGAGCDVAMETLCTDSKDNEGDGLIDCMDPDCCLQSSCQNQPYCRGLPDPQDIISQSLQSPSQQAAKSFYDRISFLIGSDSTHVIPGESPFNKSLASVIRGQVLTADGTPLIGVNVSFFHYPEYGYTITRQDGMFDLVANGGASLTLVFERSPFLTQYHTVWIPWNVFYVMDTLVMKKEENDIPSCDLSGFVRPNPIIVSSPLSTFFRSSPEDSPIIPETQVLHEETTIPGTDLKLSYLSSRAAGYKSVLKITMTQSIIPFNLMKVHLMVAVVGRLFQKWFPASPNLAYTFIWDKTDAYNQKVYGLSEAVVSVGYEYESCLDLTLWEKRTAILQGYELDASNMGGWTLDKHHVLDVQNGILYKGNGENQFISQQPPVVSSIMGNGRRRSISCPSCNGQADGNKLLAPVALACGIDGSLYVGDFNYVRRIFPSGNVTSVLELRNKDFRHSSNPAHRYYLATDPVTGDLYVSDTNTRRIYRPKSLTGAKDLTKNAEVVAGTGEQCLPFDEARCGDGGKAVEATLMSPKGMAVDKNGLIYFVDGTMIRKVDQNGIISTLLGSNDLTSARPLTCDTSMHISQVRLEWPTDLAINPMDNSIYVLDNNVVLQITENRQVRIAAGRPMHCQVPGVEYPVGKHAVQTTLESATAIAVSYSGVLYITETDEKKINRIRQVTTDGEISLVAGIPSECDCKNDANCDCYQSGDGYAKDAKLSAPSSLAASPDGTLYIADLGNIRIRAVSKNKPLLNSMNFYEVASPTDQELYIFDINGTHQYTVSLVTGDYLYNFSYSNDNDITAVTDSNGNTLRIRRDPNRMPVRVVSPDNQVIWLTIGTNGCLKSMTAQGLELVLFTYHGNSGLLATKSDETGWTTFFDYDSEGRLTNVTFPTGVVTNLHGDMDKAITVDIESSSREEDVSITSNLSSIDSFYTMVQDQLRNSYQIGYDGSLRIIYASGLDSHYQTEPHVLAGTANPTVAKRNMTLPGENGQNLVEWRFRKEQAQGKVNVFGRKLRVNGRNLLSVDFDRTTKTEKIYDDHRKFLLRIAYDTSGHPTLWLPSSKLMAVNVTYSSTGQIASIQRGTTSEKVDYDGQGRIVSRVFADGKTWSYTYLEKSMVLLLHSQRQYIFEYDMWDRLSAITMPSVARHTMQTIRSIGYYRNIYNPPESNASIITDYNEEGLLLQTAFLGTSRRVLFKYRRQTRLSEILYDSTRVSFTYDETAGVLKTVNLQSDGFICTIRYRQIGPLIDRQIFRFSEDGMVNARFDYSYDNSFRVTSMQGVINETPLPIDLYQFDDISGKVEQFGKFGVIYYDINQIISTAVMTYTKHFDAHGRIKEIQYEIFRSLMYWITIQYDNMGRVTKREIKIGPFANTTKYAYEYDVDGQLQTVYLNEKIMWRYNYDLNGNLHLLNPSNSARLTPLRYDLRDRITRLGDVQYRLDEDGFLRQRGTEIFEYSSKGLLTRVYSKGSGWTVIYRYDGLGRRVSSKTSLGQHLQFFYADLTYPTRITHVYNHSSSEITSLYYDLQGHLFAMEISSGDEFYIASDNTGTPLAVFSSNGLMLKQIQYTAYGEIYFDSNIDFQLVIGFHGGLYDPLTKLIHFGERDYDILAGRWTTPDIEIWKRIGKDPAPFNLYMFRNNNPASKIHDVKDYITDVNSWLVTFGFHLHNAIPGFPVPKFDLTEPSYELVKSQQWDDIPPIFGVQQQVARQAKAFLSLGKMAEVQVSRRRAGGAQSWLWFATVKSLIGKGVMLAVSQGRVQTNVLNIANEDCIKVAAVLNNAFYLENLHFTIEGKDTHYFIKTTTPESDLGTLRLTSGRKALENGINVTVSQSTTVVNGRTRRFADVEMQFGALALHVRYGMTLDEEKARILEQARQRALARAWAREQQRVRDGEEGARLWTEGEKRQLLSAGKVQGYDGYYVLSVEQYPELADSANNIQFLRQSEIGRR

SEQ ID NO: 608 - DNA, 6492 bp, Homo sapiens
tcatttgctgattgtgttggggatgagctgccgtggggatgggaagcagggtttgaccctcagattggtgtctactacatcgatcgcatcaacaaaaccacgcagatagaagatccaagaaaacaatggaggggggaacaggagaagatgctcaaggactacctctctgtggcacaggatgccctccggacacagaaggaactgtaccatgtgaaggagcagaggctggcgctggccctggatgaatacgtgcgattaaatgatgcctataaggaaaagtcaagttctcacacaagcttattctcaggatcttcatccagtactaaatatgatcccgatattttaaaagctgagatctccactacaagattaaggaattgataaaaaaatgtctggaggccagagcgggtatgaactcagtgaagccaaagccattctaacagaactaaaatctatcagaaaggcaattagctcaggagaaaaagaaaaacaagatctgatgcagagtcttgctaagctgcaggagcggtttcatttggatcagaacattggcagatctgagccagatttgagatgtagtcctgtgaactctcatttatgtctctccagacagacccttgatgctgggtcacaaacaagcatttccggagatattggagtaagaagtagatcaaatttagctgaaaaggtcaggctaagcctacagtatgaagaagccaaaagaagtatggccaacttaaaaattgaactgtcaaaattggacagtgaggcctggcctggggcactggatattgagaaggaaaaactgatgctgattaatgaaaaagaagaacttttgaaagagcttcagttcgtcaccccacagaaacgtacccaagatgaattagaacgcctagaagctgaaaggcagcggctggaagaagagttgctgtctgtgaggggaacaccaagcagagctctggccgagagattgagattggaagagagaagaaaagagctgctacagaaacttgaagaaactactaaattaactacttatttgcattcacaacttaaaagcctctctgccagcaccctgtccatgtcatctgggagcagcctgggttccctggcatcgagtcggggctctctgaacacctccagcagagggtcactcaactccctcagttccaccgaactctattacagcagtcaaagtgatcagatagatgtggattatcagtataaactggacttccttctgcaagagaaaagcggttacattccttctggacccatcaccaccatccatgaaaacgaggtggtcaagtcccctagccagcctggccagagtggactctgtggagtggcagctgcagcaacaggccacactcctccactggctgaggccccgaagtctgtggcctccctgtcctcgaggtcctccctttcctccttgtctcctccaggctctcccttggttttggaaggcacgtttcccatgtcttcttctcatgatgcctctctccatcagttcactgctgactttgaagactgtgagttgagtagccattttgcagatatcagcctcatcgaaaatcagattttgctggattctgattcaggaggagcctcccagtctctttcagaggataaagaccttaatgaatgtgctagggagccattatatgaaggaactgcagatgtggaaaaatcattaccaaaaagaagagtgatccacttgcttggggagaaaaccacttgtgtgtcggctgctgtgtctgatgagtctgtggctggagacagtggggtctatgaagctttcgtgaaacaacctagtgaaatggaagatgtcacatacagtgaagaggatgtagccattgtagagaccgcccaggttcagataggactcagatacaatgcaaaaagttcaagtttcatggtgattatagcacagctccgaaaccttcatgccttcttgatacctcatacttcaaaagtatattttagggttgccgttcttccttcctcaactgatgtcagctgtctgtttcgcacaaaagttcatccgcccacagaatccattttattcaatgatgtgttcagagtcgccatttcccaaacagccttacaacagaagacactgagggtagacctttgctctgtcagtaaacaccgaagggaagaatgcctggctggaactcagatcagcctggcagatttaccattttccagtgagtttttcactctatggtataacttgcttccttccaagcaaatgccttgcaaaaagaatgaagaaaatgaggactctgtatttcaaccaaaccagccgttagtagattctatagacttggatgcagtgtcagccttacttgcaagaacatcagctgagttgttagctgtggaacaagaattagcacaagaagaagaagaagaatcaggacaagaagagccaaggggcccagatggagactggctaacaatgctaagagaggcctctcatgaaattgtggctgaaaaagaggctgaagttaaattgccagaggacagtagctgtacagaagatttaagttcatgcactagtgtgcctgagatgaatgaagacgggaacaggaaagaaagcaactgtgccaaagacctcagaagtcagccacctactagaataccaacactggttgacaaagagacaaacacttatgaagccgctaatgacaatatggcagttcgccccaaagagcgcagcagcctgagctctagacagcatccgtttgtgaggagcagtgtgatagtgcgctcacagaccttttctccaggagagcggaaccagtacatctgcaggttaaatcggagtgacagtgacagttcaaccctggctaaaaaatcactgtttgtgagaaactccaccgaacgccgcagtttgagggtcaaaaggacggtttgccagtcagtccttagaagaacaacacaggaatgcccagtgcggacatctctagacttagaactggaccttcaggcatctctgacccggcagagccgcctcaatgatgagctgcaggcgctgagggacttgcggcagaagctggaggaactgaaagctcagggagagactgaccttccaccaggcgtgctggaggatgagaggttccagaggcttctgaagcaagctgagaagcaggctgaacagtccaaagaagagcagaagcaaggtctgaatgcagagaagttgatgaggcaagtctccaaggacgtgtgtcggctccgggagcagagccagaaggtgcctcggcaggtgcagtccttcagggagaagattgcctacttcaccagagcaaagataagcatcccatccctgccagctgatgatgtgtgattacatgacttaagaaattattttttcatctgttcactttcttagggagggtaaaagactgaagatttgtgtttttgttttggtgtttggttttttttggtaacgtaactgtcaactcttgaagaacttttatttcacatcagattttcaacacattaatttgtaaagtaccttgagtgtaatttttatatgcttaaaaaagaaaaaatcatataagaaagatgggataacctggtacacaaatgttgcccagtatgtgcgcattgccagtggacttcattttgtaaaaatggaatagaggcagtaccccaccatgtgtactgttgagccggctgttgagaaacaacttggttcagccggtggttttgcttctcctttgtgttcctgtgagtaggctgtgccgatggcagcagcgccacgtggtatctgtgcgctggcgaggagaggagcgctttccatttggaggcagtgtgagcacacgctggagtgcagcgttccaaagtccgcccgaaatggatgctgcgtccacggccatcacctgtgcgggaacacctggtttccttaagacaatttcctttttgtccttttatatttttctaaagaaaactaagatataaactaccaagtgctcttaagaataaaaataagaataagaatacaaaggagcactactcttggctacacgaaagatcttgggattcatgacactgagggcagggagaagaaagaacaccagccacgcagagatacaaataagctcatcaaatgagcagctggtttgtctcactcagcctgaatttgcattaagtgttcaaaagtgggtttctggcttgcactagtgttttgccctaaatctaaggatggtgcctagtggtggccctgtgttctgaggacagagagagctggaggggtggagggaaatgcatcggcactcatttggtgtaaccaagaagagggggaaagatgtcttgatagaatcaaagttgccaaaaacaaagaagagtttatcaagcagatttctaacatttagtggaaactacttcatagctctcatttttagggggttctatctataatttatggtaaatagttgggaggcaaagggaagaatgtgtgtgggaggattattaatttgaagtataagctaaattgtttattaaaaagcctattttggatgaacaagtttagagagataaactgactaatgtgtcctccagtttagaatttcaccttacccgacccaggcacttcttaaaaacacagatcctcagtgcagctctgccagcatcaaggcttttaaaatatgtagtatttaggccatttaaaccatacttattactcaataacccaagaaacaattttgggttagccatctaatatagcaaataaaatagattttttaaagaaatccaaaattgtcttaaaggaatggaccccttgaagaaaaaaaaaaaaagttttgttcctcagttagaatgctcactagctcactagcaagaatttttattttcttgaaagcaattatatatattttggaaagttcatgttattggaattgaagttcaaattaagcaacttctgagcctagaactttaattactttttcctaaatgtcccaacacttacatacaaatttctttgaagacataactggacatggcagacactgctttgaacaaaaaccagcctagtgaattgactgagtacagtcctttaaggctgcccagttcattctattagatgactaaggaaaactagaaaaagaatacagttcacccttgtcaaggtgaaatgtgaaagacagaagtttatttaatgtagaggtaaatgaaggtgagctgttttcagcatcttagtttgaccatgaaaatgtctatagaattatgtgtagttgttccgtacgattttattttcttcatttatttatttacagtcttatttatgttctgtttaatatatagtttgattctggccattttaaatatttgacacagaagagactatattggaatatttacagctttataagtctttcatcagattagctgttgactttttgtaatacaaaaagtttcagacaagtattaaagaataaaatctgtctcaggctggtagttagcagttgtgaccaagatgcttttggttgttgtatttcacaaaatttcctcatttctaacatgagagatgaacttattttaatataatcctttttctacactttaaaagtcagcaatagtgttatgtatttataggcagcttttaataatcttgtcatatttgtactaacccaaatgattcacagtgacaaaacattttaataacttgatcacaaaaccatatggacaaatatgaattttaatattataaatactatttttaaaaggtagaatttattcgcacagggtaaaaagaatgtaatatttagttctcaagtttgaattatcagtatattattacaattttgtatatcagaatcttaagtgttacaggtacaaaaagaatattgctagccaaatgaacaaagtttagctaaatctctgtagcatgcaaatcaaataaattaaaattttttgctattgctttatctatattgtcttaaatatcaaaagctcaggactgaacttaatatttaatcaggttaaattctgaacatgtttctgttttaatttgtcttgtttgtaaacgtatgcaaatacatcacatagattaactggtttctgcgctttccatgtgtttgtgggtggaaaaaaattcagtggtttttttttaaaaaaaaaagcaaaaacaaagctacatattgcctaatactctatttcagtgtcgtttattgttcagtttatttccctgattggcacaaacacaagagtttccttgaaccatgtaccaagcaaatacaaaatatttcatgaagaaatccccaggctggcagtttgtgatgaatagttcttgttggaactatatgtattgctgataaaaaaggacgaagtattttcattgagcaaataaaatgaagggctccagaaaaaaaaaaaaaaaaaaaaaaaaaaaaaaaaaaaaaaaaaaaaaaaaaaaaaaaaaaaaaaaaaaaaaaaaaaaaaaaaaaaaaaaaaaaaaaaaaaaaaaaaaaaaaaaaaaaaaaa

SEQ ID NO: 609 - protein, 987 aa, Homo sapiens
MSGGQSGYELSEAKAILTELKSIRKAISSGEKEKQDLMQSLAKLQERFHLDQNIGRSEPDLRCSPVNSHLCLSRQTLDAGSQTSISGDIGVRSRSNLAEKVRLSLQYEEAKRSMANLKIELSKLDSEAWPGALDIEKEKLMLINEKEELLKELQFVTPQKRTQDELERLEAERQRLEEELLSVRGTPSRALAERLRLEERRKELLQKLEETTKLTTYLHSQLKSLSASTLSMSSGSSLGSLASSRGSLNTSSRGSLNSLSSTELYYSSQSDQIDVDYQYKLDFLLQEKSGYIPSGPITTIHENEVVKSPSQPGQSGLCGVAAAATGHTPPLAEAPKSVASLSSRSSLSSLSPPGSPLVLEGTFPMSSSHDASLHQFTADFEDCELSSHFADISLIENQILLDSDSGGASQSLSEDKDLNECAREPLYEGTADVEKSLPKRRVIHLLGEKTTCVSAAVSDESVAGDSGVYEAFVKQPSEMEDVTYSEEDVAIVETAQVQIGLRYNAKSSSFMVIIAQLRNLHAFLIPHTSKVYFRVAVLPSSTDVSCLFRTKVHPPTESILFNDVFRVAISQTALQQKTLRVDLCSVSKHRREECLAGTQISLADLPFSSEFFTLWYNLLPSKQMPCKKNEENEDSVFQPNQPLVDSIDLDAVSALLARTSAELLAVEQELAQEEEEESGQEEPRGPDGDWLTMLREASHEIVAEKEAEVKLPEDSSCTEDLSSCTSVPEMNEDGNRKESNCAKDLRSQPPTRIPTLVDKETNTYEAANDNMAVRPKERSSLSSRQHPFVRSSVIVRSQTFSPGERNQYICRLNRSDSDSSTLAKKSLFVRNSTERRSLRVKRTVCQSVLRRTTQECPVRTSLDLELDLQASLTRQSRLNDELQALRDLRQKLEELKAQGETDLPPGVLEDERFQRLLKQAEKQAEQSKEEQKQGLNAEKLMRQVSKDVCRLREQSQKVPRQVQSFREKIAYFTRAKISIPSLPADDV

SEQ ID NO: 610 - DNA, 522 bp, Homo sapiens
atgggactctggcaaacctgtgtcatccaagaggaagtggggatgcaatgcaaggactttgactccttcctggctttgcctgctgaactcagggtctccaggatcttaatgtttctgtcaaatgggctgggatttctgggcctgctggtctctgggtttggcctggactgtttgagaattggagagagtcagagagatctcaagaggcgactgctgatcctgggaggaattctgtcctgggcctcgggagtcacagccctggttcccgtctcttgggttgcccacaagacggttcaggagttctgggatgagaacgtcccagactttgtccccaggtgggagtttggggaggccctgtttctgggctggtttgctggactttctcttctgctaggagggtgtctgctccactgtgcagcctgctccagccacgctcccctagcttcgggccactacgcagtggcacaaacacaagatcatcatcaagaactggagacgagaaacaccaacctgaaacactaa

SEQ ID NO: 611 - protein, 173 aa, Homo sapiens
MGLWQTCVIQEEVGMQCKDFDSFLALPAELRVSRILMFLSNGLGFLGLLVSGFGLDCLRIGESQRDLKRRLLILGGILSWASGVTALVPVSWVAHKTVQEFWDENVPDFVPRWEFGEALFLGWFAGLSLLLGGCLLHCAACSSHAPLASGHYAVAQTQDHHQELETRNTNLKH

SEQ ID NO: 612 - DNA, 14773 bp, Homo sapiens
ctgggcggccgggcgcggggagagggcgcgggagcggctcgtgcggcaggtaccatgcggacgcgcgagcccggcgagggccccggcaggcccggtccctgctcgggggcgcgctgagacggcgggtgagctccacgagagcgccgtcgccacttcgggccaactttgcgattcccgacagttaagcaatggggagacatttggctttgctcctgcttctgctccttctcttccaacattttggagacagtgatggcagccaacgacttgaacagactcctctgcagtttacacacctcgagtacaacgtcaccgtgcaggagaactctgcagctaagacttatgtggggcatcctgtcaagatgggtgtttacattacacatccagcgtgggaagtaaggtacaaaattgtttccggagacagtgaaaacctgttcaaagctgaagagtacattctcggagacttttgctttctaagaataaggaccaaaggaggaaatacagctattcttaatagagaagtgaaggatcactacacattgatagtgaaagcacttgaaaaaaatactaatgtggaggcgcgaacaaaggtcagggtgcaggtgctggatacaaatgacttgagaccgttattctcacccacctcatacagcgtttctttacctgaaaacacagctataaggaccagtatcgcaagagtcagcgccacggatgcagacataggaaccaacggggaattttactacagttttaaagatcgaacagatatgtttgctattcacccaaccagtggtgtgatagtgttaactggtagacttgattacctagagaccaagctctatgagatggaaatcctcgctgcggaccgtggcatgaagttgtatgggagcagtggcatcagcagcatggccaagctaacggtgcacatcgaacaggccaatgaatgtgctccggtgataacagcagtgacattgtcaccatcagaactggacagggacccagcatatgcaattgtgacagtggatgactgcgatcagggtgccaatggtgacatagcatctttaagcatcgtggcaggtgaccttctccagcagtttagaacagtgaggtcctttccagggagtaaggagtataaagtcaaagccatcggtggcattgattgggacagtcatcctttcggctacaatctcacactacaggctaaagataaaggaactccgccccagttctcttctgttaaagtcattcacgtgacttctccacagttcaaagccgggccagtcaagtttgaaaaggatgtttacagagcagaaataagtgaatttgctcctcccaacacacctgtggtcatggtaaaggccattcctgcttattcccatttgaggtatgtttttaaaagtacacctggaaaagctaaattcagtttaaattacaacactggtctcatttctattttagaaccagttaaaagacagcaggcagcccattttgaacttgaagtaacaacaagtgacagaaaagcgtccaccaaggtcttggtgaaagtcttaggtgcaaatagcaatccccctgaatttacccagacagcgtacaaagctgcttttgatgagaacgtgcccattggtactactgtcatgagcctgagtgccgtagaccctgatgagggtgagaacgggtacgtgacatacagtatcgcaaatttaaatcatgtgccgtttgcgattgaccatttcactggtgccgtgagtacgtcagaaaacctggactacgaactgatgcctcgggtttatactctgaggattcgtgcatcagactggggcttgccgtaccgccgggaagtcgaagtccttgctacaattactctcaataacttgaatgacaacacacctttgtttgagaaaataaattgtgaagggacaattcccagagatctaggcgtgggagagcaaataaccactgtttctgctattgatgcagatgaacttcagttggtacagtatcagattgaagctggaaatgaactggatttctttagtttaaaccccaactcgggggtattgtcattaaagcgatcgctaatggatggcttaggtgcaaaggtgtctttccacagtctgagaatcacagctacagatggagaaaattttgccacaccattatatatcaacataacagtggctgccagtcacaagctggtaaacttgcagtgtgaagagactggtgttgccaaaatgctggcagagaagctcctgcaggcaaataaattacacaaccagggagaggtggaggatattttcttcgattctcactctgtcaatgctcacataccgcagtttagaagcactcttccgactggtattcaggtaaaggaaaaccagcctgtgggttccagtgtaattttcatgaactccactgaccttgacactggcttcaatggaaaactggtctatgctgtttctggaggaaatgaggatagttgcttcatgattgatatggaaacaggaatgctgaaaattttatctcctcttgaccgtgaaacaacagacaaatacaccctgaatattaccgtctatgaccttgggataccccagaaggctgcgtggcgtcttctacatgtcgtggttgtcgatgccaatgataatccacccgagtttttacaggagagctattttgtggaagtgagtgaagacaaggaggtacatagtgaaatcatccaggttgaagccacagataaagacctggggcccaacggacacgtgacgtactcaattgttacagacacagacacattttcaattgacagcgtgacgggtgttgttaacatcgcacgccctctggatcgagagctgcagcatgagcactccttaaagattgaggccagggaccaagccagagaagagcctcagctgttctccactgtcgttgtgaaagtatcactagaagatgttaatgacaacccacctacatttattccacctaattatcgtgtgaaagtccgagaggatcttccagaaggaaccgtcatcatgtggttagaagcccacgatcctgatttaggtcagtctggtcaggtgagatacagccttctggaccacggagaaggaaacttcgatgtggataaactcagtggagcagttaggatcgtccagcagttggactttgagaagaagcaagtgtataatctcactgtgagggccaaagacaagggaaagccagtttctctgtcttctacttgctatgttgaagttgaggtggttgatgtgaatgagaacctgcacccacccgtgttttccagctttgtggaaaaggggacagtgaaagaagatgcacctgttggttcattggtaatgacggtgtcggctcatgatgaggacgccagaagagatggggagatccgatactccattagagatggctctggcgttggtgttttcaaaataggtgaagagacaggtgtcatagagacgtcagatcgactggaccgtgaatcgacctcccattattggctaacagtctttgcaaccgatcagggtgtcgtgcctctttcatcgttcatagagatctacatagaggttgaggatgtcaatgacaatgcaccacagacatcagagcctgtttattacccagaaatcatggaaaattctcctaaagatgtatctgtggtccagatcgaggcatttgatccagattcgagctctaatgacaagctcatgtacaaaattacaagtggaaatccacaaggattcttttcaatacatcctaaaacaggtctcatcacaactacgtcaaggaagctagaccgagaacagcaagatgaacacatattagaggttactgtgacagacaatggtagtccccccaaatcaaccattgcaagagtcattgtgaaaatccttgatgaaaatgacaacaaacctcagtttctgcaaaagttctacaaaatcagactccctgagcgggaaaagccagaccgagaaagaaatgccagacgggagccgctctatcacgtcatagccaccgacaaggatgagggccccaatgcagaaatctcctacagcatcgaagacgggaatgagcatggcaaatttttcatcgaaccgaaaactggagtggtttcgtccaagaggttttcagcagctggagaatatgatattctttcaattaaggcagttgacaatggtcgccctcaaaagtcatcaaccaccagactccatattgaatggatctccaagcccaaaccgtccctggagcccatttcatttgaagaatcattttttacctttactgtgatggaaagtgaccccgttgctcacatgattggagtaatatctgtggagcctcctggcatacccctttggtttgacatcactggtggcaactacgacagtcacttcgatgtggacaagggaactggaaccatcattgttgccaaacctcttgatgcagaacagaagtcaaactacaacctcacagtcgaggctacagatggaaccaccactatcctcactcaggtattcatcaaagtaatagacacaaatgaccatcgtcctcagttttctacatcaaagtatgaagttgttattcctgaagatacagcgccagaaacagaaattttgcaaatcagtgctgtggatcaggatgagaaaaacaaactaatctacactctgcagagcagtagagatccactgagtctcaagaaatttcgtcttgatcctgcaaccggctctctctatacttctgagaaactggatcatgaagctgttcaccagcacaccctcacggtcatggtacgagatcaagatgtgcctgtaaaacgcaactttgcaaggattgtggtcaatgtcagcgacacgaatgaccacgccccgtggttcaccgcttcctcctacaaagggcgggtttatgaatcggcagccgttggctcagttgtgttgcaggtgacggctctggacaaggacaaagggaaaaatgctgaagtgctgtactcgatcgagtcaggaaatattggaaattcttttatgattgatcctgtcttgggctctattaaaactgccaaagaattagatcgaagtaaccaagcggagtatgatttaatggtaaaagctacagataagggcagtccaccaatgagtgaaataacttctgtgcgtatctttgtcacaattgctgacaacgcctctccgaagtttacatcaaaagaatattctgttgaacttagtgaaactgtcagcattgggagtttcgttgggatggttacagcccatagtcaatcatcagtggtgtatgaaataaaagatggaaatacaggtgatgcttttgatattaatccacattctggaactatcatcactcagaaagccctggactttgaaactttgcccatttacacattgataatacaaggaactaacatggctggtttgtccactaatacaacggttctagttcacttgcaggatgagaatgacaacgcgccagtttttatgcaggcagaatatacaggactcattagtgaatcagcctcaattaacagcgtggtcctaacagacaggaatgtcccactggtgattcgagcagctgatgctgataaagactcaaatgctttgcttgtatatcacattgttgaaccatctgtacacacatattttgctattgattctagcactggtgctattcatacagtactaagtctggactatgaagaaacaagtatttttcactttaccgtccaagtgcatgacatgggaaccccacgtttatttgctgagtatgcagcgaatgtaacagtacatgtaattgacattaatgactgcccccctgtgtttgccaagccattatatgaagcatctcttttgttaccaacatacaaaggagtaaaagtcatcacagtaaatgctacagatgctgattcaagtgcattctcacagttgatttactccatcaccgaaggcaacatcggggagaagttttctatggactacaagactggtgctctcactgtccaaaacacaactcagttaagaagccgctacgagctaaccgttagagcttccgatggcagatttgccggccttacctctgtcaaaattaatgtgaaagaaagcaaagaaagtcacctaaagtttacccaggatgtctactctgcggtagtgaaagagaattccaccgaggccgaaacattagctgtcattactgctattgggaatccaatcaatgagcctttgttttatcacatcctcaacccagatcgcagatttaaaataagccgcacttcaggagttctgtcaaccactggcacgcccttcgatcgtgagcagcaggaggcgtttgatgtggttgtagaagtgacagaggaacataagccttctgcagtggcccacgttgtcgtgaaggtcattgtagaagaccaaaatgataatgcgccggtgtttgtcaaccttccctactacgccgttgttaaagtggacactgaggtgggccatgtcattcgctatgtcactgctgtagacagagacagtggcagaaacggggaagtgcattactacctcaaggaacatcatgaacactttcaaattggacccttgggtgaaatttcactgaaaaagcaatttgagcttgacaccttaaataaagaatatcttgttacagtggttgcaaaagatggagggaacccggccttttcagcggaagttatcgttccgatcactgtcatgaataaagccatgcctgtgtttgaaaaacctttctacagtgcagagattgcagagagcatccaggtgcacagccctgtggtccacgtgcaggctaacagcccggaaggcctgaaagtgttctacagcatcacagacggagaccctttcagccagttcactattaacttcaatactggagttatcaatgtcatagctcctctggactttgaggcccacccggcatataagctgagcatacgcgcaactgactccttgacgggcgctcatgctgaagtatttgtggacatcatagtagacgacatcaatgataaccctcctgtgtttgctcagcagtcttatgcggtgaccctgtctgaggcatctgtaattggaacgtctgttgttcaagttagagccaccgattctgattcagaaccaaatagaggaatctcataccagatgtttgggaatcacagcaagagtcatgatcattttcatgtagacagcagcactggcctcatctcactactcagaaccctggattacgagcagtcccggcagcacacgatttttgtgagggcagttgatggtggtatgcccacgctgagcagtgatgtgattgtcacggtggacgttaccgacctcaatgataatccaccactctttgaacaacagatttatgaagccagaattagcgagcacgcccctcatgggcatttcgtgacctgtgtaaaagcctatgatgcagacagttcagacatagacaagttgcagtattccattctgtctggcaatgatcataaacattttgtcattgacagtgcaacagggattatcaccctctcaaacctgcaccggcacgccctgaagccattttacagtcttaacctgtcagtgtctgatggagtttttagaagttccacccaggttcatgtaactgtaattggaggcaatttgcacagtcctgctttccttcagaacgaatatgaagtggaactagctgaaaacgctcccctacataccctggtgatggaggtgaaaactacggatggggattctggtatttatggtcacgttacttaccatattgtaaatgactttgccaaagacagattttacataaatgagagaggacagatatttactttggaaaaacttgatcgagaaaccccggcggagaaagtgatctcagtccgtttaatggctaaggatgctggaggaaaagttgctttctgcaccgtgaatgtcatccttacagatgacaatgacaatgcaccacaatttcgagcaaccaaatacgaagtgaatatcgggtccagtgctgctaaagggacttcagtcgttaaagttcttgcaagtgatgccgatgagggctccaatgccgacatcacctatgccattgaagcagactctgaaagtgtaaaagagaatttggaaattaacaaactgtccggcgtaatcactacaaaggagagcctcattggcttggaaaatgaattcttcactttctttgttagagctgtggataatgggtctccatcaaaagaatctgttgttcttgtctatgttaaaatccttccaccggaaatgcagcttccaaaattttcagaacctttctatacctttacagtgtcagaggacgtgcctattggaacagagatagatctcatccgagcagaacatagtgggactgttctttacagcctggtcaaagggaatactccagaaagcaatagggatgagtcctttgtgattgacagacagagcgggagactgaagttggagaagagtcttgatcatgagacaactaagtggtatcagttttccatactggccaggtgcactcaagatgaccatgagatggtggcttctgtagatgttagtatccaagtgaaagatgcaaatgacaacagcccggtctttgaatctagtccatatgaggcattcattgttgaaaacctgccagggggaagtagagtaattcagatcagggcatctgatgctgactcaggaaccaacggccaagttatgtatagcctggatcagtcacaaagtgtggaagtcattgaatcctttgccattaacatggaaacaggctggattacaactttaaaggaacttgaccatgaaaagagagacaattaccagattaaagtggttgcatcagatcatggtgaaaagatccagctatcctccacagccattgtggatgttaccgtcaccgatgtcaacgatagtccaccacgattcacggccgagatctataaagggactgtgagtgaggatgacccccaaggtggggtgattgccatcttaagtaccacggatgctgattctgaagagatcaacagacaagttacatatttcataacaggaggggatcctttaggacagtttgccgttgaaactatacagaatgaatggaaggtatatgtgaagaaacctctagacagggaaaaaagggacaattaccttcttactatcacggcaactgatggcaccttctcatcaaaagcgatagttgaagtgaaagttctggatgcaaatgacaacagtccagtttgtgaaaagactttatattcagacactattcctgaagacgtccttcctggaaaattgatcatgcagatctctgctacagacgcagacatccgctctaacgctgaaattacttacacgttattgggttcaggtgcagaaaaattcaaactaaatccagacacaggtgaactgaaaacgtcaaccccccttgatcgtgaggagcaagctgtttatcatcttctcgtcagggccacagatggaggaggaagattctgccaagccagtattgtgctcacgctagaagatgtgaacgataacgcccccgaattctctgccgatccttatgccatcaccgtgtttgaaaacacagagccgggaacgctgctgacaagagtgcaggccacagatgccgacgcaggattaaatcggaagattttatactcactgattgactctgctgatgggcagttctccattaacgaattatctggaattattcagttagaaaaacctttggacagagaactccaggcagtatacaccctctctttgaaagctgtggatcaaggcttgccaaggaggctgactgccactggcactgtgattgtatcagttcttgacataaatgacaacccccctgtgtttgagtaccgtgaatatggtgccaccgtgtctgaggacattcttgttggaactgaagttcttcaagtgtatgcagcaagtcgggatattgaagcaaatgcagaaatcacctactcaataataagtggaaatgaacatgggaaattcagcatagattctaaaacaggggccgtatttatcattgagaatctggattatgagagctctcatgagtattacctaacagtagaggccactgatggaggcacgccttcactgagcgacgttgccactgtgaacgttaatgtaacagatatcaacgataatacccctgtgttcagccaagacacctacacgacagtcatcagtgaagatgccgttcttgagcagtctgtcatcacggttatggccgatgatgccgatggaccttccaacagccacatccactactcaattatagatggcaaccaaggaagctcgttcacaattgaccccgtcaggggagaagtcaaagtgaccaaacttctcgaccgagaaacgatttcaggttacacgctcacggttcaagcttctgataatggcagtccacccagagtcaacacgacgaccgtgaacatcgatgtgtccgatgtcaatgacaacgcgcccgtcttctccaggggaaactacagtgtcattatccaggaaaataagccagtgggcttcagcgtgctgcagctggtagtaacagatgaggattcttcccataacggtccacccttcttctttactattgtaactggaaatgatgagaaggcttttgaagttaacccgcaaggagtcctcctgacatcatctgccatcaagaggaaggagaaagatcattacttactgcaggtgaaggtggcagataatggaaagcctcagttgtcatctttgacatacattgacattagggtaattgaggagagcatctatccgcctgcgattttgcccctggagattttcatcacctcttctggagaagaatactcaggtggcgtcattgggaagatccatgccacagaccaggacgtgtatgatactctaacctacagtctcgaccctcagatggacaacctgttctctgtttccagcacagggggcaagctgatagcacacaaaaagctagacatagggcaataccttctcaatgtcagcgtaacagatgggaagttcacgacggtggccgacatcacagtgcatatcagacaagtcacacaggagatgttgaaccacaccatcgcgatccgctttgccaacctcactccggaagaattcgttggtgactactggcgcaacttccagcgagctttacggaacatcctgggtgtgaggaggaacgacatacagattgttagtttgcagtcctctgaacctcacccacatctggacgtcttactttttgtagagaaaccaggtagtgctcagatctcaacaaaacaacttctgcacaagattaactcttccgtgactgacattgaggaaatcattggagttaggatactgaatgtattccagaaactctgcgcgggactggactgcccctggaagttctgcgatgaaaaggtgtctgtggatgaaagtgtgatgtcaacacacagcacagccagactgagttttgtgactccccgccaccacagggcagcggtgtgtctctgcaaagagggaaggtgcccacctgtccaccatggctgtgaagatgatccgtgccctgagggatccgaatgtgtgtctgatccctgggaggagaaacacacctgtgtctgtcccagcggcaggtttggtcagtgcccagggagttcatctatgacactgactggaaacagctacgtgaaataccgtctgacggaaaatgaaaacaaattagagatgaaactgaccatgaggctcagaacatattccacgcatgcggttgtcatgtatgctcgaggaactgactatagcatcttggagattcatcatggaaggctgcagtacaagtttgactgtggaagtggccctggaattgtctctgttcagagcattcaggtcaatgatgggcagtggcacgcagtggccctggaagtgaatggaaactatgctcgcttggttctagaccaagttcatactgcatcgggcacagccccagggactctgaaaaccctgaacctggataactatgtgttttttggtggccacatccgtcagcagggaacaaggcatggaagaagtcctcaagttggtaatggtttcaggggttgtatggactccatttatttgaatgggcaggagctccctttaaacagcaaacccagaagctatgcacacatcgaagagtcggtggatgtatctccaggctgcttcctgacggccacggaagactgcgccagcaacccttgccagaatggaggcgtttgcaatccgtcacctgctggaggttattactgcaaatgcagtgccttgtacatagggacccactgtgagataagcgtcaatccgtgttcctccaagccatgcctctatgggggcacgtgtgttgtcgacaacggaggctttgtttgccagtgtagaggattatatactggtcagaggtgtcagcttagtccatactgcaaagatgaaccctgtaagaatggcggaacatgctttgacagtttggatggcgccgtttgtcagtgtgattcgggttttaggggagaaaggtgtcagagtgatatcgacgagtgctctggaaacccttgcctgcacggggccctctgtgagaacacgcacggctcctatcactgcaactgcagccacgagtacaggggacgtcactgcgaggatgctgcgcccaaccagtatgtgtccacgccgtggaacattgggttggcggaaggaattggaatcgttgtgtttgttgcagggatatttttactggtggtggtgtttgttctctgccgtaagatgattagtcggaaaaagaagcatcaggctgaacctaaagacaagcacctgggacccgctacggctttcttgcaaagaccgtattttgattccaagctaaataagaacatttactcagacataccaccccaggtgcctgtccggcctatttcctacaccccgagtattccaagtgactcaagaaacaatctggaccgaaattccttcgaaggatctgctatcccagagcatcccgaattcagcacttttaaccccgagtctgtgcacgggcaccgaaaagcagtggcggtctgcagcgtggcgccaaacctgcctcccccacccccttcaaactccccttctgacagcgactccatccagaagcctagctgggactttgactatgacacaaaagtggtggatcttgatccctgtctttccaagaagcctctagaggaaaagccttcccagccatacagtgcccgggaaagcctgtctgaagtgcagtctctgagctccttccagtccgaatcgtgcgatgacaatgggtatcactgggatacatcagattggatgccaagcgttcctctgccggacatacaagagttccccaactatgaggtgattgatgagcagacacccctgtactcagcagatccaaacgccatcgatacggactattaccctggaggctacgacatcgaaagtgattttcctccacccccagaagacttccccgcagctgatgagctaccaccgttaccgcccgaattcagcaatcagtttgaatccatccaccctcctagagacatgcctgccgcgggtagcttgggttcttcatcaagaaaccggcagaggttcaacttgaatcagtatttgcccaatttttatcccctcgatatgtctgaacctcaaacaaaaggcactggtgagaatagtacttgtagagaaccccatgccccttacccgccagggtatcaaagacacttcgaggcgcccgctgtcgagagcatgcccatgtctgtgtacgcctccaccgcctcctgctctgacgtgtcagcctgctgcgaagtggagtccgaggtcatgatgagtgactatgagagcggggacgacggccacttcgaagaggtgacgatcccgcccctggattcccagcagcacacggaagtctgactctcaactccccccaaagtgcctgactttagtgaacctagaggtgatgtgagtaatccgcgctgttctttgcagcagtgcttccaagctttttttggtgagccgaatgggcatggctgcgctggatcctgcgcctctggacgtgctagccatttccagtgtcccaactactgtcatcgtgaggttttcatcggctgtgccatttcccaacgtcttttgggatttacatctgtctgtgttaaaataatcaaacgaaaaatcagtcctgtgttgtcagcatgattcatgtatttatatagatttgattattttaattttcctgtctcttttttttgtaaattttatgtacagatttgatttttcatagttttaactagatttccaagatattttgtgcatttgtttcaactgaattttggtggtgtcagtgccattatctagcaccctgatttttttttttttactataaccagggtttcattctgtctttttccactgaagtgtgacattttgttagtacatttcagtgtagtcattcatttctagctgtacataggatgaaggagagatcagatacatgaacatgtcttacatgggttgctgtatttagaattataaacatttttcattattggaaagtgtaacggggaccttctgcatacctgtttagaaccaaaaccaccatgacacagtttttatagtgtctgtatatttgtgatgcaatggtcttgtaaaggtttttaatgaaaactaccattagccagtctttcttactgacaataaattattaataaaatacttgagctttaaaaaaaaaa

SEQ ID NO: 613 - protein, 4588 aa, Homo sapiens
MGRHLALLLLLLLLFQHFGDSDGSQRLEQTPLQFTHLEYNVTVQENSAAKTYVGHPVKMGVYITHPAWEVRYKIVSGDSENLFKAEEYILGDFCFLRIRTKGGNTAILNREVKDHYTLIVKALEKNTNVEARTKVRVQVLDTNDLRPLFSPTSYSVSLPENTAIRTSIARVSATDADIGTNGEFYYSFKDRTDMFAIHPTSGVIVLTGRLDYLETKLYEMEILAADRGMKLYGSSGISSMAKLTVHIEQANECAPVITAVTLSPSELDRDPAYAIVTVDDCDQGANGDIASLSIVAGDLLQQFRTVRSFPGSKEYKVKAIGGIDWDSHPFGYNLTLQAKDKGTPPQFSSVKVIHVTSPQFKAGPVKFEKDVYRAEISEFAPPNTPVVMVKAIPAYSHLRYVFKSTPGKAKFSLNYNTGLISILEPVKRQQAAHFELEVTTSDRKASTKVLVKVLGANSNPPEFTQTAYKAAFDENVPIGTTVMSLSAVDPDEGENGYVTYSIANLNHVPFAIDHFTGAVSTSENLDYELMPRVYTLRIRASDWGLPYRREVEVLATITLNNLNDNTPLFEKINCEGTIPRDLGVGEQITTVSAIDADELQLVQYQIEAGNELDFFSLNPNSGVLSLKRSLMDGLGAKVSFHSLRITATDGENFATPLYINITVAASHKLVNLQCEETGVAKMLAEKLLQANKLHNQGEVEDIFFDSHSVNAHIPQFRSTLPTGIQVKENQPVGSSVIFMNSTDLDTGFNGKLVYAVSGGNEDSCFMIDMETGMLKILSPLDRETTDKYTLNITVYDLGIPQKAAWRLLHVVVVDANDNPPEFLQESYFVEVSEDKEVHSEIIQVEATDKDLGPNGHVTYSIVTDTDTFSIDSVTGVVNIARPLDRELQHEHSLKIEARDQAREEPQLFSTVVVKVSLEDVNDNPPTFIPPNYRVKVREDLPEGTVIMWLEAHDPDLGQSGQVRYSLLDHGEGNFDVDKLSGAVRIVQQLDFEKKQVYNLTVRAKDKGKPVSLSSTCYVEVEVVDVNENLHPPVFSSFVEKGTVKEDAPVGSLVMTVSAHDEDARRDGEIRYSIRDGSGVGVFKIGEETGVIETSDRLDRESTSHYWLTVFATDQGVVPLSSFIEIYIEVEDVNDNAPQTSEPVYYPEIMENSPKDVSVVQIEAFDPDSSSNDKLMYKITSGNPQGFFSIHPKTGLITTTSRKLDREQQDEHILEVTVTDNGSPPKSTIARVIVKILDENDNKPQFLQKFYKIRLPEREKPDRERNARREPLYHVIATDKDEGPNAEISYSIEDGNEHGKFFIEPKTGVVSSKRFSAAGEYDILSIKAVDNGRPQKSSTTRLHIEWISKPKPSLEPISFEESFFTFTVMESDPVAHMIGVISVEPPGIPLWFDITGGNYDSHFDVDKGTGTIIVAKPLDAEQKSNYNLTVEATDGTTTILTQVFIKVIDTNDHRPQFSTSKYEVVIPEDTAPETEILQISAVDQDEKNKLIYTLQSSRDPLSLKKFRLDPATGSLYTSEKLDHEAVHQHTLTVMVRDQDVPVKRNFARIVVNVSDTNDHAPWFTASSYKGRVYESAAVGSVVLQVTALDKDKGKNAEVLYSIESGNIGNSFMIDPVLGSIKTAKELDRSNQAEYDLMVKATDKGSPPMSEITSVRIFVTIADNASPKFTSKEYSVELSETVSIGSFVGMVTAHSQSSVVYEIKDGNTGDAFDINPHSGTIITQKALDFETLPIYTLIIQGTNMAGLSTNTTVLVHLQDENDNAPVFMQAEYTGLISESASINSVVLTDRNVPLVIRAADADKDSNALLVYHIVEPSVHTYFAIDSSTGAIHTVLSLDYEETSIFHFTVQVHDMGTPRLFAEYAANVTVHVIDINDCPPVFAKPLYEASLLLPTYKGVKVITVNATDADSSAFSQLIYSITEGNIGEKFSMDYKTGALTVQNTTQLRSRYELTVRASDGRFAGLTSVKINVKESKESHLKFTQDVYSAVVKENSTEAETLAVITAIGNPINEPLFYHILNPDRRFKISRTSGVLSTTGTPFDREQQEAFDVVVEVTEEHKPSAVAHVVVKVIVEDQNDNAPVFVNLPYYAVVKVDTEVGHVIRYVTAVDRDSGRNGEVHYYLKEHHEHFQIGPLGEISLKKQFELDTLNKEYLVTVVAKDGGNPAFSAEVIVPITVMNKAMPVFEKPFYSAEIAESIQVHSPVVHVQANSPEGLKVFYSITDGDPFSQFTINFNTGVINVIAPLDFEAHPAYKLSIRATDSLTGAHAEVFVDIIVDDINDNPPVFAQQSYAVTLSEASVIGTSVVQVRATDSDSEPNRGISYQMFGNHSKSHDHFHVDSSTGLISLLRTLDYEQSRQHTIFVRAVDGGMPTLSSDVIVTVDVTDLNDNPPLFEQQIYEARISEHAPHGHFVTCVKAYDADSSDIDKLQYSILSGNDHKHFVIDSATGIITLSNLHRHALKPFYSLNLSVSDGVFRSSTQVHVTVIGGNLHSPAFLQNEYEVELAENAPLHTLVMEVKTTDGDSGIYGHVTYHIVNDFAKDRFYINERGQIFTLEKLDRETPAEKVISVRLMAKDAGGKVAFCTVNVILTDDNDNAPQFRATKYEVNIGSSAAKGTSVVKVLASDADEGSNADITYAIEADSESVKENLEINKLSGVITTKESLIGLENEFFTFFVRAVDNGSPSKESVVLVYVKILPPEMQLPKFSEPFYTFTVSEDVPIGTEIDLIRAEHSGTVLYSLVKGNTPESNRDESFVIDRQSGRLKLEKSLDHETTKWYQFSILARCTQDDHEMVASVDVSIQVKDANDNSPVFESSPYEAFIVENLPGGSRVIQIRASDADSGTNGQVMYSLDQSQSVEVIESFAINMETGWITTLKELDHEKRDNYQIKVVASDHGEKIQLSSTAIVDVTVTDVNDSPPRFTAEIYKGTVSEDDPQGGVIAILSTTDADSEEINRQVTYFITGGDPLGQFAVETIQNEWKVYVKKPLDREKRDNYLLTITATDGTFSSKAIVEVKVLDANDNSPVCEKTLYSDTIPEDVLPGKLIMQISATDADIRSNAEITYTLLGSGAEKFKLNPDTGELKTSTPLDREEQAVYHLLVRATDGGGRFCQASIVLTLEDVNDNAPEFSADPYAITVFENTEPGTLLTRVQATDADAGLNRKILYSLIDSADGQFSINELSGIIQLEKPLDRELQAVYTLSLKAVDQGLPRRLTATGTVIVSVLDINDNPPVFEYREYGATVSEDILVGTEVLQVYAASRDIEANAEITYSIISGNEHGKFSIDSKTGAVFIIENLDYESSHEYYLTVEATDGGTPSLSDVATVNVNVTDINDNTPVFSQDTYTTVISEDAVLEQSVITVMADDADGPSNSHIHYSIIDGNQGSSFTIDPVRGEVKVTKLLDRETISGYTLTVQASDNGSPPRVNTTTVNIDVSDVNDNAPVFSRGNYSVIIQENKPVGFSVLQLVVTDEDSSHNGPPFFFTIVTGNDEKAFEVNPQGVLLTSSAIKRKEKDHYLLQVKVADNGKPQLSSLTYIDIRVIEESIYPPAILPLEIFITSSGEEYSGGVIGKIHATDQDVYDTLTYSLDPQMDNLFSVSSTGGKLIAHKKLDIGQYLLNVSVTDGKFTTVADITVHIRQVTQEMLNHTIAIRFANLTPEEFVGDYWRNFQRALRNILGVRRNDIQIVSLQSSEPHPHLDVLLFVEKPGSAQISTKQLLHKINSSVTDIEEIIGVRILNVFQKLCAGLDCPWKFCDEKVSVDESVMSTHSTARLSFVTPRHHRAAVCLCKEGRCPPVHHGCEDDPCPEGSECVSDPWEEKHTCVCPSGRFGQCPGSSSMTLTGNSYVKYRLTENENKLEMKLTMRLRTYSTHAVVMYARGTDYSILEIHHGRLQYKFDCGSGPGIVSVQSIQVNDGQWHAVALEVNGNYARLVLDQVHTASGTAPGTLKTLNLDNYVFFGGHIRQQGTRHGRSPQVGNGFRGCMDSIYLNGQELPLNSKPRSYAHIEESVDVSPGCFLTATEDCASNPCQNGGVCNPSPAGGYYCKCSALYIGTHCEISVNPCSSKPCLYGGTCVVDNGGFVCQCRGLYTGQRCQLSPYCKDEPCKNGGTCFDSLDGAVCQCDSGFRGERCQSDIDECSGNPCLHGALCENTHGSYHCNCSHEYRGRHCEDAAPNQYVSTPWNIGLAEGIGIVVFVAGIFLLVVVFVLCRKMISRKKKHQAEPKDKHLGPATAFLQRPYFDSKLNKNIYSDIPPQVPVRPISYTPSIPSDSRNNLDRNSFEGSAIPEHPEFSTFNPESVHGHRKAVAVCSVAPNLPPPPPSNSPSDSDSIQKPSWDFDYDTKVVDLDPCLSKKPLEEKPSQPYSARESLSEVQSLSSFQSESCDDNGYHWDTSDWMPSVPLPDIQEFPNYEVIDEQTPLYSADPNAIDTDYYPGGYDIESDFPPPPEDFPAADELPPLPPEFSNQFESIHPPRDMPAAGSLGSSSRNRQRFNLNQYLPNFYPLDMSEPQTKGTGENSTCREPHAPYPPGYQRHFEAPAVESMPMSVYASTASCSDVSACCEVESEVMMSDYESGDDGHFEEVTIPPLDSQQHTEV

SEQ ID NO: 614 - DNA, 8056 bp, Homo sapiens
ctgctctccctgagcccgctcccgagcgctgctttcccgccgcgggtgggcttcgcagcctcaggccagccgcggcccttggcccgctgcagccccggccctccaccttccccgtgcaggggcggcccggccagtgtcgctcatcccgggacgctcccttctcccacccaggactgccccgcggagctggcttggacacccaactttgccacctcgagggtcgtctctgctgggcgcgaacctgcccacccaccggttggccgcgcgctcggggaccgtgctcgtggcccccaagccggtgcccccattctggaactcagcgagtagggggcggctctggggaagtggcagggggcggctgcagctgctgcctccacttccctagccaggtgctgaagaggatcctcggagccgctctggcccccaggcgctggatgactggcaccagcgctcctcgcacctgtgttggtgtgtgagacttgggctggagtgcccacgtggctgtggagtcagtgtgattcatgattgaggaaacgcgtcctccatcctctctctccttggcactttccacacatgaggagaagaagagcttctgtttagaagacacgtgcccagagtcagaggccccttgcccaccatgaagggaacctgtgttatagcatggctgttctcaagcctggggctgtggagactcgcccacccagaggcccagggtacgactcagtgccagagaaccgagcatccagtcatctcctataaagaaattggcccctggttacgggagttcagagcgaagaatgctgcggatttctcgcagttaacatttgacccaggacagaaagaacttgttgtaggagcaagaaactacctcttcaggttacagcttgaggatctgtctcttatccaggctgtggaatgggagtgtgatgaagctaccaaaaaggcctgttacagcaaaggcaaatcaaaggaggaatgtcagaactacatccgggtgcttctggtgggtggcgaccggttattcacctgtgggaccaatgcattcacgcctgtctgcaccaaccgctcgttgagcaacctggctgagatccatgatcagatcagtggcatggcccgctgtccctacagtccccagcacaattccacagcgctcctcacagctggtggggagctctatgctgctacagccatggattttccaggacgtgatcctgccatttaccgaagcctaggcattttacctcctctccgcacggcgcagtacaactccaaatggctcaatgagccaaactttgtgtcatcttatgacatcggaaattttacctacttctttttccgagaaaatgcagtagagcatgactgtgggaaaacagtgttctccagagctgcccgggtgtgcaagaacgatattggtgggcgcttcctgctggaagacacctggaccacattcatgaaggctcgcctgaactgctcccgtcctggggaagtccccttttactacaacgaattgcagagtactttcttcctgcctgagctggatttgatctatggcatctttaccaccaatgtgaacagcattgcggcctcagctgtgtgcgtcttcaacctgagcgccatcgcgcaggccttctctgggcccttcaagtaccaagaaaactcgcgctcggcctggctaccgtatcccaacccaaacccccacttccagtgtggcaccgtggaccagggcctgtacgtgaacctgaccgagagaaatctgcaggatgctcagaagttcattctggtgcatgaggtggtacagccagtgaccacagtgccctccttcatggaggacaatagccgcttttcccacgtggcagtcgacgtggtgcagggcagagaagcgctcgtccacatcatctatttggccacagattacggaaccattaagaaagtgcgggtacccctgaatcagacctcaagcagctgtttgctggaagagattgagctcttccctgagaggcggagggagcccatcaggagcctgcagatcctgcacagccagagtgtcctgttcgtggggctgcgggagcacgtggtcaagatccccctgaagaggtgccagttctaccgcacacgcagcacctgcattggggcccaggacccttactgtggctgggatgtggtaatgaagaaatgcacaagcctggaggagagcctgagcatgacgcagtgggaacagagcatctctgcgtgtccgaccaggaatctcaccgtggatgggcactttggtgtgtggtctccgtggacgccttgcacgcacacagatggcagcgccgtgggatcctgcctctgtcgaacccgctcctgcgacagcccggccccgcagtgtggtggctggcagtgcgagggccctggcatggagatcgccaactgttccaggaacggaggctggactccctggacctcgtggtctccctgcagcactacctgtgggatcggcttccaggtgcggcagcgctcctgcagcaaccccactcccaggcacgggggccgggtgtgcgtgggacagaaccgcgaggaaagatactgcaatgaacatttgctatgtcccccacacatgttctggacaggctggggtccttgggaacggtgcacagcccaatgcgggggtggcattcaagctcgccgcaggatctgtgagaatgggcctgactgtgcaggctgcaatgtggagtaccagtcttgcaacaccaacccgtgtcctgagctgaagaagaccacgccctggacaccctggacacctgtcaacatctctgacaacggcgaccactatgagcaacgattccgatacacatgcaaagcccgcctggctgatccgaatttgctggaagtgggaagacagagaatcgaaatgcggtactgttctagcgacggcaccagtggctgctccacagatgggctttctggggatttcctgcgtgctgggagatactctgcccacacggtcaacggggcttggtcagcctggacgtcgtggtcacagtgcagccgtgactgcagcaggggcattcggaaccggaagcgtgtttgcaacaaccccgaacccaagtatgggggaatgccttgccttggcccatctctggaataccaggaatgcaacactttgccctgcccagtggatggcgtgtggtcttgctggtccccctggacaaaatgttcagcaacatgcggcggtggacactatatgaggacccgctcttgctccaatccagccccggcctatggaggggacatctgcctggggctgcacacagaagaggcactctgcaacacgcagccctgcccagagagctggtcggagtggtcggactggtctgagtgtgaagcctctggcgtccaagtccgcgcccgccagtgcatcctcctgttccccatgggcagccagtgctccgggaacaccacggagagccggccgtgtgtgtttgactctaatttcatcccagaagtatctgtggcaagatccagtagcgtagaagagaaaaggtgtggagagttcaacatgttccacatgatcgccgtggggctgagcagctccatcctcggctgcctcctcaccctgctcgtctatacttactgccagcggtaccagcagcaatcccacgatgcgactgtcatccaccccgtctcacctgccccccttaataccagcataaccaaccacatcaacaaactggacaagtacgactcggtggaggccatcaaggcatttaacaaaaacaacttgatcctagaggaaagaaacaaatacttcaacccacatctcactgggaagacctattctaatgcctactttacagatctcaataattatgatgagtactaacagctttcatgttttgggcttcttgtaaatccccagttcctcaaggcctgtgccccatgactgcccatgtttctgaggcttcagagtcgaagtttggatacatttcaagtgcatttcaagccaccagagtgtcccattggtgccaaaaatacacgtctttaaaagcaacaaaaattgaaataagacatcgtgaaaatcttgaccattgttgattgagccagggtggtgaagtttttaattggtgttcatcctatttttctgacaagtccattggtttgttttttgagcattattttataaatgtgccacccacattggaaggagtctttctttagaactttggagtgtaaatcttcatgatgttgtaaattcaagaaaataggcactttctctgaaagacctgctccttccacaagaagtgcataggtccataatatttcataaaatgaagaaaaagaatgtggccaaacaattattcaccatggattgcccaactttccaaatctggataaagctgtgggattcttggaagcagcttgagtgttttcatcttgcctgggaagcccaggaattccacctggtccacaccggcagaagttacagtagactgtgaggcaccccaccttgctcctgatgcagtttctgtgccattgctggtgctggtggaggcagcggagcagaggctcaggcacaatgaagcgtggatgtgttctgcaggttgctgcaaaactcaccttattctgacttttggatttcatggcattccaggaagctccttgccatgctgttggcctggaagtccacctgtctggtccatagtgacgtcctgaagagccagtctgtaaaataaccaaccacttacttagcgtttggatagactccatgccttctctctccctgcaaagaaaaatcttgaacatttatgatgtcaattagtgaaagtattgaaaatactaaattataactaaaagcaactttttatgttattgaaaatattgaaagaactgatattaatgataatcattttatttttcatctctctgatatacccaatgtgtggcaatcagcccctaccatgagcattaatgccatgtaaagctggctttctggagtctgccaggtccacacgaagtgctacccccagtttctgctgttacttgctgcctccaggccaggggagcaggagatgctcagctctggtgccttttcttttatttcagtgctgccttcccacccacccagtccattcaccctcacctctccctgcatggaggcaacagcatttccaagatgtaccttgggaagtcaggatagctggaagtaagggtttttggggatccctgtggtctcttcactgatcatcgataagcatttaagagtgtgctaacaccattcacagaggtccctggaaaaaaatatataattttctcacaaacaaccaatacataacctatggcagttggttgaataattattgaaaaaaagaacacgactgaaaaagttcatctgatgcctctgagcatgtgataaagtcctgggtagacatggaaacgtgttcttacaaatgaaccttcggatctatgaaagaaaatatagtagggggactaaggaacatagaattttattagcatatgtgattttacccttatctttgtttctaatttaaagaaacaatttcagaaagtgttagaagaattctatgtttaataatgaatattgttgagttcaaaatattctcatatacccagatttacagagatgacacagtattgaaatggcaggtgggctctgtaagttatttggggattaatgaaatccagggtcttggcaggggggactcaatgtggccctctcactcatccctcatatgtcaagagtccttcctgtcttatatgcacatgctccaaggtccatactcagtagggggaaatctagccggatggttccccaattgttcctcggctggattttcatcatcagaaatttccaactcatctcatcagttttcttgtaagaaaaaaacatttttcactttgtagcacaattttagttatttttgagtcttcttccctaatagtttgtaagcttaaagggacaattttaattttcccctggttaaagagggattctaatatttccaagaatgttttccactggaattgatgggaaatggtttctaaatggcatcgaagctggtctttaatgatcttttgcaatgacttgggaaaaacaccctccctcactacaggatcttcatgttgttaataatataaacaaacctttgaaattagcattgcaaaagaatcccatttttgtttcgtaccacactgttcaaaggaaaattgtttatctctcttcctttctctctctctcttatttgacagaatagcaagtgtttagataatttcagatatattcctaagtattttaccagctgtggaataagttgtgtttgtccatcactgtgtagctaccgttcacatgttctggctctgtactccacgcttatcgcgtgaaccctcacatgttggactttcacagtgtgatctctcacctgtcttggaaactccttcataaagccgctcttccttaggcctgggctgtttggaagtcctggtgaaactttgcggttcacattttaaattcctgaatgaccttttcattctctctttctttatctttgtttttgtccttcattccctccttttgttcttccttcctgcctttcacgtcacctacttatccgactatttcctccatttgcttcttttctatttgccatcacctgtgacccgagtggaacaaaaaccaacacatagttttaagctacacctttctgcacctgatgtaaaatgacattaatccactatttaacttctaaaattatttctgaatacagttgcagataggctggttttcatgaggaagctcgcttggctttagtcttacatttaaattctttgaaagtggctcccagtgctattcagggtcctttcttgaggccagactcatcaccatctactattgattttacagtgcactgacagtttacaggaaggagaagaacagaatttctgcacactacacaacatgtgggcttcctgtagctccagggacatgtagctttggtgaaactggggttttgtaacctctgaatgatatggacttagtgaattctaaggaactcagggggcacgtggtcaggctccaccgcacagaagagccacagtctccagactcatggcgttccctccagaactccccattcccctctgagcatatttctatgctgctgcttcttgtgacttacatgaggcatctcagcttcttcatgtttgtagggatggttccctaagcctgttcaagtaggctctcactagagttaccattcatatttgagaagaaaagaacatttattaaatgtatgtgtggggctgaggttctaaaggaattgaaaagagacgataaacattgaatgagggtgagggcatccctgctggggagaaacctctgtcccctaggaagagtccgttcatgtcatgtggtttgggatgaaccaggggtctgcccccatcgggtcacaggtgatgccaaatagaaaagaagcaaatggaggaaatagtcggataagtaggtgacgtgaaaggcaggacctggtcaccccagcaagtgctatggacagttcccggaaacggttgcccacttcacaggtccatgggtctgacccttggactctgccaggatcaactgcccagagtgccagagttttagccaaaggtgtacttacttccttatttatctccaaaaggatggaaactgtgggagtcaaagcctattttgctgagtgttcccactggatcctctgtagaattagcaggtcatgctgtcaaaatcatggacaaaggctgggtgcagtggctcatgcctataatcccagcactttgggaggccaaggtgggcggatcacctgagctcaggagtttaagaccagcctgggcaacatggggaaactccatctctacaaaatatacaaaatattagccagccatcgtggtgcgtgcctgtggtcccagtttcttgggaggctgaggcgggagtatcatttgagccaggaggttgaggttgcagtgagctgagatcacatcactgcactccatcctgggtgacagagagagaccctgtctcaaaaaaaaa

SEQ ID NO: 615 - protein, 1074 aa, Homo sapiens
MKGTCVIAWLFSSLGLWRLAHPEAQGTTQCQRTEHPVISYKEIGPWLREFRAKNAADFSQLTFDPGQKELVVGARNYLFRLQLEDLSLIQAVEWECDEATKKACYSKGKSKEECQNYIRVLLVGGDRLFTCGTNAFTPVCTNRSLSNLAEIHDQISGMARCPYSPQHNSTALLTAGGELYAATAMDFPGRDPAIYRSLGILPPLRTAQYNSKWLNEPNFVSSYDIGNFTYFFFRENAVEHDCGKTVFSRAARVCKNDIGGRFLLEDTWTTFMKARLNCSRPGEVPFYYNELQSTFFLPELDLIYGIFTTNVNSIAASAVCVFNLSAIAQAFSGPFKYQENSRSAWLPYPNPNPHFQCGTVDQGLYVNLTERNLQDAQKFILVHEVVQPVTTVPSFMEDNSRFSHVAVDVVQGREALVHIIYLATDYGTIKKVRVPLNQTSSSCLLEEIELFPERRREPIRSLQILHSQSVLFVGLREHVVKIPLKRCQFYRTRSTCIGAQDPYCGWDVVMKKCTSLEESLSMTQWEQSISACPTRNLTVDGHFGVWSPWTPCTHTDGSAVGSCLCRTRSCDSPAPQCGGWQCEGPGMEIANCSRNGGWTPWTSWSPCSTTCGIGFQVRQRSCSNPTPRHGGRVCVGQNREERYCNEHLLCPPHMFWTGWGPWERCTAQCGGGIQARRRICENGPDCAGCNVEYQSCNTNPCPELKKTTPWTPWTPVNISDNGDHYEQRFRYTCKARLADPNLLEVGRQRIEMRYCSSDGTSGCSTDGLSGDFLRAGRYSAHTVNGAWSAWTSWSQCSRDCSRGIRNRKRVCNNPEPKYGGMPCLGPSLEYQECNTLPCPVDGVWSCWSPWTKCSATCGGGHYMRTRSCSNPAPAYGGDICLGLHTEEALCNTQPCPESWSEWSDWSECEASGVQVRARQCILLFPMGSQCSGNTTESRPCVFDSNFIPEVSVARSSSVEEKRCGEFNMFHMIAVGLSSSILGCLLTLLVYTYCQRYQQQSHDATVIHPVSPAPLNTSITNHINKLDKYDSVEAIKAFNKNNLILEERNKYFNPHLTGKTYSNAYFTDLNNYDEY

SEQ ID NO: 616 - DNA, 1839 bp, Homo sapiens
cgcgatggagggaggaggaggtatacccctagaaacacttaaagaagaaagtcagtcaagacatgttctacctgcaagttttgaagtcaacagtttgcagaaaagcaactgggggttcttacttactgggcttgtgggtggcaccctggtggctgtgtacgctgtagccacgccgtttgtaacgccagcccttcgaaaagtctgtttgccatttgtacctgcaactatgaagcagattgaaaatgttgtgaaaatgttgcgatgccgaagaggatcccttgtggacatcggtagtggggacggacgcattgtcatagcggctgcgaagaaagggttcacagcagttggttatgaattaaacccatggctagtttggtattccagataccgcgcttggcgagaaggtgtgcatggatctgccaaattttatatttcagatttgtggaaggttactttttcgcagtactcgaacgttgttattttcggtgtgcctcagatgatgctgcagttggagaagaaacttgaacgtgaacttgaggatgatgcacgagttattgcttgccggttccctttcccacattggactccagaccacgtcacgggggaggggatagacacagtgtgggcatatgatgcaagcacttttagaggccgtgaaaagaggccctgtacatcgatgcatttccagctgcccattcaagcataaactttactgggagtgtttttctgaaatattgtagtcttccctgatcttgtagagacttacagctgtgtccttagcaaaggagcataattgtctttggtttggaatgagaaattactattactttccttaactgttggagaaaacaaacgaagaaaaacaggtagatttaaaatctgcttttgatgctattttcttaaaaattgtacttactgcctttccatgcacctggatgcatgaaaagatgaataagtgatggtcatggttatgggtaggaaaataagatgccaatagctcttcacattataaacaatatggcttaatgcctcgataaggagaaatgatttttaaagacagtatatattaccaactgtttgtagtatcctataactttgttcatacttaagttgtatctctttcctttttgtacttcatggcaaaattaattttctaaaggattcagagaggcgtttatattttataacatttattagaaataatttgttccaccactagattactgtattttatggaatctaagctgtatatgtgtacatttgtatacatgtatgtgtaaatgtaagcctgacgtgggttcagattccagttttgtcatcagcaagaggcctcggacccatgacttactgcctctgagccttggctttctgtgtatctctgccactgggataatggtacacataacagtggagtggggaccaatttctaaaactcatggcacctagtctttggtccataaatggtgtttgttattttagacactgagaaaaatcttattcacagaagttgcagattatttctgctagtcacttttttatttcttgagagctgccactcatttaatatttctcatttatgagaagagacttgactgatttagataaaagacgaattaaggaaaacctttgaacgtgagtagacaagcttcatatatctgtaaagtgaatattgaatggtagcttgagtcattcgtacttatcacagaaaagaattgaactcccagtcatacacctgtaactgaaataccaaactgtcttaatggagatgtaatgaagtaagatggtcacatctttaactaaacttataaaaattgaaaaaaaaaaaaaaaaaaaaaaaaa

SEQ ID NO: 617 - protein, 233 aa, Homo sapiens
MEGGGGIPLETLKEESQSRHVLPASFEVNSLQKSNWGFLLTGLVGGTLVAVYAVATPFVTPALRKVCLPFVPATMKQIENVVKMLRCRRGSLVDIGSGDGRIVIAAAKKGFTAVGYELNPWLVWYSRYRAWREGVHGSAKFYISDLWKVTFSQYSNVVIFGVPQMMLQLEKKLERELEDDARVIACRFPFPHWTPDHVTGEGIDTVWAYDASTFRGREKRPCTSMHFQLPIQA

SEQ ID NO: 618 - DNA, 3403 bp, Homo sapiens
gattccagaagatactgtctggcgtgaaattagtctcagtagaaacataagtcccgcgcgtcttgtgctgcgcgtgcgcaagcttttgggccctcccgagaaagggaagtgcattctcgcttccgtagcggtctccgccggttggggggaagtaattccggttgttgcaccatggcgtccatggggaccctcgccttcgatgaatatgggcgccctttcctcatcatcaaggatcaggaccgcaagtcccgtcttatgggacttgaggccctcaagtctcatataatggcagcaaaggctgtagcaaatacaatgagaacatcacttggaccaaatgggcttgataagatgatggtggataaggatggagatgtgactgtaactaatgatggggccaccatcttaagcatgatggatgttgatcatcagattgccaagctgatggtggaactgtccaagtctcaggatgatgaaattggagatggaaccacaggagtggttgtcctggctggtgccttgttagaagaagcggagcaattgctagaccgaggcattcacccaatcagaatagccgatggctatgagcaggctgctcgtgttgctattgaacacctggacaagatcagcgatagcgtccttgttgacataaaggacaccgaacccctgattcagacagcaaaaaccacgctgggctccaaagtggtcaacagttgtcaccgacagatggctgagattgctgtgaatgccgtcctcactgtagcagatatggagcggagagacgttgactttgagcttatcaaagtagaaggcaaagtgggcggcaggctggaggacactaaactgattaagggcgtgattgtggacaaggatttcagtcacccacagatgccaaaaaaagtggaagatgcgaagattgcaattctcacatgtccatttgaaccacccaaaccaaaaacaaagcataagctggatgtgacctctgtcgaagattataaagcccttcagaaatacgaaaaggagaaatttgaagagatgattcaacaaattaaagagactggtgctaacctagcaatttgtcagtggggctttgatgatgaagcaaatcacttacttcttcagaacaacttgcctgcggttcgctgggtaggaggacctgaaattgagctgattgccatcgcaacaggagggcggatcgtccccaggttctcagagctcacagccgagaagctgggctttgctggtcttgtacaggagatctcatttgggacaactaaggataaaatgctggtcatcgagcagtgtaagaactccagagctgtaaccatttttattagaggaggaaataagatgatcattgaggaggcgaaacgatcccttcacgatgctttgtgtgtcatccggaacctcatccgcgataatcgtgtggtgtatggaggaggggctgctgagatatcctgtgccctggcagttagccaagaggcggataagtgccccaccttagaacagtatgccatgagagcgtttgccgacgcactggaggtcatccccatggccctctctgaaaacagtggcatgaatcccatccagactatgaccgaagtccgagccagacaggtgaaggagatgaaccctgctcttggcatcgactgtttgcacaaggggacaaatgatatgaagcaacagcatgtcatagaaaccttgattggcaaaaagcaacagatatctcttgcaacacaaatggttagaatgattttgaagattgatgacattcgtaagcctggagaatctgaagaatgaagacattgagaaaactatgtagcaagatccacttctgtgattaagtaaatggatgtctcgtgatgcatctacagttatttattgttacatccttttccagacactgtagatgctataataaaaatagctgtttggtaaccatagtttcacttgttcaaagctgtgtaatcgtgggggtaccatctcaactgcttttgtattcattgtattaaaagaatctgtttaaacaacctttatcttctcttcgggtttaagaaacgtttattgtaacagtaattaaatgctgccttaattgaaggggtttgggtggatttttttttctcaaaataagctgtagggactattttaacagcttaaacaggagctctcaagatgcactttcatattgagaggaatatgggcttgatcctcttcctatctaaatgggtgggccatttgattgtagagggtccaccacagaattatgggatgccttaagtgctgttactaggttgctcacagcctaacctggcgtgttgtttagggctgatggagacccatgtgagcctttgctttcctctggccccggccccaccctgaacacagctcatacacagaatcaggaccagcatgtgcagagctggccaccagcacaggcttagggcagttcagaacccacttgtttccctatcagagggacacagtgaagtggaggttaaagtaaattacaggaaataagggagaaatcttgcagttaccatgttcagatagagtgactgaaattaattgtacttactaaagtattaactagctaacagtgatgggccaagacgctccgagaactctaccgggattgtctgttctgacaacccagtgaggcagatacactttcttactgctcacatcttacaggtgagtactcataattggccagcatctcaccaccagcaagtagtagggccaggtcaatcccaggcagtctgaccccagagtggcccagctcatcccctactctgttatttgcttgttaatgattctctagattttctaaaataatgtttcttagcattgtgatgataaagctcatgatgaactttatcactagttatgccaccttaactagtcagatttcctagaattaggaaatggtgactcttgtctaaatttggttaagtgatgaatttgggttaccgtctcatgtgaacctggagattcaccagtcttaacttttgggtcattgtgttttctctacattcatgcattggatgttttgctaaataactcctgtggatttaggaatgtgtgctaatagcaatcttcctaattttcatgtttatatggaactatgcagttgagtattgaaagctttaaactgagtttatttacaaggactgagtctagcctacagagaacatacagcagccttctttggaccacagtcttatccgaggggtctgtggttgtatcagaagagccactaaaccaatccccctttccaaaattgaacctcacagacgttcctgttttttgtgattgagaaactggtcaatgaacaggaagacttagagatgtttcacaagcctttgatttttgtttcatttatttgtaataaacctcttccacgtga

SEQ ID NO: 619 - protein, 541 aa, Homo sapiens
MASMGTLAFDEYGRPFLIIKDQDRKSRLMGLEALKSHIMAAKAVANTMRTSLGPNGLDKMMVDKDGDVTVTNDGATILSMMDVDHQIAKLMVELSKSQDDEIGDGTTGVVVLAGALLEEAEQLLDRGIHPIRIADGYEQAARVAIEHLDKISDSVLVDIKDTEPLIQTAKTTLGSKVVNSCHRQMAEIAVNAVLTVADMERRDVDFELIKVEGKVGGRLEDTKLIKGVIVDKDFSHPQMPKKVEDAKIAILTCPFEPPKPKTKHKLDVTSVEDYKALQKYEKEKFEEMIQQIKETGANLAICQWGFDDEANHLLLQNNLPAVRWVGGPEIELIAIATGGRIVPRFSELTAEKLGFAGLVQEISFGTTKDKMLVIEQCKNSRAVTIFIRGGNKMIIEEAKRSLHDALCVIRNLIRDNRVVYGGGAAEISCALAVSQEADKCPTLEQYAMRAFADALEVIPMALSENSGMNPIQTMTEVRARQVKEMNPALGIDCLHKGTNDMKQQHVIETLIGKKQQISLATQMVRMILKIDDIRKPGESEE

SEQ ID NO: 620 - DNA, 4047 bp, Homo sapiens
tcccttcctctctgcggttccctccctcccaccccctctccctgcacctttctttatcttggagcctctcccatctctccctccctcttcctccctaccccaccctccgaccaccccacttcttcccctcccctcacacttccctccctcccttctctcgtctcctccccactgcgcctccctccctcctggccttccttcccttccccgactttgcagatttctcttcccccaggcctccctcctccacctctccgccccctccgggcttggctctcccaggaggctacgactggagccactggtcccgcaggatccccgcgtcctcggtcgccgcgtccacgtccctctcgcgtccccgcccggcgccacgccgcctcctctgggttcggcctccgcgcggtgcagcgcagtctcaggccgcgggacaagcccgacttaaatctctgcaatggctaacgaagcttatccttgtccgtgtgacattggccacagacttgagtatggagggctaggccgtgaagttcaagtcgagcacatcaaggcttatgtcaccaaatcccccgttgatgcaggcaaagctgtgattgtcattcaagatatatttggctggcagttgcccaataccagatatatagctgacatgatctcaggaaatggatacacaaccattgttccagacttctttgtagggcaagagccttgggacccctctggcgactggtctatcttccctgagtggctgaaaacaagaaatgcccagaagatcgatagagagatcagtgctatcttgaagtatctgaaacaacagtgtcatgcccagaaaattggcatcgtgggattctgctggggtggaactgctgtccatcatttgatgatgaaatactcagaattcagggcaggggtgtccgtctatggcattgtcaaggattctgaagacatttacaatttaaagaaccccactttgttcatttttgctgaaaatgatgttgtgattccactcaaggacgtatctttgctgactcagaagttgaaagaacactgcaaagttgaatatcaaattaaaacattttctgggcagactcatgggttcgtgcatcggaagagagaagattgctcacctgcagacaagccctacattgacgaggccagaaggaatttaattgagtggctgaacaagtacatgtagcaagaatcaagggcaagccttcctagaatagctttcatcccaaaatttgcttggaaatagttagatcatttgatttaattttcacttttataaaataagtgtaggaatcctaaaattgattatttcatttgaaacacaaattcagtaggacgtaatgcatgaaataatttaatttttgacatgtacatcgaatcataatttaaaaacaaggtctgaccaggtgtagtgcctcatgcctgtaattccagcactttgggaggccaaagtgggtggatcacctgaggtcaggagtttgagaccagcctggccaacatggtgagaccccatctctacaaaaaatacaaaaattagcctggtgtggtggtgcacgcctgtagtcccagctacttgggaggctgaggcacaagaatcaatagaacccaggaggtggagactgcagtgagccaagattgtgccactactgtactctagcctgggcagcagagtgagaccctgtctcaaaaataaataagtaaataaataaataaataaaataaaaaccaggtcagtacctggagaatttgaatgatagagaatgatagagtaataccctaattattagttaaaacctacaggccgggtgcggtggctcacgcctgtaatcccagcactttgggaggccgaggtgggtggatcacttgaggtcaggagttcaagaccagcctggccaacatggtgaaaccccatctctactaaaaatataaaaatcagccgggcatggtggcatgtgcctgtaatcccagctactcaggagtctgaggaggagaatcacttgaacctggaggcagaggttgcagtgagtcgaggttgcgctactgcactccagcctggacaacagagggagactctgtctcaaaaaaaaaaaaaaacctacagctgttcaaggaccagctgacaggtcaagtgtggccttttctggtctttgaacacatcatagaaagtgacaaatgctgcaaagccatgaagaacatgaactataaacgggtagactaactgcccagcttagacacttatctatgccacaaaacagctgaatttgtcacatttatatattgcaatatgggaagtattgagatcaaaacaggattccattgacctaattatattaagctaataaactaattttttgaatttttgaatttgcagcttttttaaaaagatagcagagaacggtgggctagagttgtcacccagctgttgtctcctaagcagtggatttccaagcactggcatttttgggtcccagggcctgaggctacctcagaaatatctcctgtgtttctggtggtggcgtaaaggggagagccggtgagaaactctgcacctgcacctacggggtgcgtacatgtgactttgggcaagtgacttgatgttgtagtttttttcctaattttgtcttgacgtccttctcaggagagagtggctgtaaactctagccctgccctgacggggatcctggggatgtggtcgtgggtgtttcccatgtgcctttcatgggatccttctttgacctcacagacggcctgattcctgagtgtccaacctgtggccaggtgtccctctcgcaggaagcttgtttatcctggcacatgaccttgtggctctcatctgacctgtgtccagtttattcctactgagacagccactctcccggagagccctgaccgggaaagaagttaggatggggtagaggaggcaactcatcagaacccaagaaatgacagaagcagtttattgcttacagatccagagaacagagggcagcacgcttcacagggccagcaaaaagggggagccattcaggacacatgggctcaaccagaaggtggagaacgagagagagagggagctatgagccaaagccttcactggggcccagggtgtcatctatgcaggtttcccctggaggttctaactggggggtttagagcaagcaggcatgagccccggggactcacgctgtgactgagaggggtcggtgtgggtaggatatcggcatggtccatgtgggtgtgggggtcagtgggacaagtcaagcaggtggtatccagctgtccatgggaaggtggtcccaggaggcggttttgtaaggcagatgtctggatcgaccaccttggggaacagtgagaagttgtataactggaaactgtgttactaatccctgcttctagtatgagaaagtccaacttacattcaaatagatgctcaggaaacataaaattcaaagaattcccaaacttgagcttcctgagcctcagtttttgcatctgtcaaatgggtatggggagaccctttgcctaatgttgagagaatccaagcctgagcagggctggtctactgtggacacttagttgtggaccccaacaggccaaagcccttgcctgctgagggctgctcccaggaggcctcacacattcatccggcctcccaggaaacccctgagatgtgctgggcttttgccgtggaacggtgtcggtgagcatgtggccagtagccagagtcttcaacataggtgggaggtctgaaattcgtgcgagaatgaaccaagggtgtggctgtatccttcatggtgagcttggggcctgggcagccttccctctgctgagtcctttggtcaaatgtcatggtgttctgaaccagcactgcagatagaagtataatgtaagtcacacacgtacttctttaaaaagatatgttcttcagtgactattagacaaacagataaatgaaggtaaagggaaaaaatggcaactttagcttttttccccatgtatgtaattttaaattttcttatagccccattaaaaaaaggaaagaga

SEQ ID NO: 621 - protein, 245 aa, Homo sapiens
MANEAYPCPCDIGHRLEYGGLGREVQVEHIKAYVTKSPVDAGKAVIVIQDIFGWQLPNTRYIADMISGNGYTTIVPDFFVGQEPWDPSGDWSIFPEWLKTRNAQKIDREISAILKYLKQQCHAQKIGIVGFCWGGTAVHHLMMKYSEFRAGVSVYGIVKDSEDIYNLKNPTLFIFAENDVVIPLKDVSLLTQKLKEHCKVEYQIKTFSGQTHGFVHRKREDCSPADKPYIDEARRNLIEWLNKYM

SEQ ID NO: 622 - DNA, 1132 bp, Homo sapiens
atggaagaagagatggcggcactcattgacaatggctctagcatgtgcaaagctggctttgctgggggagctgttttcccctccatcatctggtgcccccggcaccagcacgtgaaggggggcatgagccagaaggattcctacgtgaatgacaaagcccagagcaagcatggcatcctgaccctgaggtaccccatcgagcatggcatcgtcactaactgggacgacatggagaagatctggcatcacaccttctacaaggagctgtgcatggccctggaggagcacatgttgctgctgactgaggcccctctgaaccccaaggccaacagagaagatgactcagatcatgtttgagaccttcaacaccccagccatgtatgtggccatccaggccagtgctgtccctcaacacctctgggcacaccactggcattgtcatgaactgtagagatggggtcacccacatggtgctcatctacaagggctacattgtcccccatgccatcctgcctctggacctagctggctgagacctgacccactacctcatgaagagcacggctacagcttcaccaccaagcacggctacagcttcaccaccaccgccaagggggagatcatgcgtgacatcaaggagaagctgtgctaccgcaacctggacttgaagcaggatatggccaccaccgcatactcctcctccttggagaagagctacaagctgcctgatggccaggtcatcaccattggcaccgagcagttccagtgtctggaggtgctgttccagccttccttcctgggcagggaatcttgttgcatcaggagaccaccttcaactccatcatgaagtgtgacatggacatctgcgaagacctgtatgccaacacggtgctgtccagcagcaccacaatgtacgtgggtatcgcccacagtatgcagagggagattatcgccctggcatccagcaccatgaagatcaagatcatcacacccccagagtgcaagtactcagtgtgaatcagcagctccatcctggcctcactgtccaccttccagcagatgtggattagcaagcaggagtatgacaagtcagtacccccacgcccccatcgtccaccacaaatgcttctaa

SEQ ID NO: 623 - DNA, 4562 bp, Homo sapiens
tcactcgctccggggacccgcaacaagtggccgccgcgccctccccggggaagccgcgggcgcgcaggggcagccgaaggaggcggtcgagccgcggagcccaggggcctgcccggctcagcgcccaccggaggggatcggggcgggcggatggggacccggcggcggcggcgcggtgagcctctgggcggccccggggcgcgggctgtgcgcggcgctgcgcccgccggcccccagcgcggattgtaagtgctgcagctgtgcccggccccgcctggagccaccgggggtgccaggaggggacgcagcaccccctcccactggagtgcggggacctctccaggccggaggtcggccccggagcttgggggggatgtgcagctaacggtcccgtcgggcgggctttcctcgggccgagcgcgcaggacgtgcgccgcagctatggagtgtcccgggagacggcgggcatgacggctacaggatgggcgcgaacaatggcaaacagtacggcagtgagggcaaaggcagctcgagcatctcatctgacgtgagttcaagtacagatcacacgcccactaaagcccagaagaatgtggctaccagcgaagactccgacctgagcatgcgcacactgagcacgcccagcccagccctgatatgtccaccgaatctcccaggatttcagaatggaaggggctcgtccacctcctcgtcctccatcaccggggagacggtggccatggtgcactccccgcccccgacccgcctcacacacccgctcatccggctcgcctccagaccccagaaggagcaggccagcatagaccggctcccggaccactccatggtgcagatcttctccttcctgcccaccaaccagctgtgccgctgcgcgcgagtgtgccgccgctggtacaacctggcctgggacccgcggctctggaggactatccgcctgacgggcgagaccatcaacgtggaccgcgccctcaaggtgctgacccgcagactctgccaggacacccccaacgtgtgtctcatgctggaaaccgtaactgtcagtggctgcaggcggctcacagaccgagggctgtacaccatcgcccagtgctgccccgaactgaggcgactggaagtctcaggctgttacaatatctccaacgaggccgtctttgatgtggtgtccctctgccctaatctggagcacctggatgtgtcaggatgctccaaagtgacctgcatcagcttgacccgggaggcctccattaaactgtcacccttgcatggcaaacagatttccatccgctacctggacatgacggactgcttcgtgctggaggacgaaggcctgcacaccatcgcggcgcactgcacgcagctcacccacctctacctgcgccgctgcgtccgcctgaccgacgaaggcctgcgctacctggtgatctactgcgcctccatcaaggagctgagcgtcagcgactgccgcttcgtcagcgacttcggcctgcgggagatcgccaagctggagtcccgcctgcggtacctgagcatcgcgcactgcggccgggtcaccgacgtgggcatccgctacgtggccaagtactgcagcaagctgcgctacctcaacgcgaggggctgcgagggcatcacggaccacggtgtggagtacctcgccaagaactgcaccaaactcaaatccctggatatcggcaaatgccctttggtatccgacacgggcctggagtgcctggccctgaactgcttcaacctcaagcggctcagcctcaagtcctgcgagagcatcaccggccagggcttgcagatcgtggccgccaactgctttgacctccagacgctgaatgtccaggactgcgaggtctccgtggaggccctgcgctttgtcaaacgccactgcaagcgctgcgtcatcgagcacaccaacccggctttcttctgaagggacagagttcatccggcgttgtattcacacaaacctgaacaaagcaaatttttttaaaagcagcgtatgtaagcaccgacacccactcaaaacagctctttcttccgggaaggttattaggaatctggcctttatttttcctcatttctcatgggcaacagaggccaaagaaacgaagcaagacaaacagcaaacaggcattttggtcaggtcatttgtaggcagtttctcttctcacaaaagatgtacttaagcaggctgatcgctgttccttgagcaaggcgcttactctcctccgctcaggcccccaaggccgccctttccctcgcacacaggccccacccccacagttccacgccccccccccaaggccacaccctccctccctagagcagcagcgaggatccatcatcagaatcacagtgctctccagacctcctctctaaactgcttcattgacctaagtcactctcttcaatcccacacccatggacattcttgtcaactcaataccatagcactttgcataggcaaaatacttttcaggcctttttaaaaaattcattacagcaaacagctggggaaggacatgcagtcctcccccagctctgtcaatgactatgaccttggccaaagcacttcactgctctgggctgcagcttccagcactgaatcagaggccacacagcccaaagattagcttcatgtccattatagcattgagggagcagagatacccatacacagaagcaccttggcatagagcacccaggcatcgacctcttccaggagaactgattctgtggatggatgtgatttcaggagattgtgcagtgccagcatcagtgcataaagggtcctgtatgtcctttggctgcaaatcacccacttccctgtgtttcagtgggagaatttcctctcccacctcctcacatcctcttttgccaggctggatgctgtcgtctctgtacacaaatactttctgcattcccccctccacaccatcctagcgaggcaccagcacacctaatcacagcaaagcccagatccccccatcagttgcttttactcagtgttttcaaataggagtaaaggcccttgcaatttttaattaacaagcaaggcccaagggaacacatgtcctcaaaagtttttctgatccctcgccttgcacacctggcatgcatcaggcacatctgtcctacagctggcagagacagatgcctcggttctttgtcattcagattgcatttgacctcttctcatctatttatttctttatacatccagacttcatcacatgaagcctattggggttaagtttgtaagtgtttaattgtgcaaattgccaccctgtgtacctcctccatgtctgtctgcgtgttttccaccaaagaatgcaaagcagacttccaggtgtttaaattctgttcactcaacaatgccagatgaatggaagagggaacacactgagatgacttagactctggtccaccaaccagacccttggaaaggaatactaaaatcattacaaggtatggattttaaatggatgaaacttcaaattatcttatttggatagaagtctatattctagcctcatttgcatgaagtcagatagccagaagaaattccattgctggttttcacgaaattcacttgtcttttgctaataaacacatggccctttcccagattattctctagccaagccccacctttgttacgttgaaatccctcatttattttcttctcaaaatgcccattatccaaatgcagaacctctgcatctccaagccagttatgctgaatttgtcaaacttagacacccttgacaactgcactcctactgtaggctcctgtgcatactgtcgtcttctgtgggggatggagaggttagtgtgatgaggtggtgtctgcccaggaggtttctttcaaacatcatggcctcccatccaatcaacatcatcaaattacatgtgtaatcaaggctctgtgccatgggggaaatgaatcatttagctaggccaggatctagtgaaagccacagagtttaaaaccatgaaagaagttgaaggcagcattcctcagctctgtgacttgtgaccctatttgaagtttcaggatttgggtgtcacaaaggattgtccctaatccttggccctggggtcttccgagtgagctggtttaatactctgagaatgagcagggagatccagagaatgaatccctgaccgcatcacctaaactgtcttccaaacatgagacaaagctgactgttcacactgattgcccagcacataccgtcttgccagtttcttcttttctcccagtctcctgttcatccattctgttctcccttggggtgggaatctatgatggaggttactggggaaacagctcagcagatttttggagaccaaaccaaaggtctcactaggaaatttatctgttttaaaacattgcttccttcctggctctgctaaattgaatgctcattgtttgttgttgttgttttttaattctaatgttcaaatcactgcgtgctgtatgaatctagaaagccttaatttactaccaagaaataaagcaatatgttcgt

SEQ ID NO: 624 - protein, 491 aa, Homo sapiens
MGANNGKQYGSEGKGSSSISSDVSSSTDHTPTKAQKNVATSEDSDLSMRTLSTPSPALICPPNLPGFQNGRGSSTSSSSITGETVAMVHSPPPTRLTHPLIRLASRPQKEQASIDRLPDHSMVQIFSFLPTNQLCRCARVCRRWYNLAWDPRLWRTIRLTGETINVDRALKVLTRRLCQDTPNVCLMLETVTVSGCRRLTDRGLYTIAQCCPELRRLEVSGCYNISNEAVFDVVSLCPNLEHLDVSGCSKVTCISLTREASIKLSPLHGKQISIRYLDMTDCFVLEDEGLHTIAAHCTQLTHLYLRRCVRLTDEGLRYLVIYCASIKELSVSDCRFVSDFGLREIAKLESRLRYLSIAHCGRVTDVGIRYVAKYCSKLRYLNARGCEGITDHGVEYLAKNCTKLKSLDIGKCPLVSDTGLECLALNCFNLKRLSLKSCESITGQGLQIVAANCFDLQTLNVQDCEVSVEALRFVKRHCKRCVIEHTNPAFF

SEQ ID NO: 625 - DNA, 7787 bp, Homo sapiens
gagacaaaggctgccgtcgggacgggcgagttagggacttgggtttgggcgaacaaaaggtgagaaggacaagaagggaccgggcgatggcagcaggggagccccgcgggcgcgcgtcctcgggagtggcgccgtgacacgcatggtttccccggacccgcggcggcgctgacttccgcgagtcggagcggcactcggcgagtccgggactgcgctggaacaatggataacttcttcaccgagggaacacgggtctggctgagagaaaatggccagcattttccaagtactgtaaattcctgtgcagaaggcatcgtcgtcttccggacagactatggtcaggtattcacttacaagcagagcacaattacccaccagaaggtgactgctatgcaccccacgaacgaggagggcgtggatgacatggcgtccttgacagagctccatggcggctccatcatgtataacttattccagcggtataagagaaatcaaatatatacctacatcggctccatcctggcctccgtgaacccctaccagcccatcgccgggctgtacgagcctgccaccatggagcagtacagccggcgccacctgggcgagctgcccccgcacatcttcgccatcgccaacgagtgctaccgctgcctgtggaagcgctacgacaaccagtgcatcctcatcagtggtgaaagtggggcaggtaaaaccgaaagcactaaattgatcctcaagtttctgtcagtcatcagtcaacagtctttggaattgtccttaaaggagaagacatcctgtgttgaacgagctattcttgaaagcagccccatcatggaagctttcggcaatgcgaagaccgtgtacaacaacaactctagtcgctttgggaagtttgttcagctgaacatctgtcagaaaggaaatattcagggcgggagaattgtagattatttattagaaaaaaaccgagtagtaaggcaaaatcccggggaaaggaattatcacatattttatgcactgctggcagggctggaacatgaagaaagagaagaattttatttatctacgccagaaaactaccactacttgaatcagtctggatgtgtagaagacaagacaatcagtgaccaggaatcctttagggaagttattacggcaatggacgtgatgcagttcagcaaggaggaagttcgggaagtgtcgaggctgcttgctggtatactgcatcttgggaacatagaatttatcactgctggtggggcacaggtttccttcaaaacagctttgggcagatctgcggagttacttgggctggacccaacacagctcacagatgctttgacccagagatcaatgttcctcaggggagaagagatcctcacgcctctcaatgttcaacaggcagtagacagcagggactccctggccatggctctgtatgcgtgctgctttgagtgggtaatcaagaagatcaacagcaggatcaaaggcaatgaggacttcaagtctattggcatcctcgacatctttggatttgaaaactttgaggttaatcactttgaacagttcaatataaactatgcaaacgagaaacttcaggagtacttcaacaagcatattttttctttagaacaactagaatatagccgggaaggattagtgtgggaagatattgactggatagacaatggagaatgcctggacttgattgagaagaaacttggcctcctagcccttatcaatgaagaaagccattttcctcaagccacagacagcaccttattggagaagctacacagtcagcatgcgaataaccacttttatgtgaagcccagagttgcagttaacaattttggagtgaagcactatgctggagaggtgcaatatgatgtccgaggtatcttggagaagaacagagatacatttcgagatgaccttctcaatttgctaagagaaagccgatttgactttatctacgatctttttgaacatgtttcaagccgcaacaaccaggataccttgaaatgtggaagcaaacatcggcggcctacagtcagctcacagttcaaggactcactgcattccttaatggcaacgctaagctcctctaatcctttctttgttcgctgtatcaagccaaacatgcagaagatgccagaccagtttgaccaggcggttgtgctgaaccagctgcggtactcagggatgctggagactgtgagaatccgcaaagctgggtatgcggtccgaagaccctttcaggacttttacaaaaggtataaagtgctgatgaggaatctggctctgcctgaggacgtccgagggaagtgcacgagcctgctgcagctctatgatgcctccaacagcgagtggcagctggggaagaccaaggtctttcttcgagaatccttggaacagaaactggagaagcggagggaagaggaagtgagccacgcggccatggtgattcgggcccatgtcttgggcttcttagcacgaaaacaatacagaaaggtcctttattgtgtggtgataatacagaagaattacagagcattccttctgaggaggagatttttgcacctgaaaaaggcagccatagttttccagaagcaactcagaggtcagattgctcggagagtttacagacaattgctggcagagaaaagggagcaagaagaaaagaagaaacaggaagaggaagaaaagaagaaacgggaggaagaagaaagagaaagagagagagagcgaagagaagccgagctccgcgcccagcaggaagaagaaacgaggaagcagcaagaactcgaagccttgcagaagagccagaaggaagctgaactgacccgtgaactggagaaacagaaggaaaataagcaggtggaagagatcctccgtctggagaaagaaatcgaggacctgcagcgcatgaaggagcagcaggagctgtcgctgaccgaggcttccctgcagaagctgcaggagcggcgggaccaggagctccgcaggctggaggaggaagcgtgcagggcggcccaggagttcctcgagtccctcaatttcgacgagatcgacgagtgtgtccggaatatcgagcggtccctgtcggtgggaagcgaattttccagcgagctggctgagagcgcatgcgaggagaagcccaacttcaacttcagccagccctacccagaggaggaggtcgatgagggcttcgaagccgacgacgacgccttcaaggactcccccaaccccagcgagcacggccactcagaccagcgaacaagtggcatccggaccagcgatgactcttcagaggaggacccatacatgaacgacacggtggtgcccaccagccccagtgcggacagcacggtgctgctcgccccatcagtgcaggactccgggagcctacacaactcctccagcggcgagtccacctactgcatgccccagaacgctggggacttgccctccccagacggcgactacgactacgaccaggatgactatgaggacggtgccatcacttccggcagcagcgtgaccttctccaactcctacggcagccagtggtcccccgactaccgctgctctgtggggacctacaacagctcgggtgcctaccggttcagctctgagggggcgcagtcctcgtttgaagatagtgaagaggactttgattccaggtttgatacagatgatgagctttcataccggcgtgactctgtgtacagctgtgtcactctgccgtatttccacagctttctgtacatgaaaggtggcctgatgaactcttggaaacgccgctggtgcgtcctcaaggatgaaaccttcttgtggttccgctccaagcaggaggccctcaagcaaggctggctccacaaaaaaggggggggctcctccacgctgtccaggagaaattggaagaagcgctggtttgtcctccgccagtccaagctgatgtactttgaaaacgacagcgaggagaagctcaagggcaccgtagaagtgcgaacggcaaaagagatcatagataacaccaccaaggagaatgggatcgacatcattatggccgataggactttccacctgattgcagagtccccagaagatgccagccagtggttcagcgtgctgagtcaggtccacgcgtccacggaccaggagatccaggagatgcatgatgagcaggcaaacccacagaatgctgtgggcaccttggatgtggggctgattgattctgtgtgtgcctctgacagccctgatagacccaactcgtttgtgatcatcacggccaaccgggtgctgcactgcaacgccgacacgccggaggagatgcaccactggataaccctgctgcagaggtccaaaggggacaccagagtggagggccaggaattcatcgtgagaggatggttgcacaaagaggtgaagaacagtccgaagatgtcttcactgaaactgaagaaacggtggtttgtactcacccacaattccctggattactacaagagttcagagaagaacgcgctcaaactggggaccctggtcctcaacagcctctgctctgtcgtccccccagatgagaagatattcaaagagacaggctactggaacgtcaccgtgtacgggcgcaagcactgttaccggctctacaccaagctgctcaacgaggccacccggtggtccagtgccattcaaaacgtgactgacaccaaggccccgatcgacacccccacccagcagctgattcaagatatcaaggagaactgcctgaactcggatgtggtggaacagatttacaagcggaacccgatccttcgatacacccatcaccccttgcactccccgctcctgccccttccgtatggggacataaatctcaacttgctcaaagacaaaggctataccacccttcaggatgaggccatcaagatattcaattccctgcagcaactggagtccatgtctgacccaattccaataatccagggcatcctacagacagggcatgacctgcgacctctgcgggacgagctgtactgccagcttatcaaacagaccaacaaagtgccccaccccggcagtgtgggcaacctgtacagctggcagatcctgacatgcctgagctgcaccttcctgccgagtcgagggattctcaagtatctcaagttccatctgaaaaggatacgggaacagtttccaggaaccgagatggaaaaatacgctctcttcacttacgaatctcttaagaaaaccaaatgccgagagtttgtgccttcccgagatgaaatagaagctctgatccacaggcaggaaatgacatccacggtctattgccatggcggcggctcctgcaagatcaccatcaactcccacaccactgctggggaggtggtggagaagctgatccgaggcctggccatggaggacagcaggaacatgtttgctttgtttgaatacaacggccacgtcgacaaagccattgaaagtcgaaccgtcgtagctgatgtcttagccaagtttgaaaagctggctgccacatccgaggttggggacctgccatggaaattctacttcaaactttactgcttcctggacacagacaacgtgccaaaagacagtgtggagtttgcatttatgtttgaacaggcccacgaagcggttatccatggccaccatccagccccggaagaaaacctccaggttcttgctgccctgcgactccagtatctgcagggggattatactctgcacgctgccatcccacctctcgaagaggtttattccctgcagagactcaaggcccgcatcagccagtcaaccaaaaccttcaccccttgtgaacggctggagaagaggcggacgagcttcctagaggggaccctgaggcggagcttccggacaggatccgtggtccggcagaaggtcgaggaggagcagatgctggacatgtggattaaggaagaagtctcctctgctcgagccagtatcattgacaagtggaggaaatttcagggaatgaaccaggaacaggccatggccaagtacatggccttgatcaaggagtggcctggctatggctcgacgctgtttgatgtggagtgcaaggaaggtggcttccctcaggaactctggttgggtgtcagcgcggacgccgtctccgtctacaagcgtggagagggaagaccactggaagtcttccagtatgaacacatcctctcttttggggcacccctggcgaatacgtataagatcgtggtcgatgagagggagctgctctttgaaaccagtgaggtggtggatgtggccaagctcatgaaagcctacatcagcatgatcgtgaagaagcgctacagcacgacacgctccgccagcagccagggcagctccaggtgaaggcgggacagagcccacctgtctttgctacctgaacgcaccaccctctggcctaggctggctccagtgtgccatgcccagccaaaacaaacacagagctgcccaggctttctggaagcttctggtctgagggaggtgtctccgaggatccttttgcctgccgccttcattgatcctgtattaagctgtcaactttaacagtctgcacagtttccaaagctttactactcttagaggacacatgccttaaaaaaggaggggaggaaccacgctgccaccaaagcagccggaagtgccttaacttgtggaaccaacactaatcgaccgtaactgtgctactgaagggaactgcctttcccccttctgggggagacttaacagagcgtggaaggggggcattctctgtcaatgatgcactaacctcccaacctgatttccccgaatctgagggaaggtgagggagtgggaagggggatggagagctcgaggggacagtgtgtttgagctggagtgctgcgggcagcctttctcatggaatgacatgaatcaacttttttctttgtttcatcttttaagtgtacgtgcttgcctgttcgtgcatgtgttcataaactcaacactttaatcatggtttcatgagcattaaaaagcaaagggaaaaaggatgtgtaatggtgtacacagtctgtatattttaataatgcagagctatagtctcaattgttactttataaggtggttttattaacaaacccaaatcctggattttcctgtctttgctgtattttgaaaaacacgtgttgactccattgttttacatgtagcaaagtctgccatctgtgtctgctgtattataaacagataagcagcctacaagataactgtatttataaaccactcttcaacagctggctccagtgctggttttagaacaagaatgaagtcattttggagtctttcatgtctaaaagatttaagttaaaaacaaagtgttacttggaaggttagcttctatcattctggatagattacagatataataaccatgttgactatgggggagagacgctgcattccagaaacgtcttaacacttgagtgaatcttcaaaggaccctgacattaaatgctgaggctttaatacacacatattttatcccaagtttataatggtggtctgaacaaggcacctgtaaataaatcagcatttatgaccagaagaaaaataatctggtcttggactttttatttttatatggaaaagttttaaggacttgggccaactaagtctacccacacgaaaaaagaaatttgccttgtccctttgtgtacaaccatgcaaaactgtttgttggctcacagaagttctgacaataaaagatactagct

SEQ ID NO: 626 - protein, 2058 aa, Homo sapiens
MDNFFTEGTRVWLRENGQHFPSTVNSCAEGIVVFRTDYGQVFTYKQSTITHQKVTAMHPTNEEGVDDMASLTELHGGSIMYNLFQRYKRNQIYTYIGSILASVNPYQPIAGLYEPATMEQYSRRHLGELPPHIFAIANECYRCLWKRYDNQCILISGESGAGKTESTKLILKFLSVISQQSLELSLKEKTSCVERAILESSPIMEAFGNAKTVYNNNSSRFGKFVQLNICQKGNIQGGRIVDYLLEKNRVVRQNPGERNYHIFYALLAGLEHEEREEFYLSTPENYHYLNQSGCVEDKTISDQESFREVITAMDVMQFSKEEVREVSRLLAGILHLGNIEFITAGGAQVSFKTALGRSAELLGLDPTQLTDALTQRSMFLRGEEILTPLNVQQAVDSRDSLAMALYACCFEWVIKKINSRIKGNEDFKSIGILDIFGFENFEVNHFEQFNINYANEKLQEYFNKHIFSLEQLEYSREGLVWEDIDWIDNGECLDLIEKKLGLLALINEESHFPQATDSTLLEKLHSQHANNHFYVKPRVAVNNFGVKHYAGEVQYDVRGILEKNRDTFRDDLLNLLRESRFDFIYDLFEHVSSRNNQDTLKCGSKHRRPTVSSQFKDSLHSLMATLSSSNPFFVRCIKPNMQKMPDQFDQAVVLNQLRYSGMLETVRIRKAGYAVRRPFQDFYKRYKVLMRNLALPEDVRGKCTSLLQLYDASNSEWQLGKTKVFLRESLEQKLEKRREEEVSHAAMVIRAHVLGFLARKQYRKVLYCVVIIQKNYRAFLLRRRFLHLKKAAIVFQKQLRGQIARRVYRQLLAEKREQEEKKKQEEEEKKKREEEERERERERREAELRAQQEEETRKQQELEALQKSQKEAELTRELEKQKENKQVEEILRLEKEIEDLQRMKEQQELSLTEASLQKLQERRDQELRRLEEEACRAAQEFLESLNFDEIDECVRNIERSLSVGSEFSSELAESACEEKPNFNFSQPYPEEEVDEGFEADDDAFKDSPNPSEHGHSDQRTSGIRTSDDSSEEDPYMNDTVVPTSPSADSTVLLAPSVQDSGSLHNSSSGESTYCMPQNAGDLPSPDGDYDYDQDDYEDGAITSGSSVTFSNSYGSQWSPDYRCSVGTYNSSGAYRFSSEGAQSSFEDSEEDFDSRFDTDDELSYRRDSVYSCVTLPYFHSFLYMKGGLMNSWKRRWCVLKDETFLWFRSKQEALKQGWLHKKGGGSSTLSRRNWKKRWFVLRQSKLMYFENDSEEKLKGTVEVRTAKEIIDNTTKENGIDIIMADRTFHLIAESPEDASQWFSVLSQVHASTDQEIQEMHDEQANPQNAVGTLDVGLIDSVCASDSPDRPNSFVIITANRVLHCNADTPEEMHHWITLLQRSKGDTRVEGQEFIVRGWLHKEVKNSPKMSSLKLKKRWFVLTHNSLDYYKSSEKNALKLGTLVLNSLCSVVPPDEKIFKETGYWNVTVYGRKHCYRLYTKLLNEATRWSSAIQNVTDTKAPIDTPTQQLIQDIKENCLNSDVVEQIYKRNPILRYTHHPLHSPLLPLPYGDINLNLLKDKGYTTLQDEAIKIFNSLQQLESMSDPIPIIQGILQTGHDLRPLRDELYCQLIKQTNKVPHPGSVGNLYSWQILTCLSCTFLPSRGILKYLKFHLKRIREQFPGTEMEKYALFTYESLKKTKCREFVPSRDEIEALIHRQEMTSTVYCHGGGSCKITINSHTTAGEVVEKLIRGLAMEDSRNMFALFEYNGHVDKAIESRTVVADVLAKFEKLAATSEVGDLPWKFYFKLYCFLDTDNVPKDSVEFAFMFEQAHEAVIHGHHPAPEENLQVLAALRLQYLQGDYTLHAAIPPLEEVYSLQRLKARISQSTKTFTPCERLEKRRTSFLEGTLRRSFRTGSVVRQKVEEEQMLDMWIKEEVSSARASIIDKWRKFQGMNQEQAMAKYMALIKEWPGYGSTLFDVECKEGGFPQELWLGVSADAVSVYKRGEGRPLEVFQYEHILSFGAPLANTYKIVVDERELLFETSEVVDVAKLMKAYISMIVKKRYSTTRSASSQGSSR

SEQ ID NO: 627 - DNA, 1386 bp, Homo sapiens
gctcctcgccccgcgcctgcccccaggatggtccgcgcgaggcaccagccgggtgggctttgcctcctgctgctgctgctctgccagttcatggaggaccgcagtgcccaggctgggaactgctggctccgtcaagcgaagaacggccgctgccaggtcctgtacaagaccgaactgagcaaggaggagtgctgcagcaccggccggctgagcacctcgtggaccgaggaggacgtgaatgacaacacactcttcaagtggatgattttcaacgggggcgcccccaactgcatcccctgtaaagaaacgtgtgagaacgtggactgtggacctgggaaaaaatgccgaatgaacaagaagaacaaaccccgctgcgtctgcgccccggattgttccaacatcacctggaagggtccagtctgcgggctggatgggaaaacctaccgcaatgaatgtgcactcctaaaggcaagatgtaaagagcagccagaactggaagtccagtaccaaggcagatgtaaaaagacttgtcgggatgttttctgtccaggcagctccacatgtgtggtggaccagaccaataatgcctactgtgtgacctgtaatcggatttgcccagagcctgcttcctctgagcaatatctctgtgggaatgatggagtcacctactccagtgcctgccacctgagaaaggctacctgcctgctgggcagatctattggattagcctatgagggaaagtgtatcaaagcaaagtcctgtgaagatatccagtgcactggtgggaaaaaatgtttatgggatttcaaggttgggagaggccggtgttccctctgtgatgagctgtgccctgacagtaagtcggatgagcctgtctgtgccagtgacaatgccacttatgccagcgagtgtgccatgaaggaagctgcctgctcctcaggtgtgctactggaagtaaagcactccggatcttgcaactgaatctgcccgtaaaacctgagccattgattcttcagaactttctgcagtttttgacttcatagattatgctttaaaaaattttttttaacttattgcataacagcagatgccaaaaacaaaaaaagcatctcactgcaagtcacataaaaatgcaacgctgtaatatggctgtatcagagggctttgaaaacatacactgagctgcttctgcgctgttgttgtccgtatttaaacaacagctcccctgtattcccccatctagccatttcggaagacaccgaggaagaggaggaagatgaagaccaggactacagctttcctatatcttctattctagagtggtaaactctctataagtgttcagtgttcacatagcctttgtgcaaaaaaaaaaaaaaaaaaaaa

SEQ ID NO: 628 - protein, 317 aa, Homo sapiens
MVRARHQPGGLCLLLLLLCQFMEDRSAQAGNCWLRQAKNGRCQVLYKTELSKEECCSTGRLSTSWTEEDVNDNTLFKWMIFNGGAPNCIPCKETCENVDCGPGKKCRMNKKNKPRCVCAPDCSNITWKGPVCGLDGKTYRNECALLKARCKEQPELEVQYQGRCKKTCRDVFCPGSSTCVVDQTNNAYCVTCNRICPEPASSEQYLCGNDGVTYSSACHLRKATCLLGRSIGLAYEGKCIKAKSCEDIQCTGGKKCLWDFKVGRGRCSLCDELCPDSKSDEPVCASDNATYASECAMKEAACSSGVLLEVKHSGSCN

SEQ ID NO: 629 - DNA, 1122 bp, Homo sapiens
gctcctcgccccgcgcctgcccccaggatggtccgcgcgaggcaccagccgggtgggctttgcctcctgctgctgctgctctgccagttcatggaggaccgcagtgcccaggctgggaactgctggctccgtcaagcgaagaacggccgctgccaggtcctgtacaagaccgaactgagcaaggaggagtgctgcagcaccggccggctgagcacctcgtggaccgaggaggacgtgaatgacaacacactcttcaagtggatgattttcaacgggggcgcccccaactgcatcccctgtaaagaaacgtgtgagaacgtggactgtggacctgggaaaaaatgccgaatgaacaagaagaacaaaccccgctgcgtctgcgccccggattgttccaacatcacctggaagggtccagtctgcgggctggatgggaaaacctaccgcaatgaatgtgcactcctaaaggcaagatgtaaagagcagccagaactggaagtccagtaccaaggcagatgtaaaaagacttgtcgggatgttttctgtccaggcagctccacatgtgtggtggaccagaccaataatgcctactgtgtgacctgtaatcggatttgcccagagcctgcttcctctgagcaatatctctgtgggaatgatggagtcacctactccagtgcctgccacctgagaaaggctacctgcctgctgggcagatctattggattagcctatgagggaaagtgtatcaaagcaaagtcctgtgaagatatccagtgcactggtgggaaaaaatgtttatgggatttcaaggttgggagaggccggtgttccctctgtgatgagctgtgccctgacagtaagtcggatgagcctgtctgtgccagtgacaatgccacttatgccagcgagtgtgccatgaaggaagctgcctgctcctcaggtgtgctactggaagtaaagcactccggatcttgcaactccatttcggaagacaccgaggaagaggaggaagatgaagaccaggactacagctttcctatatcttctattctagagtggtaaactctctataagtgttcagtgttcacatagcctttgtgcaaaaaaaaaaaaaaaaaaaaa

SEQ ID NO: 630 - protein, 344 aa, Homo sapiens
MVRARHQPGGLCLLLLLLCQFMEDRSAQAGNCWLRQAKNGRCQVLYKTELSKEECCSTGRLSTSWTEEDVNDNTLFKWMIFNGGAPNCIPCKETCENVDCGPGKKCRMNKKNKPRCVCAPDCSNITWKGPVCGLDGKTYRNECALLKARCKEQPELEVQYQGRCKKTCRDVFCPGSSTCVVDQTNNAYCVTCNRICPEPASSEQYLCGNDGVTYSSACHLRKATCLLGRSIGLAYEGKCIKAKSCEDIQCTGGKKCLWDFKVGRGRCSLCDELCPDSKSDEPVCASDNATYASECAMKEAACSSGVLLEVKHSGSCNSISEDTEEEEEDEDQDYSFPISSILEW

SEQ ID NO: 631 - DNA, 668 bp, Homo sapiens
gcagcaagatggcggcggtctcaatgtcagtggtactgaggcagacgttgtggcggagaagggcagtggctgtagctgccctttccgtttccagggttccgaccaggtcgttgaggacttccacatggagattggcacaggaccagactcaagacacacaactcataacagttgatgaaaaattggatatcactactttaactggcgttccagaagagcatataaaaactagaaaagtcaggatctttgttcctgctcgcaataacatgcagtctggagtaaacaacacaaagaaatggaagatggagtttgataccagggagcgatgggaaaatcctttgatgggttgggcatcaacggctgatcccttatccaacatggttctaaccttcagtactaaagaagatgcagtttcctttgcagaaaaaaatggatggagctatgacattgaagagaggaaggttccaaaacccaagtccaagtcttatggtgcaaacttttcttggaacaaaagaacaagagtatccacaaaataggttggcactgactatatctctgcttgactgtgaataaagtcagctatgcagtatttatagtccatgtataataaatacatctcttaatctcctaataaattggacctttaaactacaaaaaaaaaaaaaaaa

SEQ ID NO: 632 - protein, 175 aa, Homo sapiens
MAAVSMSVVLRQTLWRRRAVAVAALSVSRVPTRSLRTSTWRLAQDQTQDTQLITVDEKLDITTLTGVPEEHIKTRKVRIFVPARNNMQSGVNNTKKWKMEFDTRERWENPLMGWASTADPLSNMVLTFSTKEDAVSFAEKNGWSYDIEERKVPKPKSKSYGANFSWNKRTRVSTK

SEQ ID NO: 633 - DNA, 764 bp, Homo sapiens
gcattccgtgctatgattcaggcctaattaagtgattgcgtctgggcacggctataaaccactagctgcttcaactggtaatccagtcagtaggcaactgcaggggctcgccactgactgaaggcagtggaaggttggcagaaggaggctgttcaaggctgtttttgccttcactatggcaaaaatcattttgaggcacctcatagagattccagtgcgttaccaggaagagtttgaagctcgaggtctagaagactgcaggctggatcatgctttatatgcactgcctgggccaaccatcgtggacctgaggaaaaccagggcagcgcagtctcctccagtggactcagcggcagagacgccaccccgagaaggcaaatcccactttcagatcctgctggacgtggtccagttcctccctgaagacatcatcattcagaccttcgaaggctggctactgataaaagcacaacacggaaccagaatggatgagcacggttttatctcaagaagcttcacccgacagtacaaactaccagatggcgtggaaatcaaagatttgtctgcagtcctctgtcatgatggaattttggtggtggaagtaaaggatccagttgggactaagtgacatcgtatcggttcctgttcagatgacatggggaagatgatggttcagccactggtactacgagaatgtttgtattacccacatttgaaatgatttgctatgatttttatgaagaataaaaatatatacacagtta

SEQ ID NO: 634 - protein, 150 aa, Homo sapiens
MAKIILRHLIEIPVRYQEEFEARGLEDCRLDHALYALPGPTIVDLRKTRAAQSPPVDSAAETPPREGKSHFQILLDVVQFLPEDIIIQTFEGWLLIKAQHGTRMDEHGFISRSFTRQYKLPDGVEIKDLSAVLCHDGILVVEVKDPVGTK

SEQ ID NO: 635 - DNA, 5876 bp, Homo sapiens
ggaattcatctgtaaaaatcactacatgtaacgtaggagacaagaaaaatattaatgacagaagatctgcgaacatgatgcacgtgaataattttccctttagaaggcattcctggatatgttttgatgtggacaatggcacatctgcgggacggagtcccttggatcccatgaccagcccaggatccgggctaattctccaagcaaattttgtccacagtcaacgacgggagtccttcctgtatcgatccgacagcgattatgacctctctccaaagtctatgtcccggaactcctccattgccagtgatatacacggagatgacttgattgtgactccatttgctcaggtcttggccagtctgcgaactgtacgaaacaactttgctgcattaactaatttgcaagatcgagcacctagcaaaagatcacccatgtgcaaccaaccatccatcaacaaagccaccataacagaggaggcctaccagaaactggccagcgagaccctggaggagctggactggtgtctggaccagctagagaccctacagaccaggcactccgtcagtgagatggcctccaacaagtttaaaaggatgcttaatcgggagctcacccatctctctgaaatgagtcggtctggaaatcaagtgtcagagtttatatcaaacacattcttagataagcaacatgaagtggaaattccttctccaactcagaaggaaaaggagaaaaagaaaagaccaatgtctcagatcagtggagtcaagaaattgatgcacagctctagtctgactaattcaagtatcccaaggtttggagttaaaactgaacaagaagatgtccttgccaaggaactagaagatgtgaacaaatggggtcttcatgttttcagaatagcagagttgtctggtaaccggcccttgactgttatcatgcacaccatttttcaggaacgggatttattaaaaacatttaaaattccagtagatactttaattacatatcttatgactctcgaagaccattaccatgctgatgtggcctatcacaacaatatccatgctgcagatgttgtccagtctactcatgtgctattatctacacctgctttggaggctgtgtttacagatttggagattcttgcagcaatttttgccagtgcaatacatgatgtagatcatcctggtgtgtccaatcaatttctgatcaatacaaactctgaacttgccttgatgtacaatgattcctcagtcttagagaaccatcatttggctgtgggctttaaattgcttcaggaagaaaactgtgacattttccagaatttgaccaaaaaacaaagacaatctttaaggaaaatggtcattgacatcgtacttgcaacagatatgtcaaaacacatgaatctactggctgatttgaagactatggttgaaactaagaaagtgacaagctctggagttcttcttcttgataattattccgataggattcaggttcttcagaatatggtgcactgtgcagatctgagcaacccaacaaagcctctccagctgtaccgccagtggacggaccggataatggaggagttcttccgccaaggagaccgagagagggaacgtggcatggagataagccccatgtgtgacaagcacaatgcttccgtggaaaaatcacaggtgggcttcatagactatattgttcatcccctctgggagacatgggcagacctcgtccaccctgacgcccaggatattttggacactttggaggacaatcgtgaatggtaccagagcacaatccctcagagcccctctcctgcacctgatgacccagaggagggccggcagggtcaaactgagaaattccagtttgaactaactttagaggaagatggtgagtcagacacggaaaaggacagtggcagtcaagtggaagaagacactagctgcagtgactccaagactctttgtactcaagactcagagtctactgaaattccccttgatgaacaggttgaagaggaggcagtaggggaagaagaggaaagccagcctgaagcctgtgtcatagatgatcgttctcctgacacgtaacagtgcaaaaactttcatgccttttttttttttaagtagaaaaattgtttccaaagtgcatgtcacatgccacaaccacggtcacacctcactgtcatctgccaggacgtttgttgaacaaaactgaccttgactactcagtccagcgctcaggaatatcgtaaccagttttttcacctccatgtcatccgagcaaggtggacatcttcacgaacagcgtttttaacaagatttcagcttggtagagctgacaaagcagataaaatctactccaaattattttcaagagagtgtgactcatcaggcagcccaaaagtttattggacttggggtttctattcctttttatttgtttgcaatattttcagaagaaaggcattgcacagagtgaacttaatggacgaagcaacaaatatgtcaagaacaggacatagcacgaatctgttaccagtaggaggaggatgagccacagaaattgcataattttctaatttcaagtcttcctgatacatgactgaatagtgtggttcagtgagctgcactgacctctacattttgtatgatatgtaaaacagattttttgtagagcttacttttattattaaatgtattgaggtattatatttaaaaaaaactatgttcagaacttcatctgccactggttatttttttctaaggagtaacttgcaagttttcagtacaaatctgtgctacactggataaaaatctaatttatgaattttacttgcaccttatagttcatagcaattaactgatttgtagtgattcattgtttgttttatataccaatgacttccatattttaaaagagaaaaacaactttatgttgcaggaaaccctttttgtaagtctttattatttactttgcattttgtttcactctttccagataagcagagttgctcttcaccagtgtttttcttcatgtgcaaagtgactatttgttctataatacttttatgtgtgttatatcaaatgtgtcttaagcttcatgcaaactcagtcatcagttcgtgttgtctgaagcaagtgggaaatatataaatacccagtagctaaaatggtcagtcttttttagatgttttcctacttagtatctcctaataacgttttgctgtgtcactagatgttcatttcacaagtgcatgtctttctaataatccacacatttcatgctctaataatccacacatttcatgctcatttttattgtttttacagccagttatagcaagaaaaaggtttttccccttgtgctgctttataatttagcgtgtgtctgaaccttatccatgtttgctagatgaggtcttgtcaaatatatcactaccattgtcaccggtgaaaagaaacaggtagttaagttagggttaacattcatttcaaccacgaggttgtatatcatgactagcttttactcttggtttacagagaaaagttaaacaaccaactaggcagtttttaagaatattaacaatatattaacaaacaccaatacaactaatcctatttggttttaatgatttcaccatgggattaagaactatatcaggaacatccctgagaaacggctttaagtgtagcaactactcttccttaatggacagccacataacgtgtaggaagtcctttatcacttatcctcgatccataagcatatcttgcagaggggaactacttctttaaacacatggagggaaagaagatgatgccactggcaccagagggttagtactgtgatgcatcctaaaatatttattatattggtaaaaattctggttaaataaaaaattagagatcactcttggctgatttcagcaccaggaactgtattacagttttagagattaattcctagtgtttacctgattatagcagttggcatcatggggcatttaattctgactttatccccacgtcagccttaataaagtcttctttaccttctctatgaagactttaaagcccaaataatcatttttcacattgatattcaagaattgagatagatagaagccaaagtgggtatctgacaagtggaaaatcaaacgtttaagaagaattacaactctgaaaagcatttatatgtggaacttctcaaggagcctcctggggactggaaagtaagtcatcagccaggcaaatgactcatgctgaagagagtccccatttcagtcccctgagatctagctgatgcttagatcctttgaaataaaaattatgtctttataactctgatcttttacataaagcagaagaggaatcaactagttaattgcaaggtttctactctgtttcctctgtaaagatcagatggtaatctttcaaataagaaaaaaataaagacgtatgtttgaccaagtagtttcacaagaatatttgggaacttgtttcttttaattttatttgtccctgagtgaagtctagaaagaaaggtaaagagtctagagtttattcctctttccaaaacattctcattcctctcctccctacacttagtatttcccccacagagtgcctagaatcttaataatgaataaaataaaaagcagcaatatgtcattaacaaatccagacctgaaagggtaaagggtttataactgcactaataaagagaggctctttttttttcttccagtttgttggtttttaatggtaccgtgttgtaaagatacccactaatggacaatcaaattgcagaaaaggctcaatatccaagagacagggactaatgcactgtacaatctgcttatccttgcccttctctcttgccaaagtgtgcttcagaaatatatactgctttaaaaaagaataaaagaatatccttttacaagtggctttacatttcctaaaatgccataagaaaatgcaatatctgggtactgtatggggaaaaaaatgtccaagtttgtgtaaaaccagtgcatttcagcttgcaagttactgaacacaataatgctgttttaattttgttttatatcagttaaaattcacaataatgtagatagaacaaattacagacaaggaaagaaaaaacttgaatgaaatggattttacagaaagctttatgataatttttgaatgcattatttattttttgtgccatgcattttttttctcaccaaatgaccttacctgtaatacagtcttgtttgtctgtttacaaccatgtatttattgcaatgtacatactgtaatgttaattgtaaattatctgttcttattaaaacatcatcccatgatggggtggtgttgatatatttggaaactcttggtgagagaatgaatggtgtgtatacatactctgtacatttttcttttctcctgtaatatagtcttgtcaccttagagcttgtttatggaagattcaagaaaactataaaatacttaaagatatataaatttaaaaaaacatagctgcaggtctttggtcccagggctgtgccttaactttaaccaatattttcttctgttttgctgcatttgaaaggtaacagtggagctagggctgggcattttacatccaggcttttaattgattagaattctgccaataggtggattttacaaaaccacagacaacctctgaaagattctgagacccttttgagacagaagctcttaagtacttcttgccagggagcagcactgcatgtgtgatggttgtttgccatctgttgatcaggaactacttcagctacttgcatttgattatttcctttttttttttttttaactcggaaacacaactgggggaat

SEQ ID NO: 636 - protein, 673 aa, Homo sapiens
MMHVNNFPFRRHSWICFDVDNGTSAGRSPLDPMTSPGSGLILQANFVHSQRRESFLYRSDSDYDLSPKSMSRNSSIASDIHGDDLIVTPFAQVLASLRTVRNNFAALTNLQDRAPSKRSPMCNQPSINKATITEEAYQKLASETLEELDWCLDQLETLQTRHSVSEMASNKFKRMLNRELTHLSEMSRSGNQVSEFISNTFLDKQHEVEIPSPTQKEKEKKKRPMSQISGVKKLMHSSSLTNSSIPRFGVKTEQEDVLAKELEDVNKWGLHVFRIAELSGNRPLTVIMHTIFQERDLLKTFKIPVDTLITYLMTLEDHYHADVAYHNNIHAADVVQSTHVLLSTPALEAVFTDLEILAAIFASAIHDVDHPGVSNQFLINTNSELALMYNDSSVLENHHLAVGFKLLQEENCDIFQNLTKKQRQSLRKMVIDIVLATDMSKHMNLLADLKTMVETKKVTSSGVLLLDNYSDRIQVLQNMVHCADLSNPTKPLQLYRQWTDRIMEEFFRQGDRERERGMEISPMCDKHNASVEKSQVGFIDYIVHPLWETWADLVHPDAQDILDTLEDNREWYQSTIPQSPSPAPDDPEEGRQGQTEKFQFELTLEEDGESDTEKDSGSQVEEDTSCSDSKTLCTQDSESTEIPLDEQVEEEAVGEEEESQPEACVIDDRSPDT

SEQ ID NO: 637 - DNA, 6856 bp, Homo sapiens
agaggcgtacaggcccttcccgaccgtagcgagggtgctgctgcgctgggggaaggaaaacgccgctttgactgtgccttgttctcacagctggcgggaagcaagcgccttttcgaaagccagaggctcgagttacccctcttaccaccgtcatggcagtcccaggttgcaacaaggacagtgtcagagcaggctgtaaaaaatgtggctaccctggtcacctgacttttgaatgccgcaattttctccgagtagaccctaaaagggacatagttttggatgtcagcagtacaagtagtgaagatagcgatgaagagaatgaagaactgaataaattgcaggcattacaggaaaaaagaataaatgaagaagaggaaaagaagaaagaaaaaagcaaagaaaaaatcaaattgaaaaaaaaaaggaaaaggtcttactcatccagttccactgaagaggacacttcaaaacaaaagaaacaaaaatatcagaagaaagaaaagaaaaaagaaaaaaagagtaaatcaaaaaaagggaaacatcacaaaaaggaaaaaaagaagagaaaaaaggaaaagcattcttctacacctaatagttctgaattctccagaaagtaactgagactttggcttaagccgttaaatttaaaaatttgtttttaaaacgtgtttgcccttccttggaatttgctatatattatgctttgcaataaatcacagccttttccatatagacatttttcgtatttgggaccattatccctctggcaatatatttttaatgtgctgtaactgtaaagtattaaatcagtcttgttacttgatagccatgccccaagtatagctatttgtgtatactaaacacatcatttttggtatttgtgtctctgtgtgtttggctagtgttactacttcataagttcattgtaaaatggctttactgccatcaacatgggtcatctacctagcagttaatgagtattgctggatcaggtgtccaccttccaatgatgaagcaaggtaaggggtaatgttttgctcttgacacagagaaatttaatagctttatgtactaaaatataatatcttttaaagatagtgaaattcttcagttttttaaatctctagggattttttttcaatgttgtagaagatgcagctgcttaatggtcttgactaggactttttaaatgaatggtgtctgcaggtagatgatcatgaaaatatctctaacaaagttttactcttctatgaaatgcagaatttctagtacctgcctcctttgtttttgtaataattaaaatacttcttgtataaagagattagttcagcctgttagtaagtctgcagagatgatgctgagttggttgtgatttttagaatagactcctgggttgttttacaaatgtgccatattggcatgtcttacagtgatacctcaaacacagaaatttttatttaggaagatagctaaatctttattagaactgatttttattgtattcagtataaattttatgaagcttgtttctatgagtactgtggaaaattttataaatgtgagcatatatatttattttgtctgacataatttgtagttttaaagcaagtttcacactgaacttaacgttttcataaatgaccagtttgggatgtttctctcttttactttagtggcaaactcaagagtaaaaagtgtcaaaaaaagaattgagaattttattctgtactttttaaaatttaagagccagggagttgcatcatgaaagcctttgtataataatggaaattttatatgggtaagcattttcaaacacatattagtagatacgttttttaaatttctattttcacattgatcagtgttactttgcttaatacttaggtagcccttatgtccactaaagtaaatgcttatgttgtagaagcatcgaacatcaaccaatgtcatggcacagcaccaaagattgcaaatacctcactatggtgcgcttagaaattttcaaattgataacctatagatacggctgcaggtgaattcatgatagtgaaatcagctaagtatacttaacctcacaggctagaaaggtttactgattcttgtttcacctggcacccaatgtggataccctcagtaagactcagggagccttataactcctcttaacatatgcttacccatgcttaaattctagggaagctgtatccacagccctctgcattgcagccatgagagctctcacgctttcaacccttccataacctaatttagtcatttgggcctctcaaaaggaaatgcttttgtttaaataggtcagtcagttactgggagaaaaaatacagagccagtaggtttttagggatttgttttgcctttgctgctagttttttgaaaatattcttcgattatcaagattttaaaaatcggtttttaatataaagcttttttaaaaacgaggctggcacaagtgcagtggtgtttctttactcccactgcttgacttgactagccttgaaaaaataacagtaaaataaaatattaaaaaataattagaaaatgctacaaaggcaatgaccttattccattgagtaagatagttaaaaatgatagtaattgtagtgaaatagttaattacttgtaagttttattactgttaattgtagagattataaattggctcattaggtttctgaatggtgacacaataatgactgagaagagcaaaagtcagtcctcgttaactaatgtagtatgcaaattaaaatattttaatgatcagtaattttccccccagaaatgatgttggcatttctaagtaaatttcccataattttagcatagtttatgaaattgaataaaaatttattttcactgaagtaattttcttctaatatgatattattattgagattggatgcaaatctcatgaatatgttttagaagaaaattaatgaaattccctcccaggcagtatgtaccagaaggaaaactgaatttagcagtaaaacagtcctggtcattctaactacctgtatgatcttgaacaaagtcacttagtttccctgggccttggtgtctttcgtctataaaatattgtaccagattatctctgaaatcacttcaaggtttaatatatataattatcaatattttaaaattcaagcaatattcactttagaaattattataacattctataatagtaaaggttgaatttattaatataataaacacgttcaacttcttcaagcagataattgatatttggttcatattcttacaacctaatgcatgtcattttcaccaaatgcaggcagaatttatatttaggtttgcatctggaactagattatctggcactttatggccattatttttgggttgatggaccttctcaccacacaatttcccccttttttttttttgcatatcatatgttggttgatatttctcagaggtatccctatttcttcatacttaatatacatctccatttacatctttgactctctgaggtcaaaacaacaataaatgagaagtaaaacaactatatgtgtttgtatttacaactgtatctaaaattatataaccctagtttaccttcagagtaaactaggctgaagagttgttaataatgttgataaaaatgccattgaatcctttcttcaacaaatatttattgagtacctaacgtggcaaacgctgtgctaagtactggggatacagagataagtaagacacatttgcctccctgaaggacttcacagtgtagttggtaggagaaacaccagagcatacaccgttatataattagtgcagtaattgacatgaacatgagtttatagaaactcggggttacctaaagtagtctggataaattagaagaggctacctagagaaagtagtgactgaattgcaatttgattaaggataagaatgagggttatggcagttcctgacagagtgggtactgtgaacaaacaccagaggtagaacaagctgtgttatgtgtttgtcaagaattacaagcaatctggtgttgctggtgtatcataggcgaggcaggaagtggtaagaattgagactaccattttaagttcttaggaacaggaggaaggagtcgtgtgttccgtgtttgggagcttgaactgtaatgtgtaagcaatgagacaccattaaagagtttcaaggggggccgggcacagtggctcacgcctgtaatcccagcactttgggaggctgaggcgggcggatcacctgaggtcaggagttcaagaccagcctggccaacttggcgaaaccctgtctctactaaaaatagaaaaattagccggacgtggtgacaggcacctgtattcccagctactctggagtctggggcaggagaatcgctcaaacccaggaggtggaagttgcagtaagctgagatcacaccactgtactccagcctgggcgacagagcgagactctatctcaaaaaaaaaaaaagattttaaggaaggaaatgacttttattagggtttggttttatcaatttcataatccgattaatcccaccatttttaaaagatgaaattgctttcattagaaggctacataaaatataatttgattattttaggctctattattagactcacatttctttctacagtctcattattatttccaaaaattacacagtaacctaaatcatctaaaaacacataaagctactgtattctttattagatccatccccagagttatatgtacatgtacatactttgagatgtgttttgttcttaattgtattttaggttatttttgactgacttaaattctatcactattttaatatttgttaggtccgaataaaccatttagaatatttttcagtgtacaaaatgtgctgtaatttaataaggccccttgcttttaaaatttggcttaacctgtgaagcacaactgcttcagagttacagagaaacataccagttggtccactggatgagccctgtggttctacctcaggtaacctagtgataagctagctcagcagggagtgcttcaaggactccagctgatcctagtgctgagaccaaaacttcctggacattgggtgcccaagaacagtaggtttcttataccagtgtgacaataatcccagttgcgaaggccagtcttctgatctcagtatctcctcccaactcctctaaaaataggtagagtggcagagaattggggtgcctcttctatagcacaacccatgatgcatccagtcatgcctgaccccactatgcctttcccacaaattgggaggagttggggcagtgagcattttgctagctctgtctgtttcttgcttcttgtgccatttatagtccttggccatgagcaacaaaagtagaatggtgccagtgccttaactaaatttttctcaacctagattttcacctgagacaatatggtaatattattaaattactgtaaagatagcaaattttctgggatactttaaaatcaaagttgtatcaaagatcaagaagcacccataaaagctttataaactttcacaaaaaataagtgaaaattctttgtttttatggccgtgtaaaatgtcatttttataatggaaatgtcttaattttcaaacttaacatatactttaagcaattttagtatttaaacctttgcaaaattgtatttttgaatgtgaagttcaactttggcagtaggttgttgcaatagtgatctggcactatggtgccagtatagccacatagggttatttaaattaattaaataaatgaaaaattttattttttcagttgcattagccacatcttaagtgttcagtagccacatgtgactggtggctaccatattagtgcagatatagaaagaacatttccatcatcacagaaacttctcttaattctggtctagaagataaccttagtacttggtagaaattttgacaggctaatgacgaaaagtttgtaaccctgagctttgcatgcccaagaaaaataaggtattcttttttatatatcagaccagagaagctgtattcagcacattttgaaatgctagtttttggctatggccataccaccctaaatgtgccagatcttgtctgaaatgctagtttctgactacaaaaactacaggacatagtagatatgctcagtagagctgcttaaaataattccctttttttttctgttgaattctgttacaaaaccaggtctgtgttataatagaaaacacacttatgaataaaaatctttaaaaattataatttgcagaaattagttttatttctagatttctaggtggtattaatgtgatagcattaggtgggaccagagaactcatttgttttgtagctttcattatacagattatttaggaaatatatcagcaaaggattttttgttatgcttatctcttgaaacaaaatatttattgtacagattatacattgtgatttttttgttactgagtatattgtttgtgcccagaaaaatctaaaaagatgtgggttgacttctaagagatttaagaacaagtcacctctagtttttaagacagttcccttgatatttacctatccagtaccatctcataagaataactgcctgtaagtatcagaaagttgagaaatgctggtaatgtgacataaacttctcactgttcttcactgagataggactgcttatcttgttattgataaattatttaatttctcctgaataattagcataatctcatgtgatacagaaacatcttaattagcaaataaatttatacaaaggaaaaccaataaaaccttaatgtgcgtttaataaagtaactgaatgatcaaaaa

SEQ ID NO: 638 - protein, 155 aa, Homo sapiens
MAVPGCNKDSVRAGCKKCGYPGHLTFECRNFLRVDPKRDIVLDVSSTSSEDSDEENEELNKLQALQEKRINEEEEKKKEKSKEKIKLKKKRKRSYSSSSTEEDTSKQKKQKYQKKEKKKEKKSKSKKGKHHKKEKKKRKKEKHSSTPNSSEFSRK

SEQ ID NO: 639 - DNA, 2093 bp, Homo sapiens
ttagcggtgctcgggtccggtaacaacatggcggcgtccgtgaggggctcctttgggcaggggtagtgtttggtgtccctgtcttgcgtgatattgacaaactgaagctttcctgcaccactggacttaaggaagagtgtactcgtaggcggacagctttagtggccggccggccgctctcatcccccgtaaggagcagagtcctttgtactgaccaagatgagcaacatctacatccaggagcctcccacgaatgggaaggttttattgaaaactacagctggagatattgacatagagttgtggtccaaagaagctcctaaagcttgcagaaattttatccaactttgtttggaagcttattatgacaataccatttttcatagagttgtgcctggtttcatagtccaaggcggagatcctactggcacagggagtggtggagagtctatctatggagcgccattcaaagatgaatttcattcacggttgcgttttaatcggagaggactggttgccatggcaaatgctggttctcatgataatggcagccagtttttcttcacactgggtcgagcagatgaacttaacaataagcataccatctttggaaaggttacaggggatacagtatataacatgttgcgactgtcagaagtagacattgatgatgacgaaagaccacataatccacacaaaataaaaagctgtgaggttttgtttaatccttttgatgacatcattccaagggaaattaaaaggctgaaaaaagagaaaccagaggaggaagtaaagaaattgaaacccaaaggcacaaaaaattttagtttactttcatttggagaggaagctgaggaagaagaggaggaagtaaatcgagttagtcagagcatgaagggcaaaagcaaaagtagtcatgacttgcttaaggatgatccacatctcagttctgttccagttgtagaaagtgaaaaaggtgatgcaccagatttagttgatgatggagaagatgaaagtgcagagcatgatgaatatattgatggtgatgaaaagaacctgatgagagaaagaattgccaaaaaattaaaaaaggacacaagtgcgaatgttaaatcagctggagaaggagaagtggagaagaaatcagtcagccgcagtgaagagctcagaaaagaagcaagacaattaaaacgggaactcttagcagcaaaacaaaaaaaagtagaaaatgcagcaaaacaagcagaaaaaagaagtgaagaggaagaagcccctccagatggtgctgttgccgaatacagaagagaaaagcaaaagtatgaagctttgaggaagcaacagtcaaagaagggaacttcccgggaagatcagacccttgcactgctgaaccagtttaaatctaaactcactcaagcaattgctgaaacgcctgaaaatgacattcctgaaacagaagtagaagatgatgaaggatggatgtcacatgtacttcagtttgaggataaaagcagaaaagtgaaagatgcaagcatgcaagactcagatacatttgaaatctatgatcctcggaatccagtgaataaaagaaggagggaagaaagcaaaaagctgatgagagagaaaaaagaaagaagataaaatgagaataatgataaccagaacttgctggaaatgtgcctacaatggccttgtaacagccattgttcccaacagcatcacttaggggtgtgaaaagaagtatttttgaacctgttgtctggttttgaaaaacaattatcttgttttgcaaattgtggaatgatgtaagcaaatgcttttggttactggtacatgtgttttttcctagctgaccttttatattgctaaatctgaaataaaataactttccttccacattacatgttaaccattgcagactgcaagcctgtttgtgtccttttaccctaaaatatatgaaggcttccttttcaagatttttttataagaagttcctacagaaagaatatttgtgggaaacctccctttcactaacttcagaatataataaaatattataaataaaatatagaatataaatatgaaaaaaaaaaaaa

SEQ ID NO: 640 - protein, 472 aa, Homo sapiens
MSNIYIQEPPTNGKVLLKTTAGDIDIELWSKEAPKACRNFIQLCLEAYYDNTIFHRVVPGFIVQGGDPTGTGSGGESIYGAPFKDEFHSRLRFNRRGLVAMANAGSHDNGSQFFFTLGRADELNNKHTIFGKVTGDTVYNMLRLSEVDIDDDERPHNPHKIKSCEVLFNPFDDIIPREIKRLKKEKPEEEVKKLKPKGTKNFSLLSFGEEAEEEEEEVNRVSQSMKGKSKSSHDLLKDDPHLSSVPVVESEKGDAPDLVDDGEDESAEHDEYIDGDEKNLMRERIAKKLKKDTSANVKSAGEGEVEKKSVSRSEELRKEARQLKRELLAAKQKKVENAAKQAEKRSEEEEAPPDGAVAEYRREKQKYEALRKQQSKKGTSREDQTLALLNQFKSKLTQAIAETPENDIPETEVEDDEGWMSHVLQFEDKSRKVKDASMQDSDTFEIYDPRNPVNKRRREESKKLMREKKERR

SEQ ID NO: 641 - DNA, 2770 bp, Homo sapiens
attgttcctgttctctttcttaagtcattcgaaacactgtccctgcgagttctttaagttccctgcaatctgtacacaagagaaagagggagagagagagggagagagacagagagagcagggatcaggtaaaggagtggggctgctgcagccattcagacctcaggagctggaaaattgccaaggatgcagaaggaaatgaagatgatcaaagacgaggatgtgcatttcgacttggctgtgaagaagaccccctcctttccccactgcctgcagccagtggcttctcggggaaaggctccccaaagacaccccttcccggaagctctccgagggccattttcccagtttcggtatgaacctcccccaggagacctagatgggttccccggggtcttcgaaggagcagggtctaggaaacggaagagcatgcccacaaagatgccctataaccaccctgcagaagaagtcaccctcgccctccactcagaggagaacaaaaaccacggccttcccaacctccctttgctgttcccgcagcccccgcgccccaagtatgactctcagatgatcgacctgtgcaacgtgggcttccaattctaccgcagcctggaacactttgggggcaagcccgtcaagcaggaacccattaagcccagcgccgtgtggccccagccaacgcccactccattcctgcccacgccctacccctactaccccaaagtccacccgggcctcatgttccccttcttcgtgccctcgtcctcgcccttccccttcagccggcacaccttcctgcccaagcagcccccggaacctctgctgccccggaaagccgaaccccaggagagcgaggagaccaagcagaaggtggagagggtggacgtgaacgtgcagatcgatgacagctactacgtggacgtgggcggctcgcagaagcgctggcagtgccccacctgcgagaagtcctacacctccaagtacaacctggtcacccacatcctgggccacagtgggatcaagccgcacgcgtgcacgcactgcgggaagctcttcaagcagctcagccacctgcatacccacatgctgacccaccagggcacgcggccccacaagtgccaggtgtgccacaaggccttcacccagaccagccacctgaagcgccacatgatgcagcacagcgaggtgaagccgcacaactgccgcgtgtgcggccgcggctttgcctaccccagcgagctcaaggcccacgaagccaagcacgccagtgggcgcgagaacatctgtgtggagtgcggcctcgacttccccaccttggcccagctgaagagacacctcaccacgcaccggggccccatccagtacaactgctccgagtgcgacaagaccttccagtacccgagccagttgcagaaccacatgatgaagcacaaggacatccggccctacatctgctcagagtgtggcatggagtttgtgcagccgcaccacctcaagcagcactccctcacccacaagggtgtgaaggagcataagtgtgggatttgtgggcgggagttcaccctgctggccaacatgaagcgacacgtgctgatccacaccaacatccgcgcctaccagtgtcacctctgctacaagagcttcgtgcagaagcagaccctcaaggcacacatgatcgtccactctgacgtgaagcctttcaaatgcaagctttgtgggaaggaattcaaccggatgcacaacctgatgggccacatgcacctgcactcagacagcaaacccttcaagtgcctctattgcccaagcaaattcaccctgaaggggaacctgacacgccacatgaaagtcaagcatggagtcatggagcggggccttcattcccaaggtctgggaagggggagaatcgccctggcacagacagccggtgtcctgaggagtctggagcaggaggagccctttgacctctctcagaagcgccgggccaaggtgccggtgttccagtcagacggggagagtgcccagggcagccactgccacgaggaggaagaggaggataactgctacgaggtggagccctacagccctggcctggccccccagagccagcagctctgcacacccgaggatctgtccaccaagtcggagcacgcccccgaggtgctggaggaagcctgcaaggaggagaaggaggatgcatccaagggagaatgggagaagaggagcaagggtgaccttggggcagagggcggccaggagagagactgtgccggcagagatgagtgtctcagtctcagggcttttcagagtacccggcggggcccctctttttctgattacttatacttcaagcacagagatgagagtttgaaagaattactggagaggaaaatggaaaaacaagcagtgcttttaggtatctaagtggacagttttaaaattacatttggaaaatgagaacgaggcagttcaaatatagctttctgtatgaactgtcattttctggagactggcgaatagtaccaatctctacaaatggcttagactaaatgagcagggatgtaggtaatggaaagccttctcaggtcattcacggggcccttgatacccttcacacatgtgcagggtcttcatcagtggcgttttatgcattgccagtataataaactgtgagtattcttccagatatctaattgtaagctgatgctgaggtgcttttagaaattctactttcctttgattcatatgcaatacatggtaaatttctaattgc

SEQ ID NO: 642 - protein, 744 aa, Homo sapiens
MQKEMKMIKDEDVHFDLAVKKTPSFPHCLQPVASRGKAPQRHPFPEALRGPFSQFRYEPPPGDLDGFPGVFEGAGSRKRKSMPTKMPYNHPAEEVTLALHSEENKNHGLPNLPLLFPQPPRPKYDSQMIDLCNVGFQFYRSLEHFGGKPVKQEPIKPSAVWPQPTPTPFLPTPYPYYPKVHPGLMFPFFVPSSSPFPFSRHTFLPKQPPEPLLPRKAEPQESEETKQKVERVDVNVQIDDSYYVDVGGSQKRWQCPTCEKSYTSKYNLVTHILGHSGIKPHACTHCGKLFKQLSHLHTHMLTHQGTRPHKCQVCHKAFTQTSHLKRHMMQHSEVKPHNCRVCGRGFAYPSELKAHEAKHASGRENICVECGLDFPTLAQLKRHLTTHRGPIQYNCSECDKTFQYPSQLQNHMMKHKDIRPYICSECGMEFVQPHHLKQHSLTHKGVKEHKCGICGREFTLLANMKRHVLIHTNIRAYQCHLCYKSFVQKQTLKAHMIVHSDVKPFKCKLCGKEFNRMHNLMGHMHLHSDSKPFKCLYCPSKFTLKGNLTRHMKVKHGVMERGLHSQGLGRGRIALAQTAGVLRSLEQEEPFDLSQKRRAKVPVFQSDGESAQGSHCHEEEEEDNCYEVEPYSPGLAPQSQQLCTPEDLSTKSEHAPEVLEEACKEEKEDASKGEWEKRSKGDLGAEGGQERDCAGRDECLSLRAFQSTRRGPSFSDYLYFKHRDESLKELLERKMEKQAVLLGI

SEQ ID NO: 643 - DNA, 609 bp, Homo sapiens
atgcagcagccagcagccagactcaaatctgaaaacagcctgactttggttcagcagctctttggccaaagaagggctccttcacagcagcagcagcagcagcagtcttggctgttgccacagccacagggggactgtggaggagcggccctcggcaataaattagttgataacgtcttccaggagacctacggccatcctactgatatgaaccagatcatacctgccctgatgggatgccagagaaagactgctgcaagtagggatcctctggaaacagaacagagggaagaagataccttccctgaagcccagatgttccagaagcctgcgcctcattcacaaagtcaccccaaaaatgccctagagtttggagttttgaagaagcgggaagaaggcctgagtaagggcctgggaaccaagttagatcctacttcagcatcagcacatgccagcgatggtgcacacaggtggagagcggcctgcccgtcttttccatggtgcccacagacccatttaggatgaaagatcagaaaattctctccatgtcaccgcttctgaaacatgtgaatattaatatttggtgcctaaaaggccatggcaaatttt

SEQ ID NO: 644 - protein, 174 aa, Homo sapiens
MQQPAARLKSENSLTLVQQLFGQRRAPSQQQQQQQSWLLPQPQGDCGGAALGNKLVDNVFQETYGHPTDMNQIIPALMGCQRKTAASRDPLETEQREEDTFPEAQMFQKPAPHSQSHPKNALEFGVLKKREEGLSKGLGTKLDPTSASAHASDGAHRWRAACPSFPWCPQTHLG

SEQ ID NO: 645 - DNA, 744 bp, Homo sapiens
cactagaaagatggcggagcaagagcaaagaaaaatccctttggttccagaaaatctcctgaaaaagaggaaggcttatcaagccctcaacgccacccagtcaaagcaggcacttttggcaaagaaggagcagaagaaaggaaaagggctcaggtttaagcgactggaatcattcctacatgattcctggcggcagaaacgtgacgtttcagaagactagaagtgaaacctcaagccttggaattgccagataaatattccttggcctttgttgtacgcatctaaaggattgatggcgtgagtttactggtgcaaagaatcattgcaagacttcgcctgaagaaaatttttagtggtgtctttgtaaaagtcaccccccagaatctaaaaatgctgtgtatagtggaaccttatgtgacctggggatttccaaatctgaagtctgtccgagaactcattttgaaacgtggacaagccaaggtcaagaataagaccatccctctgacagacaacacagtgattgaggagcacctggggaagtttggcatcatttgcttggaagacctcattcatgaaattgccttcccagggaagcatttacaggagatctcgtggttcttgcgccctttccacctctcagtggcctgtcatgctaccaaaaatagagtgggcttcctcaaggagatgggcacacctggctattggggtgaacgcatcaatcagctcatccgccagctgaactag

SEQ ID NO: 646 - DNA, 183 bp, Homo sapiens
atgcctggactcaatgaaattcttagtgattcagaggttcttgcagccatgcagggtccagaggttatggtggccttccaggatgtggctcagaacccagcaaatatgtcacaataccagagcaacccaaaggttatgaatcttatcagtaaattgtcagccaaatttggaggtcaagtgtaa

SEQ ID NO: 647 - protein, 60 aa, Homo sapiens
MPGLNEILSDSEVLAAMQGPEVMVAFQDVAQNPANMSQYQSNPKVMNLISKLSAKFGGQV

SEQ ID NO: 648 - DNA, 1207 bp, Homo sapiens
ggggggaagggtgatgtggctgcggcatcgccggcctcgctatgtctgccattttcaattttcagagtctattgactgtaatcttgctgcttatatgtacctgtgcttatattcgatccttggcacccagcctcctggacagaaataaaactggattgttgggtatattttggaagtgtgccagaattggtgaacggaagagtccttatgttgcagtatgctgtatagtaatggccttcagcatcctcttcatacagtagctggggaaaatgccagaatgtagttgccatcagatttgattgtgaacaaggactgactgcagaaaataatggaaaggatgtttaactcttttatctccgaacattgaatgagataaatttccagatgctgttctctattttaatgttattggaccaatgttctgtataaacaattaagatgtaaccatttaatagtctgtaacaatcaacctcagtactgtcactacaatattacattctgcaaatgttattctgttgtatcagatacaaaattttagtgaggtatctctaaggcacatagtagaaaacaaaattggttaattactcaagttcctttcactgtgatttggaaatgatttaatctttatagaatgagaaccttttttggactagcttttttattaaaatggctcaatttgtgttgataaggattgcattaatatttaatagtgcttgcttttcctctgggcacaccattttgatcattaaccagagtacctctactcttagcaaactctagtttatgacaagtatttaaaatatttaaaacaagcttatgcagttcttaaggacgaaggtaaatgagatgtaacttaaaaatagtattgggaaaatgttgatagttaacattagtggatttagactagccaaatgacatagtaggctctgaaacatcttgtcaagtatatgtattttgtgcatgaatttttgctggaaagctgtctttctctgaaaaacacaacgttcttagaatgaaaagaacaattataaaataattatcctatatgtgtttttcattctttttagtgtcatggcttcaaaaatgaaacatttattttaattgccgtaaaggaactgtatttttgttttgttttttaacacagcactttaaatccagtttgtgttttgtcaacttgcaaaaaaaaaaaaaaaaaaaaaaaaaaaaa

SEQ ID NO: 649 - protein, 72 aa, Homo sapiens
MSAIFNFQSLLTVILLLICTCAYIRSLAPSLLDRNKTGLLGIFWKCARIGERKSPYVAVCCIVMAFSILFIQ

SEQ ID NO: 650 - DNA, 1660 bp, Homo sapiens
cgggatttagatcacgtcccgcaggccggcggaagtagctgatactctcattggttgcaaaaccttgatctgtgaaagcgggcgttttggaagataccggaagtagagtcacggagaggtattaagaaatggagagaaaaataagcagaatccaccttgtttctgaacccagtataactcattttctacaagtatcttgggagaaaacactggaatctggttttgttattacacttactgatggtcattcagcatggactgggacagtttctgaatcagagatttcccaagaagctgatgacatggcaatggaaaaagggaaatatgttggtgaactgagaaaagcattgttgtcaggagcaggaccagctgatgtatacacgtttaatttttctaaagagtcttgttatttcttctttgagaaaaacctgaaagatgtctcattcagacttggttccttcaacctagagaaagttgaaaacccagctgaagtcattagagaacttatttgttattgcttggacaccattgcagaaaatcaagccaaaaatgagcacctgcagaaagaaaatgaaaggcttctgagagattggaatgatgttcaaggacgatttgaaaaatgtgtgagtgctaaggaagctttggagactgatctttataagcggtttattctggtgttgaatgagaagaaaacaaaaatcagaagtttgcataataaattattaaatgcagctcaagaacgagaaaaggacatcaaacaagaaggggaaactgcaatctgttctgaaatgactgctgaccgagatccagtctatgatgagagtactgatgaggaaagtgaaaaccaaactgatctctctgggttggcttcagctgctgtaagtaaagatgattccattatttcaagtcttgatgtcactgatattgcaccaagtagaaaaaggagacagcgaatgcaaagaaatcttgggacagaacctaaaatggctcctcaggagaatcagcttcaagaaaaggaaaagcctgattcttcactacctgagacgtcgaaaaaggagcacatctcagctgaaaacatgtctttagaaactctgagaaacagcagcccagaagacctctttgatgagatttaacagtctcaaaaaatactttgatgttcactagactatgttttctattcatttctttaaaatgaaaaaggagaatttcaagtcagcagccgctattaccgtatcttacaatttaattacatacacagtgaattgaaaccattgtgcaaaatggattacacatgtatacaaagatacgatttgatgatgacactggcacattgagttctaaactattcattcagcatgcctataattacataaattgtatgagactttttgttgcaaaggacacatttatcatattcattcacacatattatatgtgatagctgtccaacatcctgtctgggaagattttgaaaacaggacaaagaaaacatcattttaaaatgtcttcagctttttttgaatagacgtattcaaacatattctgaacattgatgtttgaacattttaatttgtgtgatgatgtagaaaatataattttagtttgtacataaacattgtgaaaatctgataataaaatttttgatacattgaaaaaaaaa

SEQ ID NO: 651 - protein, 334 aa, Homo sapiens
MERKISRIHLVSEPSITHFLQVSWEKTLESGFVITLTDGHSAWTGTVSESEISQEADDMAMEKGKYVGELRKALLSGAGPADVYTFNFSKESCYFFFEKNLKDVSFRLGSFNLEKVENPAEVIRELICYCLDTIAENQAKNEHLQKENERLLRDWNDVQGRFEKCVSAKEALETDLYKRFILVLNEKKTKIRSLHNKLLNAAQEREKDIKQEGETAICSEMTADRDPVYDESTDEESENQTDLSGLASAAVSKDDSIISSLDVTDIAPSRKRRQRMQRNLGTEPKMAPQENQLQEKEKPDSSLPETSKKEHISAENMSLETLRNSSPEDLFDEI

SEQ ID NO: 652 - DNA, 1665 bp, Homo sapiens
cgggatttagatcacgtcccgcaggccggcggaagtagctgatactctcattggttgcaaaaccttgatctgtgaaagcgggcgttttggaagataccggaagtagagtcacggagagtattaagaaatggagagaaaaataagcagaatccaccttgtttctgaacccagtataactcattttctacaagtatcttgggagaaaacactggaatctggttttgttattacacttactgatggtcattcagcatggactgggacagtttctgaatcagagatttcccaagaagctgatgacatggcaatggaaaaagggaaatatgttggtgaactgagaaaagcattgttgtcaggagcaggaccagctgatgtatacacgtttaatttttctaaagagtcttgttatttcttctttgagaaaaacctgaaagatgtctcattcagacttggttccttcaacctagagaaagttgaaaacccagctgaagtcattagagaacttatttgttattgcttggacaccattgcagaaaatcaagccaaaaatgagcacctgcagaaagaaaatgaaaggcttctgagagattggaatgatgttcaaggacgatttgaaaaatgtgtgagtgctaaggaagctttggagactgatctttataagcggtttattctggtgttgaatgagaagaaaacaaaaatcagaagtttgcataataaattattaaatgcagctcaagaacgagaaaaggacatcaaacaagaaggggaaactgcaatctgttctgaaatgactgctgaccgagatccagtctatgatgagagtactgatgaggaaagtgaaaaccaaactgatctctctgggttggcttcagctgctgtaagtaaagatgattccattatttcaagtcttgatgtcactgatattgcaccaagtagaaaaaggagacagcgaatgcaaagaaatcttgggacagaacctaaaatggctcctcaggagaatcagcttcaagaaaaggaaaattctaggcctgattcttcactacctgagacgtcgaaaaaggagcacatctcagctgaaaacatgtctttagaaactctgagaaacagcagcccagaagacctctttgatgagatttaacagtctcaaaaaatactttgatgttcactagactatgttttctattcatttctttaaaatgaaaaaggagaatttcaagtcagcagccgctattaccgtatcttacaatttaattacatacacagtgaattgaaaccattgtgcaaaatggattacacatgtatacaaagatacgatttgatgatgacactggcacattgagttctaaactattcattcagcatgcctataattacataaattgtatgagactttttgttgcaaaggacacatttatcatattcattcacacatattatatgtgatagctgtccaacatcctgtctgggaagattttgaaaacaggacaaagaaaacatcattttaaaatgtcttcagctttttttgaatagacgtattcaaacatattctgaacattgatgtttgaacattttaatttgtgtgatgatgtagaaaatataattttagtttgtacataaacattgtgaaaatctgataataaaatttttgatacattgaaaaaaaaa

SEQ ID NO: 653 - protein, 336 aa, Homo sapiens
MERKISRIHLVSEPSITHFLQVSWEKTLESGFVITLTDGHSAWTGTVSESEISQEADDMAMEKGKYVGELRKALLSGAGPADVYTFNFSKESCYFFFEKNLKDVSFRLGSFNLEKVENPAEVIRELICYCLDTIAENQAKNEHLQKENERLLRDWNDVQGRFEKCVSAKEALETDLYKRFILVLNEKKTKIRSLHNKLLNAAQEREKDIKQEGETAICSEMTADRDPVYDESTDEESENQTDLSGLASAAVSKDDSIISSLDVTDIAPSRKRRQRMQRNLGTEPKMAPQENQLQEKENSRPDSSLPETSKKEHISAENMSLETLRNSSPEDLFDEI

SEQ ID NO: 654 - DNA, 1707 bp, Homo sapiens
cgggatttagatcacgtcccgcaggccggcggaagtagctgatactctcattggttgcaaaaccttgatctgtgaaagcgggcgttttggaagataccggaagtagagtcacggagaggtaggatccggaagtggggctgcctctttaaataacaaaaatctgaggtattaagaaatggagagaaaaataagcagaatccaccttgtttctgaacccagtataactcattttctacaagtatcttgggagaaaacactggaatctggttttgttattacacttactgatggtcattcagcatggactgggacagtttctgaatcagagatttcccaagaagctgatgacatggcaatggaaaaagggaaatatgttggtgaactgagaaaagcattgttgtcaggagcaggaccagctgatgtatacacgtttaatttttctaaagagtcttgttatttcttctttgagaaaaacctgaaagatgtctcattcagacttggttccttcaacctagagaaagttgaaaacccagctgaagtcattagagaacttatttgttattgcttggacaccattgcagaaaatcaagccaaaaatgagcacctgcagaaagaaaatgaaaggcttctgagagattggaatgatgttcaaggacgatttgaaaaatgtgtgagtgctaaggaagctttggagactgatctttataagcggtttattctggtgttgaatgagaagaaaacaaaaatcagaagtttgcataataaattattaaatgcagctcaagaacgagaaaaggacatcaaacaagaaggggaaactgcaatctgttctgaaatgactgctgaccgagatccagtctatgatgagagtactgatgaggaaagtgaaaaccaaactgatctctctgggttggcttcagctgctgtaagtaaagatgattccattatttcaagtcttgatgtcactgatattgcaccaagtagaaaaaggagacagcgaatgcaaagaaatcttgggacagaacctaaaatggctcctcaggagaatcagcttcaagaaaaggaaaagcctgattcttcactacctgagacgtcgaaaaaggagcacatctcagctgaaaacatgtctttagaaactctgagaaacagcagcccagaagacctctttgatgagatttaacagtctcaaaaaatactttgatgttcactagactatgttttctattcatttctttaaaatgaaaaaggagaatttcaagtcagcagccgctattaccgtatcttacaatttaattacatacacagtgaattgaaaccattgtgcaaaatggattacacatgtatacaaagatacgatttgatgatgacactggcacattgagttctaaactattcattcagcatgcctataattacataaattgtatgagactttttgttgcaaaggacacatttatcatattcattcacacatattatatgtgatagctgtccaacatcctgtctgggaagattttgaaaacaggacaaagaaaacatcattttaaaatgtcttcagctttttttgaatagacgtattcaaacatattctgaacattgatgtttgaacattttaatttgtgtgatgatgtagaaaatataattttagtttgtacataaacattgtgaaaatctgataataaaatttttgatacattgaaaaaaaaa

SEQ ID NO: 655 - protein, 334 aa, Homo sapiens; identical to SEQ ID NO: 651

SEQ ID NO: 656 - DNA, 1640 bp, Homo sapiens
atgatgtccacaccagttatcctgttggaagagggaactgatagtcctcaaggcatcccccagcttgtgagtaacatcagtgcctaacaggtgattgctgagggtagaagaaccaccctgggttctcatggcacagacatgcttattatggatggcagaggcaagcaacaatcttcttgaagcttcttcaatttgtccatcctgcagcaaagacttcaatggacattgccaaataccaagatgccaaggtgggtgatagcaccacctcagtgaccttactggctgcagagtttctgaagcaggtgaaaccttatgtggaggaaggtttgcacctgaagatcatcattcaagctttacgcacagccatccaattggcagttaatgataacaaagagatcactgtgaccatgaagaagacagaaaaagtggagcagaagaagctgcttggagaagtgtgccatcctgctctgagctccaagctcatctcccagcagaaagccttctttgcaaagatggtggttgatgcagtgatgatgcttgatggtttgctgcagcttaaaatgattggaatcaagaagatacagggtggagccctagaggattcccatctgttacctggtgtttcattcaagaatttcttttatgctggtgttggaaatgcaaccccaaaagtgctataatcccaagattgcacttttaaattttgagcttgagttgaaagttaggaaagataaggctgagatcagagtcctcacaatggggaattaccaggcaattgttgatgctgagtggaacattctctatgacaagttagcaaggatccatcattctggagccaaagttgtcttgtccaaactctccaatggggatgtggtcactcagtactttgctgacaggggcaggttcggtgctggctgagtacctgagaaggatctgagtaggacaatgatggtctacagagggttaatccagaccattgtgaatgctctgtcagcagacatgacatgctgggcagctgccaggtgtttgaggagaccctgactggaagtgagaggcacaatttctttactggcctcccaaggacaacacatgcacctttatcctccacagtgatgccacaacttatggaggagacagaacagttcatgcctaattccatcatgattgtcaggagggccattgaaaatgatttggtggtggctggtggtggggctattgagataaagctctccaagtacctatgggattagcaaggactattccaggaacacagcagctagagtggggggtatgctaaggctttggagattatcccatggcagctaagtgacaatactggctttgataccacaaacattctcaacaagctgtgggcatagcatgcccagagaggcacatggtatggcatggacatcaatgatgaggatattgctgacaactctgaggcctttgtgtgggagccagctatgtgccaggaagaacaccaaggctatggcttacccatgagaaacgataaactctctcttgtggttgatatttatgggaatgcaagctgtcagagctctttacagttgtcttatgtattgccattgaccactcgcttgctacatcaagaaaaatgtattcagcaatataaataa

SEQ ID NO: 657 - DNA, 5646 bp, Homo sapiens
agaagaggaagattagaagatttttttttttctttgagagaaagcccagcggagataaacgaatgtcccctcatctccaaagaaaagttcatcggatttttattctagagagctcatcttcaggatgtcagtgaacatttctactgcaggaaaaggtgtggatccaaatacagttgatacttatgacagtggcgatgattgggaaatcggggttggaaatttaataattgatttggacgctgatttggagaaggacagacagaaatttgagatgaataattccaccaccaccactagtagcagcaactccaaggattgtggaggtccggcctccagtggggctggtgctaccgcagccttagctgatggcctaaaatttgcttctgttcaggcctctgctccccaggggaattcacacaaagagaccagcaaatcaaaagtgaaaaggagtaaaacttctaaggatgctaataaatctctgccttctgctgccttgtatgggattcccgagatcagcagcactggcaagaggcaggaagtccaagggcgccctggagaggcaactggcatgaattcagcgctgggtcaaagtgtgagcagcggcggcagcggcaacccaaacagcaatagtaccagcaccagcacctctgccgccaccgcgggggcaggctcctgtgggaaaagcaaagaggagaagccaggtaaaagccagagcagccgaggcgccaagcgggataaggatgcggggaaatccaggaaggacaagcacgacctgcttcagggccaccagaatggcagtggcagccaggccccttccggggggcacctctatggctttggggccaagagcaatggaggtggcgcgagccccttccactgcgggggcactgggagtggcagcgtcgccgctgcaggggaagttagcaaaagtgccccggattcagggctcatgggaaactctatgttggtaaagaaggaagaggaggaggaggagagccacaggcgaatcaagaaactgaaaactgagaaggttgaccccctgtttacagtgccagcgccaccaccgccgatttccagcagtctcacgcctcagattctaccctcctacttttccccatcttcatccaatattgcagcaccggttgaacagcttttggttcggactcgttctgtgggtgtcaatacatgtgaagttggagtagtgacagagccagagtgtcttgggccctgtgaacctgggaccagtgtgaatttggaagggatcgtgtggcatgaaacagaagaaggtgtcctagtggtcaatgtcacgtggaggaacaaaacgtacgtgggaaccctactggactgcaccaagcacgactgggcccctcccaggttttgtgagtcaccgacaagtgacctggagatgagagggggccggggcagagggaagagagcaaggtctgctgctgctgccccgggctccgaggccagcttcacagagtccagagggctgcagaataagaacagagggggggccaatgggaaagggaggcggggcagcctcaatgccagcggacgaaggacacccccaaattgtgctgctgaggatatcaaagccagcccttcctccaccaacaaaaggaaaaacaagcctccaatggagctggacctgaactccagctctgaggacaataagcctggaaagcgtgtccgcacaaattccagaagcactcccactacccctcaagggaaaccagagactacttttttggaccaaggctgctcttctccagtgttaatcgactgtccccacccaaactgcaacaaaaagtacaagcacattaacggcctgaggtaccaccaggctcatgcacacttagacccagaaaacaagctggagttcgagcctgacagtgaggacaagatctcggactgtgaggaaggattgagtaatgtggcacttgaatgcagtgagccaagcacaagtgtatctgcttatgaccagttgaaggcaccggcatcccctggtgctggaaacccacctgggaccccaaagggaaagagagagctgatgagcaatggcccaggttccattattggtgctaaagctgggaagaattctggcaaaaagaagggccttaacaatgaactgaacaaccttccagtaatctccaacatgacggctgcgttagacagttgctcggcagcagacggcagtttggctgctgagatgcctaaactggaagcagaaggattaattgacaagaaaaatttaggagataaagaaaagggcaaaaaagctaacaactgcaaaacggacaaaaacctctctaaactgaaaagtgcccggcccattgcccctgccccagcccccactcccccgcagctaatcgctatacccactgcaacctttacaacgaccaccactgggacaatacccggactgccctccctcacaacaactgttgttcaggctacaccaaagagtcctccgttaaaacccattcaaccaaagcccacaattatgggagagcccatcaccgtgaacccagctctggtgtcactcaaagacaaaaagaaaaaggagaagcgaaagctaaaggacaaagaagggaaagagacgggaagcccaaaaatggatgccaagctggggaaactagaggactccaagggggccagcaaagatttacctgggcattttttaaaggatcatctcaacaagaatgaagggctggcaaatggactgtcggagtctcaggagagccgcatggccagtatcaaagctgaggccgataaggtttacactttcacagacaacgctcccagcccttccatagggagcgcctcgaggctggaatgcagcactttggtgaacgggcaggcaccaatggcacctctgcatgtgttgacccagaatggggcagagagttcagctgcaaagacaagcagcccggcctattcagacatatctgatgctgctgacgatggtggttctgacagcaggtcggagggtatgagatcaaaggccagttccccatcagatattatttctagtaaggacagtgttgtaaaagggcattcttcaactacagcacaatcatctcaactgaaagagtcccattctccctattaccacagctatgatccttattattctccaagttacatgcaccctgggcaggtcggtgcccctgcagctggaaatagtgggagcacgcagggaatgaagatcaagaaggagtctgaggaagatgctgaaaagaaagacaaggcagagcagttagattctaagaaagtggaccacaattctgcatccttacagcctcagcaccagtcggtgatcacacaaagacatcctgccctggctcagtcactttattatggccagtatgcatatgggctctatatggaccagaagtctctgatggccaccagccctgcctatagacagcagtatgagaagtactatgaggaccagaggctggcagagcagaaaatggcccagactgggagaggagactgtgaaaggaaaagtgagctccccttgaaagagctgggcaaggaggaaactaaacagaaaaatatgccatcggccacaatctcaaaagctccctctactccggagcctaacaaaaaccattctaaactagggccatcagtgcctaataaaactgaggagacaggtaaatcgcagcttctctccaatcaccagcagcagcttcaggccgacagcttcaaagctaagcagatggaaaaccaccagcttattaaggaggctgtagaaatgaagtctgtcatggactctatgaagcagacaggtgtagacccaacctcgagatttaaacaagacccagattcaagaacatggcatcattatgtataccagcccaaatatctggatcagcaaaagtcagaagaacttgatagagagaagaaattaaaagaggatagtccgaggaaaactcctaataaagagagtggtgtgcccagccttcctgtatcgttaacaagcattaaagaggagcccaaagaggccaagcatcctgattctcaatcaatggaggagagcaagctgaaaaatgatgatcgaaagactcctgtgaactggaaggactctcggggaacaagagtggctgtctcctcacccatgagtcagcatcagtcatacatacagtacttgcatgcttatccttacccacagatgtacgaccccagccatcctgcataccgggctgtttctcccgtcctaatgcacagttatcctggggcatatctctctccaggatttcattatcctgtttatgggaagatgtcagggagagaagagacagagaaagtcaataccagccctagcgtcaacacgaaaacaaccactgaatctaaagcactggatttgctccagcagcatgctaaccaataccgcagcaagtctcctgctcctgtggaaaaggctacagctgagcgggaacgggaggcagaaagggaaagggatcgccactcccccttcggccagcggcacctgcacacgcaccaccacacccacgttggcatgggttacccgctaatcccgggtcaatatgacccttttcaaggcttgacctctgctgcccttgttgcctctcagcaggtggctgcccaggcatctgcatctggaatgtttcctggacaaagaagagaataacaagattggacatgtacattgtcatgtgactggatcacatggggaagcgctttatacagacatcagttccatggtgttaatttgaaatgccttaatggcaggcaaaaaccagtcatttcatttttgtaaattacagattttatcacagagtaacaaatgttgctgtaattaaacttctgttttatatatatatacgtatacatatctgtatatatacatatatatatatataaatataaatatattctttactttttgtatcagtaaccaggctcgcacacacagggtctgctgccacgtcgcaaaccactcagtaaaggaaattaaaaatgtatttgtcatgttaaaaagtgttagccacaaaaggctacttactttcttttccttttcctttaaaattgtaaataaataatgttatgtatcagtgtgcctgaaccttgcatatccttcacatatttcccataagcccctcagaaaggctaactgtgatgatgacactttggtacaatttagatgtctatttggtggctcctgttaaagacgcaccagtgtaaaatgttcctgtagtcactgtttgtacttgtgtattgtggaaaaagtacttttggaaggcatggggttgccagtaccacaaaaactgtgttgtatataatgtaaagattaaaatggggaaataatgagcatctgtgaataatgaggtgtcattttttgataatcttgaatggcaaataacccaatagcctgcgtaccagagacatctgtgattgttctattacttgaatagttctacagtctttttttttttttaatgtttacaattatccagttttagaagagagagactttaacgccattgcctggttacttgttttatgctgtaatctagtttattttatgtaaaatgtatattgaatgctttccttttttatacctgccttaaataatttggcaatcagaattaaaaagtttttttttttttaaat

SEQ ID NO: 658 - protein, 1512 aa, Homo sapiens
MSVNISTAGKGVDPNTVDTYDSGDDWEIGVGNLIIDLDADLEKDRQKFEMNNSTTTTSSSNSKDCGGPASSGAGATAALADGLKFASVQASAPQGNSHKETSKSKVKRSKTSKDANKSLPSAALYGIPEISSTGKRQEVQGRPGEATGMNSALGQSVSSGGSGNPNSNSTSTSTSAATAGAGSCGKSKEEKPGKSQSSRGAKRDKDAGKSRKDKHDLLQGHQNGSGSQAPSGGHLYGFGAKSNGGGASPFHCGGTGSGSVAAAGEVSKSAPDSGLMGNSMLVKKEEEEEESHRRIKKLKTEKVDPLFTVPAPPPPISSSLTPQILPSYFSPSSSNIAAPVEQLLVRTRSVGVNTCEVGVVTEPECLGPCEPGTSVNLEGIVWHETEEGVLVVNVTWRNKTYVGTLLDCTKHDWAPPRFCESPTSDLEMRGGRGRGKRARSAAAAPGSEASFTESRGLQNKNRGGANGKGRRGSLNASGRRTPPNCAAEDIKASPSSTNKRKNKPPMELDLNSSSEDNKPGKRVRTNSRSTPTTPQGKPETTFLDQGCSSPVLIDCPHPNCNKKYKHINGLRYHQAHAHLDPENKLEFEPDSEDKISDCEEGLSNVALECSEPSTSVSAYDQLKAPASPGAGNPPGTPKGKRELMSNGPGSIIGAKAGKNSGKKKGLNNELNNLPVISNMTAALDSCSAADGSLAAEMPKLEAEGLIDKKNLGDKEKGKKANNCKTDKNLSKLKSARPIAPAPAPTPPQLIAIPTATFTTTTTGTIPGLPSLTTTVVQATPKSPPLKPIQPKPTIMGEPITVNPALVSLKDKKKKEKRKLKDKEGKETGSPKMDAKLGKLEDSKGASKDLPGHFLKDHLNKNEGLANGLSESQESRMASIKAEADKVYTFTDNAPSPSIGSASRLECSTLVNGQAPMAPLHVLTQNGAESSAAKTSSPAYSDISDAADDGGSDSRSEGMRSKASSPSDIISSKDSVVKGHSSTTAQSSQLKESHSPYYHSYDPYYSPSYMHPGQVGAPAAGNSGSTQGMKIKKESEEDAEKKDKAEQLDSKKVDHNSASLQPQHQSVITQRHPALAQSLYYGQYAYGLYMDQKSLMATSPAYRQQYEKYYEDQRLAEQKMAQTGRGDCERKSELPLKELGKEETKQKNMPSATISKAPSTPEPNKNHSKLGPSVPNKTEETGKSQLLSNHQQQLQADSFKAKQMENHQLIKEAVEMKSVMDSMKQTGVDPTSRFKQDPDSRTWHHYVYQPKYLDQQKSEELDREKKLKEDSPRKTPNKESGVPSLPVSLTSIKEEPKEAKHPDSQSMEESKLKNDDRKTPVNWKDSRGTRVAVSSPMSQHQSYIQYLHAYPYPQMYDPSHPAYRAVSPVLMHSYPGAYLSPGFHYPVYGKMSGREETEKVNTSPSVNTKTTTESKALDLLQQHANQYRSKSPAPVEKATAEREREAERERDRHSPFGQRHLHTHHHTHVGMGYPLIPGQYDPFQGLTSAALVASQQVAAQASASGMFPGQRRE

SEQ ID NO: 659 - DNA, 1751 bp, Homo sapiens
cagcgcagcgcaccgcgggaagatggcgttggaggtcggcgatatggaagatgggcagctttccgactcggattccgacatgacggtcgcacccagcgacaggccgctgcaattgccaaaagtgctaggtggcgacagtgctatgagggccttccagaacacggcaactgcatgtgcaccagtatcacattatcgagctgttgaaagtgtggattcaagtgaagaaagtttttctgattcagatgatgatagctgtctttggaaacgcaaacgacagaaatgttttaaccctcctcccaaaccagagccttttcagtttggccagagcagtcagaaaccacctgttgctggaggaaagaagattaacaacatatggggtgctgtgctgcaggaacagaatcaagatgcagtggccactgaacttggtatcttgggaatggagggcactattgacagaagcagacaatccgagacctacaattatttgcttgccaagaaacttaggaaggaatctcaagagcatacaaaagatctagacaaggaactagatgaatatatgcatggtggcaaaaaaatgggatcaaaggaagaggaaaatgggcaaggtcatctcaaaaggaaacgacctgtcaaagacaggctagggaacagaccagaaatgaactataaaggtcgatacgagatcacagcggaagattctcaagagaaagtggctgatgaaatttcattcaggttacaggaaccaaagaaagacctgatagcccgagtagtgaggattattggtaacaaaaaggcaattgaacttctgatggaaaccgctgaagttgaacaaaatggtggtctctttataatgaatggtagtcgaagaagaacaccaggtggagtttttctgaatctcttgaaaaacactcctagtatcagcgaggaacaaattaaggacattttctacattgaaaaccaaaaggaatatgaaaataaaaaagctgctaggaagaggagaacacaagtgttggggaaaaagatgaaacaagctattaaaagtctaaattttcaagaagatgatgatacatcacgagaaacttttgcaagtgacacgaatgaggccttggcctctcttgatgagtcacaggaaggacatgcagaagccaagttggaggcagaggaagccattgaagttgatcattctcatgatttggacatcttttaagtacattttcaacagtttgaggactaagcctttctaaaataacattgtaataaaccatttttactgagattgcaacgttttgcactgataaacatgagaatctggaggaaagacaattgttttcttgtttaaaatatgtgtggaaaggaatgcaattgatagaacatttaaagatatatctgacaaaatacttaagagtatatagcacaggatttaatttctcaatctgttgcatgtgctaattatgagtattactagttgataatcagttttgtctaggtcataacataccatttgtaagtttgtttgctttttcaggtttatctttgcagtgaattatgctttgctttaaaacattccgctaaaatcataatgggacatataaattattaagctgttagaaatgcattcaaatttgttttttctgtgttctaagaactcaggcaattttaaggataaaaactaacattggccaggcacggtggctcacgcctgtaatcccaacactttaggagaccaaggcgggcagatcacttgaggtcag

SEQ ID NO: 660 - protein, 394 aa, Homo sapiens
MALEVGDMEDGQLSDSDSDMTVAPSDRPLQLPKVLGGDSAMRAFQNTATACAPVSHYRAVESVDSSEESFSDSDDDSCLWKRKRQKCFNPPPKPEPFQFGQSSQKPPVAGGKKINNIWGAVLQEQNQDAVATELGILGMEGTIDRSRQSETYNYLLAKKLRKESQEHTKDLDKELDEYMHGGKKMGSKEEENGQGHLKRKRPVKDRLGNRPEMNYKGRYEITAEDSQEKVADEISFRLQEPKKDLIARVVRIIGNKKAIELLMETAEVEQNGGLFIMNGSRRRTPGGVFLNLLKNTPSISEEQIKDIFYIENQKEYENKKAARKRRTQVLGKKMKQAIKSLNFQEDDDTSRETFASDTNEALASLDESQEGHAEAKLEAEEAIEVDHSHDLDIF

SEQ ID NO: 661 - DNA, 303 bp, Homo sapiens
atggcctccctctccgagctcgcctacatctactcggccctcattctgcataatgataaaatcaatgccctcattaaagcagctggtgtaaatgttgaacctttctggcctggcgtgtttgcaaaggccctagccaatgtcagcatcgggaaccccatctgcaatgtaagggctggtggacttgcagcagctggagatcctaccccctccactgctgctgcttcagttgagaagaaagtggaagcaaagaaagaagaatccgaggaatctgatgaggacatgggctttggtctttttgactaa

SEQ ID NO: 662 - protein, 100 aa, Homo sapiens
MASLSELAYIYSALILHNDKINALIKAAGVNVEPFWPGVFAKALANVSIGNPICNVRAGGLAAAGDPTPSTAAASVEKKVEAKKEESEESDEDMGFGLFD

SEQ ID NO: 663 - DNA, 459 bp, Homo sapiens
attgctgtcaggaatggcttcagggaaagatacttgtcctactttgcctaaactcactaacaactgctctgatgagagtctctataaatctgctaataagtatgaagagattcatttgccacgattttcattaaagcaagggatgatcccaagacgttatgtcatgccttggaaagaaaacatgatattcaggaatgtgaatctgaagcaagcagaagtgtgtgggatccatactggccctttagaagactctctgtttttgaatcacagtgaaaggctttgccatggggaagatcgtaaagttgtcttccaaaaaggcccaccagaaataaaaattgcagatatgcctttgcattcgcctctctccagataccaaagcactgtgatttcccatggcttcaggaggcgactagtctaatgaaagaagaataaaataataaagtgtttcaatctctgctc

SEQ ID NO: 664 - protein, 134 aa, Homo sapiens
MASGKDTCPTLPKLTNNCSDESLYKSANKYEEIHLPRFSLKQGMIPRRYVMPWKENMIFRNVNLKQAEVCGIHTGPLEDSLFLNHSERLCHGEDRKVVFQKGPPEIKIADMPLHSPLSRYQSTVISHGFRRRLV

SEQ ID NO: 665 - DNA, 552 bp, Homo sapiens
atacagtgacctcgggcggcgggtcgcgtcagcggggcatggcggcatggagcccggccgcagcagcgcctctgctccgcgggatctgcgggcttccacttcaccatgggatgtttgccacccagactgagggggagctcagagtgacccaaattctcaaagaaaagtttccacgagctacagctatcaaagtcactgacatttctggagttgtgggacgatgtatgaaattaaaattgaatcagaagaatttaaggagaagagaactgtccagcagcaccagatggtttatcaggcactaaaagaagaaatcaaagagatgcatggattgcggatatctacctctgtccccaaactctgaccacatcctggctgcatagatgctgctgcttaagaccttggatgaacttgactgacatcattcttccctaagcattcaccaaaaatttatatattttgctcatatacatttccatattataattatagaacatgtataatctatttagatgttaatttaaaggaaacaaacaactgaaaaaaaatacaaaa

SEQ ID NO: 666 - DNA, 2882 bp, Homo sapiens
gtgcagcctgagaggaaacaaagtgctgcgagcaggagacggcggcggcgcgaaccctgctgggcctccagtcaccctcgtcttgcattttcccgcgtgcgtgtgtgagtgggtgtgtgtgttttcttacaaagggtatttcgcgatcgatcgattgattcgtagttcccccccgcgcgcctttgccctttgtgctgtaatcgagctcccgccatcccaggtgcttctccgttcctctaaacgccagcgtctggacgtgagcgcaggtcgccggtttgtgccttcggtccccgcttcgccccctgccgtcccctccttatcacggtcccgctcgcggcctcgccgccccgctgtctccgccgcccgccatggcgactgcgacccccgtgccgccgcggatgggcagccgcgctggcggccccaccacgccgctgagccccacgcgcctgtcgcggctccaggagaaggaggagctgcgcgagctcaatgaccggctggcggtgtacatcgacaaggtgcgcagcctggagacggagaacagcgcgctgcagctgcaggtgacggagcgcgaggaggtgcgcggccgtgagctcaccggcctcaaggcgctctacgagaccgagctggccgacgcgcgacgcgcgctcgacgacacggcccgcgagcgcgccaagctgcagatcgagctgggcaagtgcaaggcggaacacgaccagctgctcctcaactatgctaagaaggaatctgatcttaatggcgcccagatcaagcttcgagaatatgaagcagcactgaattcgaaagatgcagctcttgctactgcacttggtgacaaaaaaagtttagagggagatttggaggatctgaaggatcagattgcccagttggaagcctccttagctgcagccaaaaaacagttagcagatgaaactttacttaaagtagatttggagaatcgttgtcagagccttactgaggacttggagtttcgcaaaagcatgtatgaagaggagattaacgagaccagaaggaagcatgaaacgcgcttggtagaggtggattctgggcgtcaaattgagtatgagtacaagctggcgcaagcccttcatgagatgagagagcaacatgatgcccaagtgaggctgtataaggaggagctggagcagacttaccatgccaaacttgagaatgccagactgtcatcagagatgaatacttctactgtcaacagtgccagggaagaactgatggaaagccgcatgagaattgagagcctttcatcccagctttctaatctacagaaagagtctagagcatgtttggaaaggattcaagaattagaggacttgcttgctaaagaaaaagacaactctcgtcgcatgctgacagacaaagagagagagatggcggaaataagggatcaaatgcagcaacagctgaatgactatgaacagcttcttgatgtaaagttagccctggacatggaaatcagtgcttacaggaaactcttagaaggcgaagaagagaggttgaagctgtctccaagcccttcttcccgtgtgacagtatcccgagcatcctcaagtcgtagtgtacgtacaactagaggaaagcggaagagggttgatgtggaagaatcagaggcgagtagtagtgttagcatctctcattccgcctcagccactggaaatgtttgcatcgaagaaattgatgttgatgggaaatttatccgcttgaagaacacttctgaacaggatcaaccaatgggaggctgggagatgatcagaaaaattggagacacatcagtcagttataaatatacctcaagatatgtgctgaaggcaggccagactgttacaatttgggctgcaaacgctggtgtcacagccagccccccaactgacctcatctggaagaaccagaactcgtggggcactggcgaagatgtgaaggttatattgaaaaattctcagggagaggaggttgctcaaagaagtacagtctttaaaacaaccatacctgaagaagaggaggaggaggaagaagcagctggagtggttgttgaggaagaacttttccaccagcagggaaccccaagagcatccaatagaagctgtgcaattatgtaaaattttcaactgtcttcctcaaaataaagaagtatggtaatccttacctgtatacagtgcagagccttctcagaagcacagaatatttttatatttcctttatgtgaatttttaagctgcaaatctgatggccttaatttcctttttgacactgaaagttttgtaaaagaaatcatgtccatacactttgttgcaagatgtgaattattgacactgaacttaataactgtgtactgttcggaaggggttcctcaaattttttgactttttttgtatgtgtgttttttctttttttttaagttcttatgaggaggggagggtaaataaaccactgtgcgtcttggtgtaatttgaagattgccccatctagactagcaatctcttcattattctctgctatatataaaacggtgctgtgagggaggggaaaagcatttttcaatatattgaacttttgtactgaatttttttgtaataagcaatcaaggttataattttttttaaaatagaaattttgtaagaaggcaatattaacctaatcaccatgtaagcactctggatgatggattccacaaaacttggttttatggttacttcttctcttagattcttaattcatgaggagggtgggggagggaggtggagggagggaagggtttctctattaaaatgcattcgttgtgttttttaagatagtgtaacttgcttaaatttcttatgtgacattaacaaataaaaaagctcttttaatat

SEQ ID NO: 667 - protein, 586 aa, Homo sapiens
MATATPVPPRMGSRAGGPTTPLSPTRLSRLQEKEELRELNDRLAVYIDKVRSLETENSALQLQVTEREEVRGRELTGLKALYETELADARRALDDTARERAKLQIELGKCKAEHDQLLLNYAKKESDLNGAQIKLREYEAALNSKDAALATALGDKKSLEGDLEDLKDQIAQLEASLAAAKKQLADETLLKVDLENRCQSLTEDLEFRKSMYEEEINETRRKHETRLVEVDSGRQIEYEYKLAQALHEMREQHDAQVRLYKEELEQTYHAKLENARLSSEMNTSTVNSAREELMESRMRIESLSSQLSNLQKESRACLERIQELEDLLAKEKDNSRRMLTDKEREMAEIRDQMQQQLNDYEQLLDVKLALDMEISAYRKLLEGEEERLKLSPSPSSRVTVSRASSSRSVRTTRGKRKRVDVEESEASSSVSISHSASATGNVCIEEIDVDGKFIRLKNTSEQDQPMGGWEMIRKIGDTSVSYKYTSRYVLKAGQTVTIWAANAGVTASPPTDLIWKNQNSWGTGEDVKVILKNSQGEEVAQRSTVFKTTIPEEEEEEEEAAGVVVEEELFHQQGTPRASNRSCAIM

SEQ ID NO: 668 - DNA, 1816 bp, Homo sapiens
agttgttgagcaggtccgtgaattgtcagcgcgctgtgggcgactgtgtggccgcggcggccgccaggcttgccgcactccccctgaggtgcccgccggaaccaatgtgccctggtccactgggccgtgagcagccaccgactgggggcaacttggcacttagaaccgcagcagggacgtcggtttgctatcgggactcggcgaggacgatggaaatcctgtatgaatgtggaagccattagcagagtaattgctgtctgttaccatgacaaccagccgctgcagtcacctgcccgaagtcctgccagactgcaccagctcagctgcacccgtggtgaagacggtggaggattgtggcagcctagtgaatgggcagccgcagtatgtcatgcaagtttcagccaaggacgggcagctgctgtcaacagtagtgcggactcttgccacccagagccccttcaatgaccggccgatgtgcaggatctgccacgagggcagcagccaagaggacttgctctctccatgtgaatgtacagggaccttggggacaattcatcggagctgcctggagcactggctgtcatcctcaaacaccagctactgtgaactctgccacttcaggtttgcagtcgagcgcaaacccaggccgttagtggagtggctgagaaaccctggcccccagcatgagaagcggactctgtttggcgacatggtgtgcttcttgtttataactcccctggccaccatctcgggctggctgtgcctgcggggcgccgtggaccacctgcactttagtagtcggctggaagccgtcggactgattgcactcactgtcgcactcttcactatttacctcttttggacactagtgtcatttaggtaccactgtcgattgtacaacgagtggcgtcggaccaatcagagggtgattctcctcattccaaagtctgtcaatgtaccttctaaccagccgtccttgctgggcctccattcggtcaagaggaactcaaaggagacagttgtttgatgtttgtatggttggttggttgtttgattcattgtttggggtttggaagtgtctgcactggggtcatgcactgagcgacccccaagcccttccttaagcctgtgggtctaagaacatccagagcatattagcacatcactccaagcaacaacctccgccagaagaaagcaaatgctgttttacttcaaatgatggatgctgcaatcatatgatatttgctaagctgccaaacatgtttatttagcagatactgtatggaattttctgaacacctctttaacgtatgaggaaggttgtcctgctacggatgcaattcaattcttcctttttttattactatttcaaacacacacacatatatatatatattaaacttagatgataatcaaaatcaaaaagtcaacgtaaaaactggtttcttggtttggttgggtcttatttgagttagtttgtttctcagtttctcgtatggattctttggggtactttggtagcctgagtggtctttttcatctctttcgcgtccattactcaaggagacagcataacagatgcagaacaagtcatatttgaagaatgttttgtactaaacttcatttaattattcagtttttaaagggaaaaagggcgtgagctcacacagtgagctgtttatttaaatatcattaaggagaaaaaaaaatatggtgagaagctcgctcctttcaacttgtttggtactgacagctgatagaagctattttctaataataaacatccagtgtgtgaaagacaaaaaaaaaaaaaaaa

SEQ ID NO: 669 - protein, 253 aa, Homo sapiens
MTTSRCSHLPEVLPDCTSSAAPVVKTVEDCGSLVNGQPQYVMQVSAKDGQLLSTVVRTLATQSPFNDRPMCRICHEGSSQEDLLSPCECTGTLGTIHRSCLEHWLSSSNTSYCELCHFRFAVERKPRPLVEWLRNPGPQHEKRTLFGDMVCFLFITPLATISGWLCLRGAVDHLHFSSRLEAVGLIALTVALFTIYLFWTLVSFRYHCRLYNEWRRTNQRVILLIPKSVNVPSNQPSLLGLHSVKRNSKETVV

SEQ ID NO: 670 - DNA, 5089 bp, Homo sapiens
atgcgcctgactcacatctgctgctgctgcctcctttaccagctggggttcctgtcgaatgggatcgtttcagagctgcagttcgcccccgaccgcgaggagtgggaagtcgtgtttcctgcgctctggcgccgggagccggtggacccggctggcggcagcgggggcagcgcggacccgggctgggtgcgcggcgttgggggcggcggaagcgcccgggcgcaggctgccggcagctcacgcgaggtgcgctctgtggctccggtgcctttggaggagcccgtggagggccgatcagagtcccggctccggcccccgccgccgtcggagggtgaggaggacgaggagctcgagtcgcaggagctgccgcggggatccagcggggctgccgccttgtccccgggcgccccggcctcgtggcagccgccgcctcccccgcagccgcccccgtccccgcccccggcccagcatgccgagccggatggcgacgaagtgttgctgcggatcccggccttctctcgggacctgtacctgctgctccggagagacggccgcttcctggcgccgcgcttcgcagtggaacagcggccaaatcccggccccggccccacgggggcagcatccgccccgcaacctcccgcgccaccagacgcaggctgcttctacaccggagctgtgctgcggcaccctggctcgctggcttctttcagcacctgtggaggtggcctgatgggatttatacagctcaatgaggacttcatatttattgagccactcaatgatacaatggccataacaggtcacccacaccgtgtatataggcagaaaaggtccatggaggaaaaggtcacagagaagtcagctcttcacagtcattactgtggtatcatttcagataaaggaagacctaggtctagaaaaatagcagaaagtggaagagggaaacgatattcatacaaattacctcaagaatacaacatagagactgtagtggttgcagacccagcaatggtttcctatcatggagcagatgcagccaggagattcattctaaccatcttaaatatggtatttaaccttttccaacacaagagtctgagtgtgcaggtcaatcttcgtgtgataaagcttattctgctccatgaaactccaccagaactatatattgggcatcatggagaaaaaatgctagagagtttttgtaagtggcaacatgaagaatttggcaaaaagaatgatatacatttagagatgtcaacaaactggggggaagacatgacttcagtggatgcagctatacttataacaaggaaagatttctgtgtgcacaaagatgaaccatgtgatactgttggtatagcttacttgagtggaatgtgtagtgaaaagagaaaatgtattattgctgaagacaatggcttgaatcttgcttttacaattgctcatgaaatgggtcacaacatgggcattaaccatgacaatgaccacccatcgtgtgctgatggtcttcatatcatgtctggtgaatggattaaaggacagaatcttggtgacgtttcatggtctcgatgtagcaaggaagatttggaaagatttctcaggtcaaaggccagtaactgcttgctacaaacaaatccgcagagtgtcaattctgtgatggttccctccaagctgccagggatgacatacactgctgatgaacaatgccagatcctttttgggccattggcttctttttgtcaggagatgcagcatgttatttgcacaggattatggtgcaaggtagaaggtgagaaagaatgcagaaccaagctagacccaccaatggatggaactgactgtgaccttggtaagtggtgtaaggctggagaatgtaccagcaggacctcagcacctgaacatctggccggagagtggagcctgtggagtccttgtagccgaacctgcagtgctgggatcagcagtcgagagcgcaaatgtcctgggctagattctgaagcaagggattgtaatggtcccagaaaacaatacagaatatgtgagaatccaccttgtcctgcaggtttgcctggattcagagactggcaatgtcaggcttatagtgttagaacttcctccccaaagcatatacttcagtggcaagctgtcctggatgaagaaaaaccatgtgccttgttttgctctcctgttggaaaagaacagcctattcttctatcagaaaaagtgatggatggaacttcttgtggctatcagggattagatatctgtgcaaatggcaggtgccagaaagttggctgtgatggtttattagggtctcttgcaagagaagatcattgtggtgtatgcaatggcaatggaaaatcatgcaagatcattaaaggggattttaatcacaccagaggagcaggttatgtagaagtgctggtgatacctgctggagcaagaagaatcaaagttgtggaggaaaagccggcacatagctatttagctctccgagatgctggcaaacagtctattaatagtgactggaagattgaacactctggagccttcaatttggctggaactaccgttcattatgtaagacgaggcctctgggagaagatctctgccaaaggtcctactacagcacctttacatcttctggtgctcctgtttcaggatcagaattatggtcttcactatgaatacactatcccatcagaccctcttccagaaaaccagagctctaaagcacctgagcccctcttcatgtggacacacacaagctgggaagattgcgatgccacttgtggaggaggagaaaggaagacaacagtgtcctgcacaaaaatcatgagcaaaaatatcagcattgtggacaatgagaaatgcaaatacttaaccaagccagagccacagattcgaaagtgcaatgagcaaccatgtcaaacaaggtggatgatgacagaatggaccccttgttcacgaacttgtggaaaaggaatgcagagcagacaagtggcctgtacccaacaactgagcaatggaacactgattagagcccgagagagggactgcattgggcccaagcccgcctctgcccagcgctgtgagggccaggactgcatgaccgtgtgggaggcgggagtgtggtctgagtgttcagtcaagtgtggcaaaggcatacgtcatcggaccgttagatgtaccaacccaagaaagaagtgtgtcctctctaccagacccagggaggctgaagactgtgaggattattcaaaatgctatgtgtggcgaatgggtgactggtctaagtgctcaattacctgtggcaaaggaatgcagtcccgtgtaatccaatgcatgcataagatcacaggaagacatggaaatgaatgtttttcctcagaaaaacctgcagcatacaggccatgccatcttcaaccctgcaatgagaaaattaatgtaaataccataacatcacccagactggctgctctgactttcaagtgcctgggagatcagtggccagtgtactgccgagtgatacgtgaaaagaacctatgtcaggacatgcggtggtatcagcgctgctgtgaaacatgcagggacttctatgcccaaaagctgcagcagaagagttgacctctagcaggctggctggatcacagctcttggcaattacattatttataaacacacacactagcatgtttttcagaccaaatattatcagattacatataatttaatcaaattaatttatttttttgcctgccaaacatccaatgtggtgcttgttttggttacacaaacattttgatttatactatatggcttcataaataattttatatgaatgaattagttggatccagtaatataataaaaagaaaaaggaaaaaaatagatcattatacttaaaacaagttttcgttgtttgttagggctatctctaaggtgctactctctccccaccaataacattgaattatccagaatgtatactgacttagcataatagtttaggtgtatatgaagagaaactatttttgttttttggtgtcctgctgcagaattagcccattttctgtcacctgcaggagatgtgtaaacataatgaacctcatgctgttgaacaggtttttagagaatgtattatgaatttggttcagatttatagacatccataggaaaaattctgctgtaattataaccttattttgatatggaaaagaaaagtcaaaatagagactttgatcatgttcatgaacatgtacttgaacacaagtattgtaacaatgaaacactgtaatgatttacactgaatcacaattgcactgttgatatagtgtagagaaatcgttagaaatggtgacatcttacaaaaaatgtgtattattttaacatgttatcactagattttagctttttttaaatatttttaacaaagaaaacattgatccacccatttccctgtatctttttagcagatttattaaagagtatagtacttagcctcacgaatcataattagaaaatttactagtatttctcagccttttccctaggaacaaggaaaaacagaaagcatataatacggtggtcgtttcattgtgtttttcttccttttaaaaattaaaaagttttacaattatgtgaaacgttcaaaagccagcttaaaatttttcttgtgagaaaatattatacatgattcacatgatttcttagatttttcaataaaatatgtaaaacttcccactgagagacaattcttcatagacttgtcacatatccacatgtctgatgaacaaaggtactgtctacttttgttctggagtatcttctagaggatgtttatagagtgaactgccttggaagatagtatgtctcttgggagcaaagggcaaacatacttctcattataaaagtttcaggttccctaaaattggggtttctttactataagacaatccaatgtatgttctgaggtcacctggctctcttcatgtcaccctttgggaaatggggctcaacgagccagtacaggaaaagctgattccctggctactactatcgctgtgagtaataaagtcctttgtgtctaatg

SEQ ID NO: 671 - protein, 1207 aa, Homo sapiens
MRLTHICCCCLLYQLGFLSNGIVSELQFAPDREEWEVVFPALWRREPVDPAGGSGGSADPGWVRGVGGGGSARAQAAGSSREVRSVAPVPLEEPVEGRSESRLRPPPPSEGEEDEELESQELPRGSSGAAALSPGAPASWQPPPPPQPPPSPPPAQHAEPDGDEVLLRIPAFSRDLYLLLRRDGRFLAPRFAVEQRPNPGPGPTGAASAPQPPAPPDAGCFYTGAVLRHPGSLASFSTCGGGLMGFIQLNEDFIFIEPLNDTMAITGHPHRVYRQKRSMEEKVTEKSALHSHYCGIISDKGRPRSRKIAESGRGKRYSYKLPQEYNIETVVVADPAMVSYHGADAARRFILTILNMVFNLFQHKSLSVQVNLRVIKLILLHETPPELYIGHHGEKMLESFCKWQHEEFGKKNDIHLEMSTNWGEDMTSVDAAILITRKDFCVHKDEPCDTVGIAYLSGMCSEKRKCIIAEDNGLNLAFTIAHEMGHNMGINHDNDHPSCADGLHIMSGEWIKGQNLGDVSWSRCSKEDLERFLRSKASNCLLQTNPQSVNSVMVPSKLPGMTYTADEQCQILFGPLASFCQEMQHVICTGLWCKVEGEKECRTKLDPPMDGTDCDLGKWCKAGECTSRTSAPEHLAGEWSLWSPCSRTCSAGISSRERKCPGLDSEARDCNGPRKQYRICENPPCPAGLPGFRDWQCQAYSVRTSSPKHILQWQAVLDEEKPCALFCSPVGKEQPILLSEKVMDGTSCGYQGLDICANGRCQKVGCDGLLGSLAREDHCGVCNGNGKSCKIIKGDFNHTRGAGYVEVLVIPAGARRIKVVEEKPAHSYLALRDAGKQSINSDWKIEHSGAFNLAGTTVHYVRRGLWEKISAKGPTTAPLHLLVLLFQDQNYGLHYEYTIPSDPLPENQSSKAPEPLFMWTHTSWEDCDATCGGGERKTTVSCTKIMSKNISIVDNEKCKYLTKPEPQIRKCNEQPCQTRWMMTEWTPCSRTCGKGMQSRQVACTQQLSNGTLIRARERDCIGPKPASAQRCEGQDCMTVWEAGVWSECSVKCGKGIRHRTVRCTNPRKKCVLSTRPREAEDCEDYSKCYVWRMGDWSKCSITCGKGMQSRVIQCMHKITGRHGNECFSSEKPAAYRPCHLQPCNEKINVNTITSPRLAALTFKCLGDQWPVYCRVIREKNLCQDMRWYQRCCETCRDFYAQKLQQKS

SEQ ID NO: 672 - DNA, 1715 bp, Homo sapiens
cgggaggcaacagacacgctggagtttaacaaacagcaatactcttcgcgctcctgaaaagcaggtctggacgctctccgtggtgctgaaacgcctcgcagccgccgctgtccgtggtatctacgaccccctcgctccaatttcccctggggctctccctccgcgcccctgttccccgcctccctttaacatctggattattttttgcaatagcgctttctggttttgtaagtgccaatttgaaacattttttgcccccataactcgtggactacaaagcacaaaggacctgaaaaatgtacagcttcaatactcttcgactctacctttcgggagccattgtattcttcagccttgctgcttctaaggaggctgaagctgctcgctccgcaaccaagcctatgtcaccctcggatttcctggataagctaatggggagaacctccggatatgatgccaggatcaggcccaattttaaaggtcccccagtgaacgtgagctgcaacattttcatcaacagctttggttccattgctgagacaaccatggactatagggtcaacatcttcctgcggcagcaatggaacgacccccgcctggcctataatgaataccctgacgactctctggacctggacccatccatgctggactccatctggaaacctgacctgttctttgccaacgagaagggggcccacttccatgagatcaccacagacaacaaattgctaaggatctcccggaatgggaatgtcctctacagcatcagaatcaccctgacactggcctgccccatggacttgaagaatttccccatggatgtccagacatgtatcatgcaactggaaagctttggatatacgatgaatgacctcatctttgagtggcaggaacagggagccgtgcaggtagcagatggactaactctgccccagtttatcttgaaggaagagaaggacttgagatactgcaccaagcactacaacacaggtaaattcacctgcattgaggcccggttccacctggagcggcagatgggttactacctgattcagatgtatattcccagcctgctcattgtcatcctctcatggatctccttctggatcaacatggatgctgcacctgctcgtgtgggcctaggcatcaccactgtgctcaccatgaccacccagagctccggctctcgagcatctctgcccaaggtgtcctatgtgaaagccattgacatttggatggcagtttgcctgctctttgtgttctcagccctattagaatatgctgccgttaactttgtgtctcggcaacataaggagctgctccgattcaggaggaagcggagacatcacaaggaggatgaagctggagaaggccgctttaacttctctgcctatgggatgggcccagcctgtctacaggccaaggatggcatctcagtcaagggcgccaacaacagtaacaccaccaacccccctcctgcaccatctaagtccccagaggagatgcgaaaactcttcatccagagggccaagaagatcgacaaaatatcccgcattggcttccccatggccttcctcattttcaacatgttctactggatcatctacaagattgtccgtagagaggacgtccacaaccagtgaagggtctgaaaggttgggggaggctgggagaggggaacgtgggaatagcacaggaatctgagagacggt

SEQ ID NO: 673 - protein, 449 aa, Homo sapiens
MYSFNTLRLYLSGAIVFFSLAASKEAEAARSATKPMSPSDFLDKLMGRTSGYDARIRPNFKGPPVNVSCNIFINSFGSIAETTMDYRVNIFLRQQWNDPRLAYNEYPDDSLDLDPSMLDSIWKPDLFFANEKGAHFHEITTDNKLLRISRNGNVLYSIRITLTLACPMDLKNFPMDVQTCIMQLESFGYTMNDLIFEWQEQGAVQVADGLTLPQFILKEEKDLRYCTKHYNTGKFTCIEARFHLERQMGYYLIQMYIPSLLIVILSWISFWINMDAAPARVGLGITTVLTMTTQSSGSRASLPKVSYVKAIDIWMAVCLLFVFSALLEYAAVNFVSRQHKELLRFRRKRRHHKEDEAGEGRFNFSAYGMGPACLQAKDGISVKGANNSNTTNPPPAPSKSPEEMRKLFIQRAKKIDKISRIGFPMAFLIFNMFYWIIYKIVRREDVHNQ

SEQ ID NO: 674 - DNA, 8052 bp, Homo sapiens
agagaggacttatctccagcatctagcactacagagcagaggctgtgtggagaatggctgaaaaatcagaattggttgtagaagcagttttctttctggttgtgagtatgagcccggcagacaccatgagcgctgttgcaggggagtcggcctgtgcttgacacatgtgtttcccattgatagctggagacagcccagtagctgtgagtcggtctgacaaagccatattgaagtacggagtacggtttcaaagcagtcagaaaaagaacgggaatgctgttcaggaaattcttcaggcatgggcagggacttggctgcagttctgcagttggaaaatctgactggggcagcttctgagcgcaggctgggcctgcacacactcagcgggccgagtggccacctccttcagagctgctcagcacgccctgggatcgcgggcggttttcatcggccggtttgtgaaacggacaagagagagacattactgccgggagtgttgagtgaagggaccaggtggagatgatgcctcaggagcagtacactcaccaccggagcaccatgcctggctctgtggggccacaggtatacaaggtggggatttatggctggcggaaacgatgcctgtatttctttgtcctgctcctcatgattttaatactggtgaacttggccatgaccatctggattctcaaagtcatgaacttcacaattgatggaatgggaaacctgaggatcacagaaaaaggtctaaagctagaaggagactctgaattcttacaacctctctacgccaaagaaatccagtcccgaccaggtaatgccctgtacttcaagtctgccagaaatgttacagtgaacattctcaatgaccagactaaagtgctaactcagcttataacaggtccaaaagccgtagaagcttatggtaaaaaatttgaggtaaaaactgtttctggaaaattgctcttctctgcagacaataatgaagtggtagtaggagctgaaagattacgagttttaggagcggagggcacagtgttccctaaatctatagaaacacctaatgtcagggcagaccccttcaaagaactaaggttggagtccccaacccggtctctagtgatggaggccccaaaaggagtggaaatcaatgcagaagctggcaatatggaagccacctgcaggacagagctgagactggaatccaaagatggagagattaagttagatgctgcgaaaatcaggctacctagactgcctcatggatcctacacgcctacaggaacgaggcagaaggtcttcgagatctgcgtctgcgccaatgggagattattcctgtctcaggcaggagctgggtccacttgtcagataaacacaagtgtctgcctctgaaagactatccatagtggacattgttggcagcataaaggccttttttggctttagacactggctgccagctatttttactagaacacagaaagcctatcaaagaccttgtgtgtatgtgtacgtgtgtgtgcgtgcttgagtgtgttcgcgtgtgtgggtggatataaatatatataaatatatataaataaatatatatatcctctgtataaaatgaggtttcagtacaaaaggaaccatgggtgaccctgcgatatccactgtcattttccatcccatccccaccacctgagtgacagaaatctaaacacacatccgtcccaacattccccagaccattcagaatcacacagcgtattaaacactgacagaatcttcatctagatattcgagtagcagcatatcttctcttttagtgtcattacgagggagtgatggcgggaatctcagtcgcactcaagctctgagacctttgtatcaaaaataggcatttgatttcctgttttagctttagtaaggctggctaacttccccctcttcaagctaggaactggcaatgctgtagaagtcagccgtaggaattcaaaatggctggcctaccttggctaccagacatattggggtttttgtagttgaatgaatgaggaggatgaatttcagcaaattttgaactgctcacccaacttctgctatcttgctccctccaaactcacagattctcctacagtcaaattaggagctgtaaatcagcacaaaataagataacagctgttcctcagtgagctggaagctacttaatggcctgatgggcaatgaacaaacgggtgatatgtctctgtttaagggaaaaatggcttaaaagctgttctgttctcacttctgactttaaccaaaagatttcaacccacaatgatcaggtcaatcaaaatccctaagagcagaactcctaccccaaaagaagcctggaagtctaattaagagtagcataaggaacctaattatgtttaccatgtttcttgggattggtgggaaatgtcaaaacatgccctttatttttaaaggcattcacaaactctctgactttgttcttcttatatattttttcagtgccgggatattcatattcctaaagccactattgtgttttctctaagaagcactacatgccaccagaattgtgcactgaaagataatacaaactgagtgtctttatgagaatcactgtgtcccctgaggcccagcagtacctgcttccctgtatgtggaagcagcacctcattcccgccatcagctacctctcatcaccccaccttcatcatcatgctccagggtcaccctggccagctcttgtgctgggacaggggattacaccatctctgttcaaagagggggaaatgtgcctatgccttaagtcaatgcactcagcaaggagaagcacatcttatttatcttgttacctatagtttactttgggtgattggaggggaatgacttagttatgactggacatcttaaaagctgatagacaagccaaatggctggcagatgatgtggatttcaaagagcccagaatgaactcatcactggcttagacagtcctggatgccatttggaaagtagtggccctgcaagcctaaatgaagtagtatttgtaggcctgggtggcatttggatttttcttttccctcaacaaggttttactttttcttactttacaagcaagggaagttttgtgataggagagaaataaaagatttgatattttttgagatgacactcaagcatcaggctgagatttgcacacatgggatgtaaaagcaagctgtgtgttgcttagtcacttacttagaagtagatggtgggggacagcggcgtgggtcctagcctggccagtgatgctgctggcgtccagaccccagactcactccaagcactcttgttcaatatctcatgcagaagagttgggctggtcactcttaggggtgagaccccgtgattggttggtttgtagcactaaggtctaaaaaggaaaaccataaaagacatcagattacgctggatcagtataattaatattccatagggccatgttgccagaatctgtatgtatcaatacagggtttttccaagccaggaaacgccctccttggctactaggagcacctatcccatatcattcagataaacaatgatagctacaaagtcatttgtggctagataggttaagacaggtgattttttaaagtagactgtctttgcattttgccatctgaagttcattaatctttagatgacaaaaaagcaaaaagttcccagaacgtttttgcttagattttgttctaatcaccacgtgaaggaatgagattagcaccacaagtttcatgccaataaaagagactggtgtgatcccacatgcaaaatttaatcctaagggtagtgagatcacaaacagaataaaaataagagcaatcaaccatataaatcaagtacctattgggaacagacataacattcaatttttcatttatgctaagtgaccacagtatacaaagtaataagcaggaaatttgatatgggttaaattatgcattttgttcagattttggaaattggtatgcattataagtttctcaatgtacatctttttatcccaacaccctcaaactagaatatttgtcagtggtcaagagaaaaaattttacctgaattcttgggggccggcggggagcttttacattaaaaatctactaacgcctactttttaaaaaatgagattctttctaatctttatatatgacattttctagacaatcgcacctttgggtatattaaacagctggtatcataacaaagaatccaaatgaaccttcaatatactagaagttctagtaggttaatattgttcagaagatttttacaaattaaaaactgatttccaaatatgttcaacatttacttctatttgatatctgctcaagaagtcatagaagtcttgggaaactattcgagtatcacagaggttttcaaaagcccttatggtgacatctacctaggtaaaagcctgacatgtggctttataattgttatgttacccaagggataaacttgaactggctttgaacatcctttaggtcattttctctttggataattttcatcgcatatccggcaactatagaccaaagtttgcttaaggtttgaccctagagcagaggtgggcaaactatgacctggaaaccaaatctgacttaccaccttttcctgtagttaaagttttattgtcacatagccacatacattcatttacatgttttctgattttacactacagcagcaggatggagtagttgtgtcagagactatgtatcccacaaagcatagattacttactatttagtcctttacaggcaaagtttcctcacccctgacctagaggtttttgtggtatgcattggatatagcaggaaagaaagcacatttccaaacagcagggagtaagcttacatttctgtgtaggtttgggaatatagttacttggcaaagtctttcaggaaggaagcccttccttatgttacatgtggaaagcctgccttccaagacatgtggaagtaattgatccacctgccagagaaacacaggctcagaggatgcctgggaacagggaggatgggattagtggaagcttaatggaaaaggaaagttatgatcctccaagacccttaattgatagaccataccaggttctgcaggtcagcatcattgtgtaatgagagtgaagtaggggaccctgtggttcaaccttagaatctgtttcctgtaggctctttctgctgtctatattcattaaagttttccacttcaccctcccatagtctagagggatgcccattccatggtcctccagagaatagttttgacttaacatgtctgtttagcccacatcacgtcagttatcaacaccgccactgtgcttactgttcctacagccacaccaggcttgaagagttagtgagaccaacaaataattggaagtattggaaaaagcaaaatacatggggacaaaaaaaatacagtgaaattctttttatcaaactgatgctgtgagaaaccagatgaatgccagtttggctttatttctaagaatctgggtcttcattctctggtgtagaaggaatgcaaaaaactataacaacaacaacaaaaacatattttgaaaagacatattctgacatctctgcttgtgtgtggtaaggcaggttcctatcagacatttatccctttggtcaagatcccttttgctcatccagggtttcatactcaatatcgcttaaaaaaaaaaaagtatcagctagggatgactctggaagtatgagtatcatggtggggaggaaggaattttttttaaatgtaaatgacccccatttaccagaccctaatcaaagtcacttaagggaatccctcagccttttatttggaaacagttgaaataaactggcagcagctagatcagagtatcttgctttattttataaaggccaaaggtagtatgaagtttggaccaaaaaggtaaatagatccattccagcacctgatactgatttttcaaggctctatgaaaggtcaaaaatttcattaaacaagaccagttctccctcttccccctgtcccaagaaatcttaggcatgaaaaggataaggaaacagctcctggaatgatacatttgcatagtgccctagtagcaggttgggaaaaagttataatataagaaacaaccttcgaaaacaggccttttatctcaaagataaaatgtctttcttgtggtctttcatcactatctccgtggtggaaggttcccctagttccaacatatttccattaaaatagtcaaagccacggcattgggatgtcagatgcctctctttctttgtggtaatcggaatttaaaattatacagttgcctctgaatttctcatgcacaaagccaaaccactgataagagataaagcagtctgaagcctgctgcttcagccagcacagcacaccacacacgctcgcactttcaaaagcaatgtgatttctatggttcttaaaagctttcttcataagggagtccctgaaatttctcaaggcaggtttgaatggcaaagggaaaataattacttgtgggaggtcctccttttgagtattgttagagcatacatgtaaaagaaaataacctttttggggcaactcatgctcacacatgctgttttctttggttctccccctaccttccttttgtagatattgacagaataggaggaaatgagcatccttatttgagaaagagcaagaatgtcatgagcccttgatgcaatagtaagtgtgatgtcatcatacagtgttaatgatgctatcaaatccatcaataaacagtctcaaaccttccaacaacagtgctcactgctgctcctcaacttcagcccagcaagcagtaatatcatcacccattttgagatatgcaggtggaatagaacaaagaaacagccactgtaatcgagaagcatgtttactgtctaaatccacctgttgcagtaggaagccagagtggggttccaaatgcctcattaagtatgtggacagcctcactagtaagtgagtgaatttggcttcatcactgaacattagctaaggtcagcttaataacacaaatatgaggccgacttctttgcgagaagagaaaagaaaacatctgcttgatttaaaatccaccccacatgcctagagttgtctaatagtccctcactttccaatggcttcacatcctacttctacatttggggttttttggtgaaatcagagatagctcaggatttcataaaacgagaaactccaaactggtctattaggttccatgggaacacttgtagccaaaggattgtctgagggcaggaagacgacacttgtcaacaaggaagacagtgtttctttagttcccatattcatctaattcatggggttctaacattttggggggccatagattcttttgacaatctgagccaatctatgaaacttctccccaaaaagaaccaccccacaaaatcttgcaaaacgtaagagattttcctggatctgaagctacccgaagacatgggaagagttgtattctattattcaattttaagaatatttattaatattcactgagctattgctagccactgtgctaaacattttacatacattctcctatttcatcctcaaaacaatcctttgagttgggttttaatatagttccaatattcggatgtgaaaactgaggcttatagtggctaagaaacttgcccaaagccactacctagaaaatggcagagctggaatgtaggtttaactcctgaccactatgctataaagtcaccacatgtcaaactaattttcaagttgttgggacatgtcccctactaggttttaaactagatcttccttggtagatgaagctatagaacttctattttccctgctttctgtagtctctcacagtgacagcatctatactaaagtatagatacctaaggggaaaatatagaaagcctgcctgaataatagaatctagaacaacaacaaaaatattaattttttctgtgtatgcttaggtcaagcttaaaaaaaaaaaaaaaa

SEQ ID NO: 675 - protein, 290 aa, Homo sapiens
MMPQEQYTHHRSTMPGSVGPQVYKVGIYGWRKRCLYFFVLLLMILILVNLAMTIWILKVMNFTIDGMGNLRITEKGLKLEGDSEFLQPLYAKEIQSRPGNALYFKSARNVTVNILNDQTKVLTQLITGPKAVEAYGKKFEVKTVSGKLLFSADNNEVVVGAERLRVLGAEGTVFPKSIETPNVRADPFKELRLESPTRSLVMEAPKGVEINAEAGNMEATCRTELRLESKDGEIKLDAAKIRLPRLPHGSYTPTGTRQKVFEICVCANGRLFLSQAGAGSTCQINTSVCL

SEQ ID NO: 676 - DNA, 1576 bp, Homo sapiens
agagaggacttatctccagcatctagcactacagagcagaggctgtgtggagaatggctgaaaaatcagaattggttgtagaagcagttttctttctggttgtgagtatgagcccggcagacaccatgagcgctgttgcaggggagtcggcctgtgcttgacacatgtgtttcccattgatagctggagacagcccagtagctgtgagtcggtctgacaaagccatattgaagtacggagtacggtttcaaagcagtcagaaaaagaacgggaatgctgttcaggaaattcttcaggcatgggcagggacttggctgcagttctgcagttggaaaatctgactggggcagcttctgagcgcaggctgggcctgcacacactcagcgggccgagtggccacctccttcagagctgctcagcacgccctgggatcgcgggcggttttcatcggccggtttgtgaaacggacaagagagagacattactgccgggagtgttgagtgaagggaccaggtggagatgatgcctcaggagcagtacactcaccaccggagcaccatgcctggctctgtggggccacaggtatacaaggtggggatttatggctggcggaaacgatgcctgtatttctttgtcctgctcctcatgattttaatactggtgaacttggccatgaccatctggattctcaaagtcatgaacttcacaattgatggaatgggaaacctgaggatcacagaaaaaggtctaaagctagaaggagactctgaattcttacaacctctctacgccaaagaaatccagtcccgaccaggtaatgccctgtacttcaagtctgccagaaatgttacagtgaacattctcaatgaccagactaaagtgctaactcagcttataacaggtccaaaagccgtagaagcttatggtaaaaaatttgaggtaaaaactgtttctggaaaattgctcttctctgcagacaataatgaagtggtagtaggagctgaaagattacgagttttaggagcggagggcacagtgttccctaaatctatagaaacacctaatgtcagggcagaccccttcaaagaactaaggttggagtccccaacccggtctctagtgatggaggccccaaaaggagtggaaatcaatgcagaagctggcaatatggaagccacctgcaggacagagctgagactggaatccaaagatggagaggtgagggatgagaaggacagaagttcaaagagctacagcttcaacaggccaacccttcccataactggttgacctcggagttggatcctacagtgtatcaacaaaaggagccaagcaggttttatttctgaaacaattaattgagcagcatgattataagccaaacccacaatccatcaaagtgatgatttcttatttgtaaaatgcagagataatggcatgtattccaagtacagaattatatgaccatgaaaatgaatgctattttcaaattctctcttgtcaccttaaaataagattttgttagccaacataattaagctgtatatattatacacatctggctcaagatgaaaaa

SEQ ID NO: 677 - protein, 256 aa, Homo sapiens
MMPQEQYTHHRSTMPGSVGPQVYKVGIYGWRKRCLYFFVLLLMILILVNLAMTIWILKVMNFTIDGMGNLRITEKGLKLEGDSEFLQPLYAKEIQSRPGNALYFKSARNVTVNILNDQTKVLTQLITGPKAVEAYGKKFEVKTVSGKLLFSADNNEVVVGAERLRVLGAEGTVFPKSIETPNVRADPFKELRLESPTRSLVMEAPKGVEINAEAGNMEATCRTELRLESKDGEVRDEKDRSSKSYSFNRPTLPITG

SEQ ID NO: 678 - DNA, 3362 bp, Homo sapiens
agactccctgtctttgcggtttgggagatgatgagaaaccacagaattgctagtagtttatgtggagatcaggtcttctccaagaaaaaaaaaaagaaaaaaaaaaacaacatggctgcaaaggagaaactggaggcagtgttaaatgtggccctgagggtgccaagcatcatgctgttggatgtcctgtacagatgggatgtcagctcctttttccagcagatccaaagaagtagccttagtaataaccctcttttccagtataagtatttggctcttaatatgcattatgtaggttatatcttaagtgtggtgctgctaacattgcccaggcagcatctggttcagctttatctatattttttgactgctctgctcctctatgctggacatcaaatttccagggactatgttcggagtgaactggagtttgcctatgagggaccaatgtatttagaacctctctctatgaatcggtttaccacagccttaataggtcagttggtggtgtgtactttatgctcctgtgtcatgaaaacaaagcagatttggctgttttcagctcacatgcttcctctgctagcacgactctgccttgttcctttggagacaattgttatcatcaataaatttgctatgatttttactggattggaagttctctattttcttgggtctaatcttttggtaccttataaccttgctaaatctgcatacagagaattggttcaggtagtggaggtatatggccttctcgccttgggaatgtccctgtggaatcaactggtagtccctgttcttttcatggttttctggctcgtcttatttgctcttcagatttactcctatttcagtactcgagatcagcctgcatcacgtgagaggcttcttttcctttttctgacaagtattgcggaatgctgcagcactccttactctcttttgggtttggtcttcacggtttcttttgttgccttgggtgttctcacactctgcaagttttacttgcagggttatcgagctttcatgaatgatcctgccatgaatcggggcatgacagaaggagtaacgctgttaatcctggcagtgcagactgggctgatagaactgcaggttgttcatcgggcattcttgctcagtattatccttttcattgtcgtagcttctatcctacagtctatgttagaaattgcagatcctattgttttggcactgggagcatctagagacaagagcttgtggaaacacttccgtgctgtaagcctttgtttatttttattggtattccctgcttatatggcttatatgatttgccagtttttccacatggatttttggcttcttatcattatttccagcagcattcttacctctcttcaggttctgggaacactttttatttatgtcttatttatggttgaggaattcagaaaagagccagtggaaaacatggatgatgtcatctactatgtgaatggcacttaccgcctgctggagtttcttgtggccctctgtgtggtggcctatggcgtctcagagaccatctttggagaatggacagtgatgggctcaatgatcatcttcattcattcctactataacgtgtggcttcgggcccagctggggtggaagagctttcttctccgcagggatgctgtgaataagattaaatcgttacccattgctacgaaagagcagcttgagaaacacaatgatatttgtgccatctgttatcaggacatgaaatctgctgtgatcacgccttgcagtcattttttccatgcaggctgtcttaagaaatggctgtatgtccaggagacctgccctctgtgccactgccatctgaaaaactcctcccagcttccaggattaggaactgagccagttctacagcctcatgctggagctgagcaaaacgtcatgtttcaggaaggtactgaacccccaggccaggagcatactccagggaccaggatacaggaaggttccagggacaataatgagtacattgccagacgaccagataaccaggaaggggcttttgaccccaaagaatatcctcacagtgcgaaagatgaagcacatcctgttgaatcagcctagaggagaagcagcaggaatgatgctttgatactctggaggagaagttaactcaagatggaattcatgttctgatttgaggaatgaaaatgagatgatcaggcaggaaactgacattccaaggatctaatccaggaagtactctcagtggggaccacctgctttcatcccctgacattgtgggagaaattttgcaatgtatgctaatcaaaatgtatttatatgttctctgctgatgttttatagaggtttgtgaagaaaattcaacctcagcaacttcagaaactgcccctgatacgtgtgagagagaaataaaatcagattttgagtgttgaagggactgaggaagtgaggataaagagcatgaggacagcatggaaagaaggaggcagaagtggaactgaactttcactctccatgggacagatcaatctcattatcaagtctgaatagcaaccagccctctcctccaccccgtttctcctcagttaattggagctcagtcaggtgattattgagtcttgtacagcactgaaatgaaatcaaagatgaagaagcattgattgtattcgaagattgaagcacgctcatactttgtatgtgctttagggaaggggtgggtgggcacttgggccttgcgggtgcattcatgtaatctgagactcttgaactttatgacggagtcttcaatattttgatgtatatgaaacttttgttaaatatgttgtatacttcgctggctgtgtgaagtaaactaaaactctgatgaacactttggagtctgctttagtgaaggagaccaaagtgggaagggctttagggcactgatagaggccctgggtgtacttttcaatcctgtgtaatgtttaattcttgcaactgaatcaaaacagtgttaaattatggcaatatttgcactttgggaatgagtacataactgtatgatcacactctgcaaatgccacttttaaagctgttaatagactttgcaccttttctttgacaaggatgtgtcatatttaaatttttacattcatcatggctacaggtagaactggggaggggggaatgtaattttttatgggaattttgatatgaaaagaaactagtcatttatttatacaataggcttggctcaaaaagtgtttttcagacctcggtattcctaatgtgggatgtgactttattttatttttagtagcaaatttggatgtagactgacagacatagctgaatgtcttaataaatttaaatttgaagat

SEQ ID NO: 679 - protein, 691 aa, Homo sapiens
MMRNHRIASSLCGDQVFSKKKKKKKKNNMAAKEKLEAVLNVALRVPSIMLLDVLYRWDVSSFFQQIQRSSLSNNPLFQYKYLALNMHYVGYILSVVLLTLPRQHLVQLYLYFLTALLLYAGHQISRDYVRSELEFAYEGPMYLEPLSMNRFTTALIGQLVVCTLCSCVMKTKQIWLFSAHMLPLLARLCLVPLETIVIINKFAMIFTGLEVLYFLGSNLLVPYNLAKSAYRELVQVVEVYGLLALGMSLWNQLVVPVLFMVFWLVLFALQIYSYFSTRDQPASRERLLFLFLTSIAECCSTPYSLLGLVFTVSFVALGVLTLCKFYLQGYRAFMNDPAMNRGMTEGVTLLILAVQTGLIELQVVHRAFLLSIILFIVVASILQSMLEIADPIVLALGASRDKSLWKHFRAVSLCLFLLVFPAYMAYMICQFFHMDFWLLIIISSSILTSLQVLGTLFIYVLFMVEEFRKEPVENMDDVIYYVNGTYRLLEFLVALCVVAYGVSETIFGEWTVMGSMIIFIHSYYNVWLRAQLGWKSFLLRRDAVNKIKSLPIATKEQLEKHNDICAICYQDMKSAVITPCSHFFHAGCLKKWLYVQETCPLCHCHLKNSSQLPGLGTEPVLQPHAGAEQNVMFQEGTEPPGQEHTPGTRIQEGSRDNNEYIARRPDNQEGAFDPKEYPHSAKDEAHPVESA

SEQ ID NO: 680 - DNA, 2178 bp, Homo sapiens
acttccggtcgctttcggtctctcagcggccggtttctgcgtccgctgccgcaggttccaccgcgctccaggtatttttttttctgaaggaaagctgcttcctcatatgtttcaagaatggctctccctatcattgtaaaatggggtggacaggagtattcagtgaccacactttcagaagatgatactgtgctcgatctcaaacagtttctcaagacccttacaggagttcttccagaacgccaaaagttacttggactcaaagttaaaggcaaacctgcagaaaatgatgttaagcttggagctctcaaactgaaaccaaatactaaaatcatgatgatgggaactcgtgaggagagcttgggagatgtcttaggtccaccccctgacaatgatgatgttgttaatgactttgatattgaagatgaagtagttgaagtagaaaatagggaagaaaacctactgaaaatttctcgcagagtgaaagagtacaaagtggaaattttgaatcctcccagggaagggaaaaagcttttggtgctagatgttgattatacattatttgaccacaggtcttgtgcagagactggggtagaattaatgcggccatatcttcatgaatttctaacatctgcctatgaagattatgacattgttatttggtctgcaacaaatatgaagtggattgaagctaaaatgaaagagctgggagtgagcacaaatgcaaattataagattactttcatgttggatagtgctgctatgataacagtacatactccaaggagaggattaatagacgtaaagcctcttggtgttatatggggaaagttttcggagttttacagcaagaaaaacaccattatgtttgatgacatagggagaaattttctaatgaacccacagaatggactaaagataaggccttttatgaaagcgcacctaaatcgtgataaagacaaagaacttttaaaattaactcagtacctcaaggagatagcaaaattagatgactttttggatctaaatcacaaatattgggaaagatatctctcaaagaagcaaggacagtagttacaagttatactggcagttattgaagatacttaagatccaagaacttcttgcttttatgctagaaatcattatgatagtgctggacactgaagcaaataccatactgcttatacttggtcttccagttttttgtaagtttaattttatattttttgaagatgatagcaatatgctaaaaaatgcttgtcccctatatgaatattctgttacgcttgaaaaatattttctccagcgttggttactgaccaccccaccctcccaccacacacacacacacacacacacacacacacacacacacacacacacacaaagtggagaaaaatgtatactcaacaatgtcattttgtgactttggaaacaagttatgttttgtgtttttgtctcattgtgttattgtctgactaaatctaaaaccaaacccatgttgaaactagtacttttccctttaaaaacaaaccaaaaaaaaaaaacaaaaaaaaactttttaattaaagaacctagtttgctatgcttaaaattaccaagaattttttatttctttgtcatagacacaatttctcttctgtatgccactagttacatttctaaattctgagcggtctcagttaggcctgtatgtgtgtacatgtccaagtaaagctggaaaatgtcagtcttgacacagctgtgtcttagtatgagaaacagaagactgaagaataaaaactaaggaacaagaatgagtctctttttggtggctaagtagaatcttcctaaaaccattgtcataaaagcagttaaaggcaataaatttttaaaagggacatatcactgattcattcctaaaaagcatgaacaaaaagtttttgttctgttccagctatatcttgtctaagtgctaacactgtttcagtgaaaatatctagccataagattaaaaaaatatattatttgcaatgcttaagcctgcagatacgtaatgtgaccactgttttgtgttgacaatattgctttatacagttcttgtatttgaaaggaattgatccttttaaagaaacatggtgtatattgttcttacaggactaatttcagtggtgtaaataataaatatcttttctg

SEQ ID NO: 681 - protein, 318 aa, Homo sapiens
MALPIIVKWGGQEYSVTTLSEDDTVLDLKQFLKTLTGVLPERQKLLGLKVKGKPAENDVKLGALKLKPNTKIMMMGTREESLGDVLGPPPDNDDVVNDFDIEDEVVEVENREENLLKISRRVKEYKVEILNPPREGKKLLVLDVDYTLFDHRSCAETGVELMRPYLHEFLTSAYEDYDIVIWSATNMKWIEAKMKELGVSTNANYKITFMLDSAAMITVHTPRRGLIDVKPLGVIWGKFSEFYSKKNTIMFDDIGRNFLMNPQNGLKIRPFMKAHLNRDKDKELLKLTQYLKEIAKLDDFLDLNHKYWERYLSKKQGQ

SEQ ID NO: 682 - DNA, 2347 bp, Homo sapiens
ctgtttcagggccattggactctccgtcctgcccagagcaagatgtgtcaccagcagttggtcatctcttggttttccctggtttttctggcatctcccctcgtggccatatgggaactgaagaaagatgtttatgtcgtagaattggattggtatccggatgcccctggagaaatggtggtcctcacctgtgacacccctgaagaagatggtatcacctggaccttggaccagagcagtgaggtcttaggctctggcaaaaccctgaccatccaagtcaaagagtttggagatgctggccagtacacctgtcacaaaggaggcgaggttctaagccattcgctcctgctgcttcacaaaaaggaagatggaatttggtccactgatattttaaaggaccagaaagaacccaaaaataagacctttctaagatgcgaggccaagaattattctggacgtttcacctgctggtggctgacgacaatcagtactgatttgacattcagtgtcaaaagcagcagaggctcttctgacccccaaggggtgacgtgcggagctgctacactctctgcagagagagtcagaggggacaacaaggagtatgagtactcagtggagtgccaggaggacagtgcctgcccagctgctgaggagagtctgcccattgaggtcatggtggatgccgttcacaagctcaagtatgaaaactacaccagcagcttcttcatcagggacatcatcaaacctgacccacccaagaacttgcagctgaagccattaaagaattctcggcaggtggaggtcagctgggagtaccctgacacctggagtactccacattcctacttctccctgacattctgcgttcaggtccagggcaagagcaagagagaaaagaaagatagagtcttcacggacaagacctcagccacggtcatctgccgcaaaaatgccagcattagcgtgcgggcccaggaccgctactatagctcatcttggagcgaatgggcatctgtgccctgcagttaggttctgatccaggatgaaaatttggaggaaaagtggaagatattaagcaaaatgtttaaagacacaacggaatagacccaaaaagataatttctatctgatttgctttaaaacgtttttttaggatcacaatgatatctttgctgtatttgtatagttagatgctaaatgctcattgaaacaatcagctaatttatgtatagattttccagctctcaagttgccatgggccttcatgctatttaaatatttaagtaatttatgtatttattagtatattactgttatttaacgtttgtctgccaggatgtatggaatgtttcatactcttatgacctgatccatcaggatcagtccctattatgcaaaatgtgaatttaattttatttgtactgacaacttttcaagcaaggctgcaagtacatcagttttatgacaatcaggaagaatgcagtgttctgataccagtgccatcatacacttgtgatggatgggaacgcaagagatacttacatggaaacctgacaatgcaaacctgttgagaagatccaggagaacaagatgctagttcccatgtctgtgaagacttcctggagatggtgttgataaagcaatttagggccacttacacttctaagcaagtttaatctttggatgcctgaattttaaaagggctagaaaaaaatgattgaccagcctgggaaacataacaagaccccgtctctacaaaaaaaatttaaaattagccaggcgtggtggctcatgcttgtggtcccagctgttcaggaggatgaggcaggaggatctcttgagcccaggaggtcaaggctatggtgagccgtgattgtgccactgcataccagcctaggtgacagaatgagaccctgtctcaaaaaaaaaaatgattgaaattaaaattcagctttagcttccatggcagtcctcacccccacctctctaaaagacacaggaggatgacacagaaacaccgtaagtgtctggaaggcaaaaagatcttaagattcaagagagaggacaagtagttatggctaaggacatgaaattgtcagaatggcaggtggcttcttaacagccctgtgagaagcagacagatgcaaagaaaatctggaatccctttctcattagcatgaatgaacctgatacacaattatgaccagaaaatatggctccatgaaggtgctacttttaagtaatgtatgtgcgctctgtaaagtgattacatttgtttcctgtttgtttatttatttatttatttttgcattctgaggctgaactaataaaaactcttctttgtaatc

SEQ ID NO: 683 - protein, 328 aa, Homo sapiens
MCHQQLVISWFSLVFLASPLVAIWELKKDVYVVELDWYPDAPGEMVVLTCDTPEEDGITWTLDQSSEVLGSGKTLTIQVKEFGDAGQYTCHKGGEVLSHSLLLLHKKEDGIWSTDILKDQKEPKNKTFLRCEAKNYSGRFTCWWLTTISTDLTFSVKSSRGSSDPQGVTCGAATLSAERVRGDNKEYEYSVECQEDSACPAAEESLPIEVMVDAVHKLKYENYTSSFFIRDIIKPDPPKNLQLKPLKNSRQVEVSWEYPDTWSTPHSYFSLTFCVQVQGKSKREKKDRVFTDKTSATVICRKNASISVRAQDRYYSSSWSEWASVPCS

SEQ ID NO: 684 - DNA, 2484 bp, Homo sapiens
attcctcgttagggcaggcgcggccccttcggctccgagctgaccctgatcagggccgagttgtctcggcggcgctgccgaggcctccacccaggacagtccccctccccgggcctctctcctcttgcctacgagtcccctctcctcgtaggcctctcggatctgatatcgtggggtgaggtgagcaggcccggggagggtggttaccgctgaggagctgcagtctctgtcaagatgatagaggtactgacaacaactgactctcagaaactgctacaccagctgaatgccctgttggaacaggagtctagatgtcagccaaaggtctgtggtttgagactaattgagtctgcacacgataatggcctcagaatgactgcaagactaagggactttgaagtaaaagatcttcttagtctaactcagttctttggctttgacacagagacattttctctagctgtgaatttactggacagattcctgtctaaaatgaaggtacagcccaagcaccttgggtgtgttggactgagctgcttttatttggctgtaaaatcaatagaagaggaaaggaatgtcccattggcaactgacttgatccgaataagtcaatataggtttacggtttcagacttgatgagaatggaaaagattgtattggagaaggtgtgttggaaagtcaaagctactactgcctttcaatttctgcaactgtattattcactccttcaagagaacttgccacttgaaaggagaaatagcattaattttgaaagactagaagctcaactgaaggcatgtcattgcaggatcatattttctaaagcaaagccttctgtgttggcattgtctatcattgcattagagatccaagcacagaagtgtgtagagttaacagaaggaatagaatgtcttcagaaacattccaagataaatggcagagatctgaccttctggcaagagcttgtatccaaatgtttaactgaatattcatcaaataagtgttccaaaccaaatgttcagaagttgaaatggattgtttctgggcgtactgcacggcaattgaagcatagctactacagaataactcaccttccaacaattcctgaaatggtcccttaactggattattacagcaccaaaaaacttctctgaagcctttctccacaaccttgttctatggattccataatgttacaatggatttaagctatgaagcctcaaaacatcacgagataagcatgatggtctcagacttgggaaaactgcctaatattatgctgtagtggaattatgtttagatttgaattcatctgtgaagcattcaaatcaaagctaaaagcctaaatgtgaaatgctaatgacaagcctgagaaggtaaactgtgaatcttcatttctatcattgatctaactttagatattggatcaatatatttaggtggtattgaaaatgctattggaggagtcacactaatactatcaactatcagtcttcccacagcttcaatcactgtcattattctaatcctactcctacttaaattttaagttatgaggtttatgtcaaaagcaacatttcacaaatgtacttttaaggcataataagggttaacattctaggcagtataaacacaccccataatgcaagtaataggtaatctagagatgtggactttattgctatatgggaattacatttaaatttgagggcattttatataaagaaaaatacagacctataaagtttggcatattcattaagttatcttttaatatttttttctagaaaacaggtgacatttgtatctacgataaaaatttttatacagaacctactgcctcaaactgaatcccatcaagaaaactagtttctattgtattagtaactcaaaataaattatcacttcgaaaacttgctttcccacactaaggtaagttcagactagattgaacactccagaattttttactacagactgtttttaagttagaagtgatggcaattttataaatagagaatatacttccactgatgcccttactgtgccaaaacaaaaatcttaagaaaagcaagtagacaccttcataactatgaatgaagctgctgaagtagtgtttaggatcctccatggcagttagtgaatgtaagaagtacagtgttaaagtgttgtaaacagttactcagtgcaatgtatagcctgagtctatccatgatggctatatccaatttgacatcacgttatggatcagtacacaatgaaaaaccaaagaaccacagtatatcttattcttaacttttgtaaaccatgttttatgggtaactttttagttttcccaaaaggctgataaatttcaatattttgaatacatcattgttaattttgagttggcagaggtaaactaaccaactaccattatgttttagtactaagggatatacctttcaataaagttaatgaaattcaaaaaaaaaaaaaaaaaa

SEQ ID NO: 685 - protein, 295 aa, Homo sapiens
MIEVLTTTDSQKLLHQLNALLEQESRCQPKVCGLRLIESAHDNGLRMTARLRDFEVKDLLSLTQFFGFDTETFSLAVNLLDRFLSKMKVQPKHLGCVGLSCFYLAVKSIEEERNVPLATDLIRISQYRFTVSDLMRMEKIVLEKVCWKVKATTAFQFLQLYYSLLQENLPLERRNSINFERLEAQLKACHCRIIFSKAKPSVLALSIIALEIQAQKCVELTEGIECLQKHSKINGRDLTFWQELVSKCLTEYSSNKCSKPNVQKLKWIVSGRTARQLKHSYYRITHLPTIPEMVP

SEQ ID NO: 686 - DNA, 2384 bp, Homo sapiens
attcctcgttagggcaggcgcggccccttcggctccgagctgaccctgatcagggccgagttgtctcggcggcgctgccgaggcctccacccggggagggtggttaccgctgaggagctgcagtctctgtcaagatgatagaggtactgacaacaactgactctcagaaactgctacaccagctgaatgccctgttggaacaggagtctagatgtcagccaaaggtctgtggtttgagactaattgagtctgcacacgataatggcctcagaatgactgcaagactaagggactttgaagtaaaagatcttcttagtctaactcagttctttggctttgacacagagacattttctctagctgtgaatttactggacagattcctgtctaaaatgaaggtacagcccaagcaccttgggtgtgttggactgagctgcttttatttggctgtaaaatcaatagaagaggaaaggaatgtcccattggcaactgacttgatccgaataagtcaatataggtttacggtttcagacttgatgagaatggaaaagattgtattggagaaggtgtgttggaaagtcaaagctactactgcctttcaatttctgcaactgtattattcactccttcaagagaacttgccacttgaaaggagaaatagcattaattttgaaagactagaagctcaactgaaggcatgtcattgcaggatcatattttctaaagcaaagccttctgtgttggcattgtctatcattgcattagagatccaagcacagaagtgtgtagagttaacagaaggaatagaatgtcttcagaaacattccaagataaatggcagagatctgaccttctggcaagagcttgtatccaaatgtttaactgaatattcatcaaataagtgttccaaaccaaatgttcagaagttgaaatggattgtttctgggcgtactgcacggcaattgaagcatagctactacagaataactcaccttccaacaattcctgaaatggtcccttaactggattattacagcaccaaaaaacttctctgaagcctttctccacaaccttgttctatggattccataatgttacaatggatttaagctatgaagcctcaaaacatcacgagataagcatgatggtctcagacttgggaaaactgcctaatattatgctgtagtggaattatgtttagatttgaattcatctgtgaagcattcaaatcaaagctaaaagcctaaatgtgaaatgctaatgacaagcctgagaaggtaaactgtgaatcttcatttctatcattgatctaactttagatattggatcaatatatttaggtggtattgaaaatgctattggaggagtcacactaatactatcaactatcagtcttcccacagcttcaatcactgtcattattctaatcctactcctacttaaattttaagttatgaggtttatgtcaaaagcaacatttcacaaatgtacttttaaggcataataagggttaacattctaggcagtataaacacaccccataatgcaagtaataggtaatctagagatgtggactttattgctatatgggaattacatttaaatttgagggcattttatataaagaaaaatacagacctataaagtttggcatattcattaagttatcttttaatatttttttctagaaaacaggtgacatttgtatctacgataaaaatttttatacagaacctactgcctcaaactgaatcccatcaagaaaactagtttctattgtattagtaactcaaaataaattatcacttcgaaaacttgctttcccacactaaggtaagttcagactagattgaacactccagaattttttactacagactgtttttaagttagaagtgatggcaattttataaatagagaatatacttccactgatgcccttactgtgccaaaacaaaaatcttaagaaaagcaagtagacaccttcataactatgaatgaagctgctgaagtagtgtttaggatcctccatggcagttagtgaatgtaagaagtacagtgttaaagtgttgtaaacagttactcagtgcaatgtatagcctgagtctatccatgatggctatatccaatttgacatcacgttatggatcagtacacaatgaaaaaccaaagaaccacagtatatcttattcttaacttttgtaaaccatgttttatgggtaactttttagttttcccaaaaggctgataaatttcaatattttgaatacatcattgttaattttgagttggcagaggtaaactaaccaactaccattatgttttagtactaagggatatacctttcaataaagttaatgaaattcaaaaaaaaaaaaaaaaaa

SEQ ID NO: 687 - protein, 295 aa, Homo sapiens; identical to SEQ ID NO: 685

SEQ ID NO: 688 - DNA, 977 bp, Homo sapiens
ggagaggccgaggcgtagcctaagcgtgggattccgcgcgtgcgctcggctccgcctggtgcggccgcggccgggagggactggattatgtcggccccgtttgaggagcggagtggggtggtaccgtgcgggaccccgtggggccagtggtaccagaccttggaggaggtgttcattgaagttcaggtgccgccaggcacgcgcgcccaggatatccagtgcggcctccagagccggcatgtggcgctgtcggtgggcggccgcgagatcctcaagggcaaactctttgattctacaatagctgatgagggaacatggactttggaggacagaaaaatggttcgtattgttcttacaaagacaaagagagatgcagcaaattgttggacttctctactagaatctgaatatgcagcggatccttgggtgcaagaccaaatgcagagaaagcttacattagagagattccaaaaagaaaatcctggttttgacttcagtggagcagaaatctcaggaaactacactaaaggtggaccagatttctcaaaccttgagaaataactgctttttttcctgcattctgtggatcctagcagatattgccaacttaatcagataaacagattatgtaatggaagaaaaatgcggatgcctacagttaacagattgcaaaatgtatcttaaaatggttctaaaaattgcattcaaacataatttacataggaaatgtactgtgggaactattctatggatatatggtaaagttgttttggacttgtttttgctcagcatgaagttttatatgctgcattttactaattccatatttaaccatatttttaatacaaaagaacattagagtatagatcatgtgaaatgaagggtgcctttggggaaaattaactttttcttttgataagtatgatattcaataaaattttctaaataaaaaaaaaaaaaaaaaaaaaaaaaaaaaa

SEQ ID NO: 689 - protein, 157 aa, Homo sapiens
MSAPFEERSGVVPCGTPWGQWYQTLEEVFIEVQVPPGTRAQDIQCGLQSRHVALSVGGREILKGKLFDSTIADEGTWTLEDRKMVRIVLTKTKRDAANCWTSLLESEYAADPWVQDQMQRKLTLERFQKENPGFDFSGAEISGNYTKGGPDFSNLEK

SEQ ID NO: 690 - DNA, 7777 bp, Homo sapiens
agtgcgcgccgagcgaagggcggcggcggtggcggcggcggctcgtgctcggccccggctgcgattgcgctcagctccaggttccctgcccgcggcggcgcgcccccagcgctccctgcaccccgcgccacccgcacccgcgctcggcccgctgcgggcggaggagcggccatgccgccgcggcgcagcatcgtggaggtgaaggtgctagacgtgcagaagcggcgggtgcccaacaagcattatgtctacatcatccgggtcacgtggtccagcggctccaccgaggccatttaccggcgctacagcaagttttttgacctccagatgcagatgttggacaaatttcccatggaaggaggacagaaggaccccaagcagcggatcatcccctttctgccaggtaagattctcttcagacgaagccacatccgggacgtggctgtcaaacgcctgataccaattgatgaatactgtaaggccctcatccagctgcccccctacatctctcagtgtgatgaggtgctgcagttctttgagacaagacctgaggacctgaatccccccaaagaggagcacattgggaaaaagaaatctgggggtgaccaaacctcagtggaccccatggtcctggagcagtatgtggtggtagccaactaccagaagcaggagagttcggagatcagcctcagcgtggggcaggtggtggacatcatcgagaagaatgagtcaggttggtggttcgtcagcactgccgaggagcaaggctgggtccctgcaacgtgcctcgaaggccaggatggggtgcaggatgagttttctctgcagcctgaagaagaggagaagtacacagtcatctacccgtacacagctcgggaccaggatgaaatgaacctggagagaggggctgtggtggaggtcatccagaaaaacctggaaggctggtggaagatcaggtaccagggcaaagaaggctgggcccccgcctcctacctaaagaagaacagtggggagcccttgcccccgaagccaggccctggctcaccctcccacccgggtgcccttgacttggatggtgtttcccggcagcagaacgcggtgggcagggagaaggagctgctcagcagccagagggacgggcggtttgaaggccgcccggtgcccgacggtgacgccaagcagagatcaccaaagatgaggcagagaccccctcctcgccgggacatgaccattcctcgaggcctcaacctgccgaagccgcccatcccgccccaagtggaggaagagtattacaccatcgccgaattccagacaaccatcccagacggcatcagcttccaggcaggcctgaaggtcgaggtgatcgagaaaaacttgagtggctggtggtacattcagattgaagataaggaagggtgggccccggccaccttcattgacaagtacaagaagacgagcaacgcgtcgagacccaactttctggctcccctgccccacgaggtgacccagctccggctgggggaagcagcagcgctggagaacaacacgggcagcgaagccacgggcccctcccggcccctgcctgacgcaccgcatggtgtcatggactcggggttgccatggtctaaagactggaagggcagtaaggatgtcctgaggaaggcatcttcagacatgtctgcgtcagcaggctacgaggagatctcagaccccgacatggaggagaagcccagcctccctccgcggaaagaatccatcatcaagtcggagggggagctgctggagcgggagcgggagcggcagaggacggagcagctccggggccccactcccaagcctccgggcgtgattttgccgatgatgccagccaaacacatccctccagcccgggacagcaggaggccagagcccaaacctgacaaaagcagactgttccagctgaaaaatgacatggggctggagtgtggccacaaggtcttggccaaggaagtgaagaagcccaacctccggcccatctccaaatccaaaactgacctgccagaggagaagccagatgccactccccagaatcccttcttgaagtccagacctcaggttaggccaaaaccagctccttcccccaaaacggagccacctcagggcgaagaccaagtcgacatctgcaacctcaggagtaagctcaggcctgccaagtcccaagacaagtccttgttggatggggagggcccccaggcagtagggggccaagacgtggccttcagccgaagcttcctcccaggagaggggcctggccgcgcccaggacaggacgggcaaacaggatggtctcagcccaaaagagatttcctgcagagcccctccgaggccagccaagaccacagatcctgtgtctaagagcgtgcctgttcctctccaagaggctccccagcagagacctgtggtcccaccccgcagaccacctcccccaaagaaaacctcttcgtcatccaggccgctcccagaggtcagaggtccacagtgtgaaggccacgaaagcagggcagctcccaccccaggccgtgctctcctcgtccctccaaaagccaaaccttttctctccaactctttggggggccaggatgacacgcgaggcaaaggcagcctggggccatgggggaccggcaagattggagaaaacagggagaaagcagctgcagcctctgtccccaatgccgacggcctgaaggactctttgtatgtggccgtggccgactttgaaggagacaaagacaccagcagcttccaggaagggacagtgtttgaagtccgggagaagaacagcagtggctggtggttctgccaggtcctgagcggagccccttcctgggaagggtggattccttccaactatctcagaaagaagccgtagccgactccctttctgcctagagggcccgctggtccttgctggctttacccacgtatttaatacgcctcttaatttatcattctccacgcagcttccaaggcagacagactctggggtactgtgacttcttgcctcccatgggtggagagtgagtttcggacacctcgggcgcccctgggcctgatccctcctatcacagcatcactggaggctcagaacccacagcctttgctttctgtccatgtcagcatccctgccttaagagaactcctcctggccaatggcattgccacccagcagtgggaccaagactctccaagacctccaggactggatcccattgcctggagaaactccagcaagggtctctcatggcttggacatggcacagtaaggggcagccaacccagtccatgatgacttttgctccaacttcttcatgtttctaaaagcccagtggctttattcactcctcctaaattgcctgctaccagaaggaacttcatcctgaagaaatgcattccattaccagttccagggaaagtgtccccttccccaaagcctcaggcccgtgggcctctgaggttccactggatgcggctcccccaggagtgggcctggagatccgctcagccgccctgcctcccaccttctatcttgggaccgtggtcagccctgaagggtggttccagccccgcgtatgctgcgctttgctgctgcaggctccggtccctccagggcttttcaatgagagttcccaccccaacttggagcatttcatttttgcctacctaaagcaagaatctcaaagtttgtttgaataagaggcccattcacaagtcgtgcccttgtgagcacccctttgctgagtgcctcgtgggtgccaaacactgtacttggcgctttgcattcatgctttgaccctcacaacctccctttatagatgaggaaattcacgctccatgtgcccaaggacacaccagccaggaggaagagggaagaggatttgagtccaggcctgcctgacttcagtgcctgtgccctcccctctgtaaaagacaaaccaggcagggaagagatagaagctggctaagtggtggccaagtggcttcattgtgaggggggtgagggggcattcgtggctgctcccacacccaccatccctccagcccacagcagcctataccaaaggctgccctggactcaacagctgcatctccatgacaggagaatgccagggtcctggtggttgacacagagccctgttccctcttctaagctgttgccccctggggaatagagcttatggagcaacgggagctgaggtggcctcgagggccagcctggagggctctgagcatagcatgcagcggtcccatagggaggcaggtaaccaagggccaggcagagctgcttcctgtgcctctccggcatttgtaatgtttttttcttttttcacgcactgccaaatctgttttctcccttgaagaaacccagggcagatgtggtcatctgtcaaactgaggtctggagaggcatgactaaatcactgcagaagcaaaatcaggacccagcatttctagctcccagcccagagtaagagagcagagcagaaccccttcccattctacccgaccgaggcagccctgccctgccctgccccgcccctccccaccctgccctgccccagagatctccagttcacagtgttcatcaggcgagatacttttggacccacaaagccagttttttggggggatgctcagtgtctacctgcagtgccaaagttttgcttgaacagccctcttctgccgcgcctcccagctccaccccctatcacgtgggtgctggctgcttctgcgtgaggagcttcctctgatcacctgtagcatctttagtgccttcgtccagtcggcctgcaaatcccatttcccagagaggcttgggcagggcccacttgccacttggccctgtgcccagagcgttgggggcagatggcagccaggggaagaagggaggtggggaagggccgccaccgcttgagggtcccctcccttgagaggaggccccatggcagttttcctgagttcttgatccactttggtttaaacaacttttgtgaagctatgtgagatttgactgcatttcaaaagacaaaacacatgtttttttctgatttgctctttgcctttcagcgacgctttcagatactttgtgagtgtctactctgtgctaggtgctgagtagactgggatgtgtgtggctccatccctggctggaagagctttgagtcctgtctgctgacttcactgaaggagtttctctcttgcttcattccttcctcccgggggtcagctgggtaggagcagacttgccctgccttcctctaggcagaaagttttcctgcaaatgaaagaatctgccattctcttttgctatgatgatgatgattattctgacatgacccgcgggtactgaagccacagtcctctctgttcactgttctctccttgagtcatatctatggcctgaggacgtctgtatccagctccttttcctacaatggtagacacttccccaggcagtgggtgggtcagggtggccagtcactctcctagctgtccttgcctggggacttagatttaccccatccaggactgtggtcgctattctgtgagcgattgatggcgcatatgcagaactcccctggagtcatggctctagaaagtgtccaggcccatcgtgacaatggtgccaagcaccgggctggtgaccagtgcctaaacacacacgctcctttaatccttacggcaagcctgtgaggcggataggaccagccctgatctatagtgagaaaattaaggttcagagggagaaggtccaaatagtggccaagctgggactgagatctcgagtttgggtttgtttggttttgttgttgttgttctttccctcgtgtccatgacttttctctgccattagcagggaagtgtgcggagggcttccagggaatcaagtgaccctccctctgaatttcggtgcctcttccccccgccccttgctcacacatttcagtaggtcacaggccaaatggcagcccaaaaggtgggcagagatttttttttcttcccctcacccctgcttattaacacaattgtgacaactactttaccttacatcccagggcaaacggacagcttgcggtacctccaaaaatttggaaaaccctgagtctaagaccacctcttgataaaagaggcctttgctcacatgttctgctcggaatctttctttgccattggtgggtgtatgtcgtcccagctgagactgcgggagagctgagctccagcttaaaccgcttttaatggcccttccctactgggggatcgctggagcccatgccaggttacggtagtcattttaaacctctgccacaaggccacgccatagaatcaatttccaagtcaatgttcttggccctaaaatgtttgcgcccactgaggatttcattaccaggtggaagatgggggaacatatgccacgttaaagagcaagtgctgagtgtgccaggacttgagaaggaccttaggctgaggagtggacagtctggtatttatttcgcctctcccaagtacccagcacagagtgggaaaaagaagaaactgctcctgccttccagtagctggcaacttgacatcaagaacaaaaacattcgtagctggacccccgtcctttcatcgtgcccaagtcttacatgttggcttaagctgcccccttggaggccgtacctttctctttggactgtgacagtggacacctaacagcctgagccatgtgtggctgtcttatcccccaagggttgtccaggcccgttctgcagggctgttgtgtagactgcagacatccatacctcaccacagaccaaagatgacctcgtgtcagactgtgggctgatgagaggtagagcagcatgcatcgaggcctgagggtgcagggcgccctctcttggcctggaggaattgctcctaactagagtaagtttccacgagggtcccaggcagagctgcagagctggaaccggaggctccacagtccttgcctgctcatggacctccttcagagcacctttctacagactggactgcccagctccgtggggtggcatctggtttctggtgctattctgccaagttatcgagctcctcctcatgtttcaacattccatcttcccgtttctatcctcgactccaaagtaagccttcttagctccaatcagggatgaggggctcaacctcttctgtcctcaaagaggccaaacgcagtgccacagtcggtagccttcacttttagatgtcctattcatgtaaaaaagaaggtgcccccaccaggcttacatcagcaataagcaattctaatgcaacgatggtgtccacattttaccccagtgtgtgcccatgtatgcctttgtgcccgtgtaattattgttagcgcccctttcacttagaggggtgatgataaactgtggccaccttgattacaacccacatttcctgctttggggagcttccaagtaacaggccatttcttacctccctccaggaacagtgggcactgcccaccacctcgtgtctgctcataggatgacgctggagatccccacacttactctaccctcttggcaaattggcattccggtggtggtttttgtttcctttaacacattaaataaatgagtatataggatgtgaggggaggggtgagaacaactagctgtagcatgtgtaggctatatactttaccatttgacttctttcctttttttttttttaaataaaaaaagtgcttgactggtttcaagcttcatcatgaa

SEQ ID NO: 691 - protein, 911 aa, Homo sapiens
MPPRRSIVEVKVLDVQKRRVPNKHYVYIIRVTWSSGSTEAIYRRYSKFFDLQMQMLDKFPMEGGQKDPKQRIIPFLPGKILFRRSHIRDVAVKRLIPIDEYCKALIQLPPYISQCDEVLQFFETRPEDLNPPKEEHIGKKKSGGDQTSVDPMVLEQYVVVANYQKQESSEISLSVGQVVDIIEKNESGWWFVSTAEEQGWVPATCLEGQDGVQDEFSLQPEEEEKYTVIYPYTARDQDEMNLERGAVVEVIQKNLEGWWKIRYQGKEGWAPASYLKKNSGEPLPPKPGPGSPSHPGALDLDGVSRQQNAVGREKELLSSQRDGRFEGRPVPDGDAKQRSPKMRQRPPPRRDMTIPRGLNLPKPPIPPQVEEEYYTIAEFQTTIPDGISFQAGLKVEVIEKNLSGWWYIQIEDKEGWAPATFIDKYKKTSNASRPNFLAPLPHEVTQLRLGEAAALENNTGSEATGPSRPLPDAPHGVMDSGLPWSKDWKGSKDVLRKASSDMSASAGYEEISDPDMEEKPSLPPRKESIIKSEGELLERERERQRTEQLRGPTPKPPGVILPMMPAKHIPPARDSRRPEPKPDKSRLFQLKNDMGLECGHKVLAKEVKKPNLRPISKSKTDLPEEKPDATPQNPFLKSRPQVRPKPAPSPKTEPPQGEDQVDICNLRSKLRPAKSQDKSLLDGEGPQAVGGQDVAFSRSFLPGEGPGRAQDRTGKQDGLSPKEISCRAPPRPAKTTDPVSKSVPVPLQEAPQQRPVVPPRRPPPPKKTSSSSRPLPEVRGPQCEGHESRAAPTPGRALLVPPKAKPFLSNSLGGQDDTRGKGSLGPWGTGKIGENREKAAAASVPNADGLKDSLYVAVADFEGDKDTSSFQEGTVFEVREKNSSGWWFCQVLSGAPSWEGWIPSNYLRKKP

SEQ ID NO: 692 - DNA, 1728 bp, Homo sapiens
atggacaaccccctgccctccaggatctactactggtatctccctaccctgtccttaccaccactctgcttcccattcaagtacccgagcccaccggcgcgcctcctggccacccggccgtgctgcggccccggccccgagcgacgcccggtcctgggcgaggcgccgcgcttccacgcgcaggccaaaggcaagaacgtgcggctggacggccactcgcgccgggccacacggcgcaacagcttctgcaatggcgtcacgttcacgcagcggcccatccggctgtacgagcaggtgcggctgcgcctggtggccgtgcgccctggctggagcggcgcgctgcgcttcggcttcaccgcgcacgatccgtcgctcatgagcgcccaggacatccccaagtacgcctgcccggacctggtcacgcggccgggctactgggccaaggcactgcccgagaacctggcgctgcgcgacacggtgctggcctactgggccgaccgccacggccgcgtgttctacagcgtgaacgacggcgagccggtgctcttccactgcggcgtggccgtgggcggcccgctctgggcgctcattgatgtctacggcatcaccgacgaggtgcagcttctggagagcgccttcgctgacacgctgacgcccgcgcgcctcagccaggcccgcttcagcgcctgcctgccgcccagcagccacgacgcggccaacttcgacaacaacgagctcgagaacaaccaggtggtggccaagctgggccacctggcgctgggccgcgccccgggcccaccgccagccgacgccgcggccgccgccattccgtgcgggccccgtgagcgcccgcggcccgcgtcgtcgccggcgctactggaggccgacctgcgcttccacgcaacacgcgggcccgacgtgagcctgtcggccgaccgcaaagtggcctgcgcaccgcggcccgacggcggccgcacgctggtcttctccgagcgcccgctgcggcccggcgagagcctcttcgtggaggtgggccgtccggggctggcggcgcccggcgcgctggccttcggcatcacgtcgtgcgacccgggcgtgctacggcccaacgagctgcccgccgacccagacgcgctgctcgaccgcaaagagtactgggtggtggcgcgcgccgggcccgtgccgagcggcggcgacgcgctcagcttcacgctgcggcccggcggcgacgtgctcctgggcatcaacgggcgtccgcgcggccgcctgctgtgcgtcgacaccacgcaggcgctctgggccttcttcgccgtgcgcggcggcgtcgcgggccagctgcgtctcctcggtaccctgcagtccagccctgcgaccacgactccatcagggtccctcagcggctcccaggacgatagtgattcagatatgaccttcagtgtcaaccagtcctcctcggcatctgagtcatccctgggtaaggaaggcccccagctccccgctgagccccccggtgtcccccgtgttctccccaccggagccggcaggcatcaagaatggcgagtgcacggtgtgcttcgatggcgaggtggacacggtcatctacacgtgtggacacatgtgcctgtgccacagctgcggcctgcggctcaagcgacaggcccgggcctgctgccccatctgccggcggcccatcaaggacgtcattaagatctacaggccatagcctag

SEQ ID NO: 693 - DNA, 839 bp, Homo sapiens
cctctccttccgccggggccgccgggcctcatggaagccccggagggcggcggaggggggcctgcagcgcggggccccgaggggcaaccggcgcccgaagccagggtgcacttccgagtggcgaggttcatcatggaggcaggtgtcaagctagggatgaggtccattcccattgccactgcttgcaccatttaccataagttcttttgcaataccaacctggacgcttatgacccttacctgattgccgtgtcttccatttacttggccggcaaagcggaaaagcagcacctgcggactcatgacatcatcaatgtgtccaacaggtactttaacccgagcggtgagcccctggaattggaatcccgcttctgggagctccgggacagcattgtgcagtgtgagcttctcatgctgagagttctgcgcttccaggtctccttccagcttccacacaagtacctgctccactacctggtttccctcaaaaactctgaaccgccacagctggcagcggaccccggttgccgtcactgcctgggccctgttgcgggacagctaccacgggggtctgtgcctccgtttccaggcccagcacatcgcggtggcggtgctctacctggccctgcaggtctacggagttgaggtgcccgccgaggttaaggctgagaagccgtggtggcagatttataccatggacacagagatcccctaaggtcctggcccaggcctgtccaaagagaagcccaggatggtcggctgcctggggacattgccaccacgtcgccatgacggctggtcctcagaggaccagctgggaggactggttgtgctgctgg

SEQ ID NO: 694 - DNA, 2015 bp, Homo sapiens
tcgctgcgaaggacatttgggctgtgtgtgcgacgcgggtcggaggggcagtcgggggaaccgcgaagaagccgaggagcccggagccccgcgtgacgctcctctctcagtccaaaagcggcttttggttcggcgcagagagacccgggggtctagcttttcctcgaaaagcgccgccctgcccttggccccgagaacagacaaagagcaccgcagggccgatcacgctgggggcgctgaggccggccatggtcatggaagtgggcaccctggacgctggaggcctgcgggcgctgctgggggagcgagcggcgcaatgcctgctgctggactgccgctccttcttcgctttcaacgccggccacatcgccggctctgtcaacgtgcgcttcagcaccatcgtgcggcgccgggccaagggcgccatgggcctggagcacatcgtgcccaacgccgagctccgcggccgcctgctggccggcgcctaccacgccgtggtgttgctggacgagcgcagcgccgccctggacggcgccaagcgcgacggcaccctggccctggcggccggcgcgctctgccgcgaggcgcgcgccgcgcaagtcttcttcctcaaaggaggatacgaagcgttttcggcttcctgcccggagctgtgcagcaaacagtcgacccccatggggctcagccttcccctgagtactagcgtccctgacagcgcggaatctgggtgcagttcctgcagtaccccactctacgatcagggtggcccggtggaaatcctgccctttctgtacctgggcagtgcgtatcacgcttcccgcaaggacatgctggatgccttgggcataactgccttgatcaacgtctcagccaattgtcccaaccattttgagggtcactaccagtacaagagcatccctgtggaggacaaccacaaggcagacatcagctcctggttcaacgaggccattgacttcatagactccatcaagaatgctggaggaagggtgtttgtccactgccaggcaggcatttcccggtcagccaccatctgccttgcttaccttatgaggactaatcgagtcaagctggacgaggcctttgagtttgtgaagcagaggcgaagcatcatctctcccaacttcagcttcatgggccagctgctgcagtttgagtcccaggtgctggctccgcactgttcggcagaggctgggagccccgccatggctgtgctcgaccgaggcacctccaccaccaccgtgttcaacttccccgtctccatccctgtccactccacgaacagtgcgctgagctaccttcagagccccattacgacctctcccagctgctgaaaggccacgggaggtgaggctcttcacatcccattgggactccatgctccttgagaggagaaatgcaataactctgggaggggctcgagagggctggtccttatttatttaacttcacccgagttcctctgggtttctaagcagttatggtgatgacttagcgtcaagacatttgctgaactcagcacattcgggaccaatatatagtgggtacatcaagtccatctgacaaaatggggcagaagagaaaggactcagtgtgtgatccggtttctttttgctcgcccctgttttttgtagaatctcttcatgcttgacatacctaccagtattattcccgacgacacatatacatatgagaatataccttatttatttttgtgtaggtgtctgccttcacaaatgtcattgtctactcctagaagaaccaaatacctcaatttttgtttttgagtactgtactatcctgtaaatatatcttaagcaggtttgttttcagcactgatggaaaataccagtgttgggtttttttttagttgccaacagttgtatgtttgctgattatttatgacctgaaataatatatttcttcttctaagaagacattttgttacataaggatgacttttttatacaatggaataaattatggcatttctattg

SEQ ID NO: 695 - protein, 367 aa, Homo sapiens
MVMEVGTLDAGGLRALLGERAAQCLLLDCRSFFAFNAGHIAGSVNVRFSTIVRRRAKGAMGLEHIVPNAELRGRLLAGAYHAVVLLDERSAALDGAKRDGTLALAAGALCREARAAQVFFLKGGYEAFSASCPELCSKQSTPMGLSLPLSTSVPDSAESGCSSCSTPLYDQGGPVEILPFLYLGSAYHASRKDMLDALGITALINVSANCPNHFEGHYQYKSIPVEDNHKADISSWFNEAIDFIDSIKNAGGRVFVHCQAGISRSATICLAYLMRTNRVKLDEAFEFVKQRRSIISPNFSFMGQLLQFESQVLAPHCSAEAGSPAMAVLDRGTSTTTVFNFPVSIPVHSTNSALSYLQSPITTSPSC

SEQ ID NO: 696 - DNA, 6930 bp, Homo sapiens
aatgttcttaaattattcctgatttttttttaaccaagctgccaagaaaagaacgtattcccctcttagtcctattctaatttttatgtgagtgaatctaaactgctgaggaaaaccatatgtgattgttaaattatatatatctatatttttactccgcgcaaggcttattcttctacatccatagatgcttgagaagctctgtttttgtcattcatgtacattttcctttggaaaaagaaagcgcctattttactaaccaaagacttgatttttaccctcttcatttttattccctcctaaaaataagcccaattggatccaagtcaatgttttaagagatttttttaagagttgttttttctttcagagaccagaattccaaatcagaacaatttaaggtgataagctgcgatctttgagctagctataaataagacatttcaagcaagcaagcaaacaacttaaatttggggtagaggaaaaaaaaggcgtgagacatcaggttgtcattttttattgtgagattctgctcctaaaaataataaatgggggattacgggtttggagtgctagtgcaaagcaatactgggaataaatctgcttttccagtcagattccatccacatctgcagcctccacaccatcaccaaaatgccacccccagccctgctgcttttataaataataacacagctgccaatggcagcagtgctgggtcagcttggctttttcctgctccagctacccataacattcaggatgagatcttggggtcagaaaaagcaaaaagtcagcaacaggaacagcaagaccccttagaaaagcagcagctttccccaagtccaggtcaggaagctggaatactgcctgaaacagagaaggcaaaatcagaagaaaatcaaggggacaattcttcggaaaatggcaatgggaaggagaaaataaggatcgaatctccagtgttgacagggtttgattatcaagaagccactgggctaggtacttcaacccaacccttgacatctagcgcatcgtctcttactggtttcagtaactggtcagcagcgatagcgccttcctcctctacaataatcaatgaagatgcaagtttctttcaccagggaggggtccctgctgcttcggctaataacggtgctctgttgtttcaaaatttcccccatcatgtcagccctggctttggaggcagcttctctcctcagatcgggcttctctcacagcaccacccacatcaccctcatttccagcatcatcacagccagcatcagcagcaaaggaggtctcctgccagtccccatcccccacccttcacacatagaaatgctgcttttaaccagctgcctcatttggcgaataatcttaacaaacccccctctccgtggagcagctaccagagtccgtcaccaacaccctcctcttcctggagcccgggcggtggtggatatggtggctggggaggttcccaaggccgagatcaccgcagagggctgaatggtggaataacgcccctgaactccatctcgcctttgaagaaaaattttgcaagcaatcatattcagctccagaagtatgctcgccccagctctgcctttgcacctaaatcctggatggaagatagcttgaacagggctgacaacatttttccttttccggatcgccccaggacattcgacatgcactcactggagagttcactcattgacataatgagagctgaaaatgataccattaaaggtcgtctaaactattcatatccaggatccgatagctctctgcttattaatgcaaggacatatgggcgaaggagaggtcagtcttcactgtttccaatggaagatggattcttggatgatggccgtggggatcagcctcttcatagtggcctgggttcacctcactgcttcagtcaccagaatggggaaagagtggaacgatattctcgaaaggtgtttgtaggcggattgcctccagacattgatgaagatgagatcacagctagttttcgtcgctttggccctctgattgtggattggcctcataaagctgagagcaaatcctattttcctcctaaaggctatgcattcctgctgtttcaagatgaaagctctgtgcaggctctcattgatgcatgcattgaagaagatggaaaactctacctttgtgtatcaagtcccactatcaaggataagccagtccagattcggccttggaatctcagtgacagcgactttgtgatggatggttcacagccacttgacccacgaaaaactatatttgttggtggtgttcctcgaccattacgagctgtggagcttgcgatgataatggatcggctatatggaggtgtgtgctacgctgggattgataccgaccctgagctaaaatacccaaaaggagctgggagagttgcgttctctaatcaacagagttacatagctgctatcagtgcccgctttgttcagctgcagcatggagagatagataaacgggtggaagttaagccatatgtcttggatgatcagctgtgtgatgaatgtcagggggcccgttgtggggggaaatttgctccatttttctgtgctaatgttacctgtctgcagtattactgtgaatattgctgggctgctatccattctcgtgctggcagggaattccacaagcccctggtgaaggaaggcggtgaccgccctcggcatatttcattccgctggaactaaaggataactgcagtgctcattttcaggcctcagaataagtgcactcttctgttcattctgaccccttcctcaacctcttcacgctggcatgtccttttgtagcagtctgtaacttaactatagtataatgaaaagaatgacctataatataggtgttttgtagattcttgtgtcactgcaaacaatatgaactcctttttcgtattgccatcgggttgcatggaagttttattctcttgttttgctggaaaccaagaggatccaaacttcctgcaacattttcttagaggagagagagaaatattaaaagagaaatgaaacaatagagtattttgggtttttaattaaattattgttaataatataacatataagaatacttttattaaaataaccatgcaacaataacactatcggtctatctgacagtttttcccccagggaagtgcttttgccttttcctttctatttttttttttttttcatcttttttgtctctctcttttttccatccctttttaatttttttaacagcaatggaggaagttaacaatttttaatggaaagagcatgttagagcaaacaaatgcataagcaagactgagcagcattataattaattttcagggttttgaggctgaacataatttcattatccctcaaaaagttaccaccacatcagaaaaaataaaaaaaaaatagtaaagtaggcagagctaggtttattttctcttaaacaatttttaaaattcagaatgtaaaaattgggtaaatttactactgaggggagtgcacttatttatttaacttacttatctggtcaaagccccaggaaacctaccaaagctagaattaatgacaactggtgggaaacctagcatttcctctcctgaagaataaatgtataaatgttatttttgatgtttatatataaactctatatcctaatttactaatactcatcagatgtcagcctttgctctccattttgacgttaaaaaacaacaacagatctagagatacctcaaggatatcatttttgattttgtgttacagtacacttgtagccaaaactggaagacaaaaccaatatataatttggctgctgattggcttacttttagatttaaagttactttgggtatcctgtaatttagttgtaacatagaaaatgaaaaaacagttaaaaaaagtgaagtagttgcaaagtgttttgcactgttgaactaagtaactgtgtaaatctgtgcaaaggtacgtatgtttatcttactcttcctataaactaaaataacattacagtttccgaatttagcatgggacatagtcagtgtttgaagtgccaacttcatcaagtaatgcatgctttattataaataaaattctagctttgaaaggcgttatgtgttgaacagtatgcttcaggggtaaatttaaaatagtctcttgaagccctagtcatggaagtaacttttattttaattgacattctcttattaaatgccctatccatcattaaaaggtttattatcagtgggcaaaacatgaaataatatgatcgaatggcaatcttgctagttgcgctacctaacagtaccatcttggatccttcaaaaccaaagacttgccccagcactgctgtggaaccacctggcttatgacccctatggatgatctttaggaaaagcagccctttacttttaatacaggctttaatgaactatacctgttaagttccaaaggtcaaaatggaggcatttgctgtctaatattcaaacatagaaagggagctgcttttaaagaattccctgcaaatactgaaagcagtcatgcgaatggagggtgctcttgtgtagctggtcagggacttttttttcttttctcctgaactacatgattctaattggaatgttcatttgcctctttttactcttttaaatgcttgtaggtggcttggggtgtgctatcgtgctgttcctactcagtaaacaggtgtgatgagttaacaagaaataacactgtttgagaactagctttgaataataatttttccctttgtacatgacctgctgaatttcggtacagtgtttttgtagctaacttattttgtcatgcacataatgtatatttgttatgcactacttttgtatatcttgtttttccaacagtgaacatttttaggcacacttttcactgacgggatatctctttatgcaatacctcaatttttcatattgcaaagagtagctttttgtacttttattactgagagatcttcatatacttcattttttaatataaataattttaataaattttattttcttatattctgctttttatacatttcagtgctctgcatacattttaaattatgaatgtcgtgcactggcaatgctattttagagtctgcagagaagagaaagcatgttgcttaaacatccttccccagcaccagctattggtgtacctataatttaagaaatagtctatgtaaagtcacaaattaatgaaaaaaattcgcatgaaaatgacagataacactgtagttcctaaaaaaaaaattaaatgcataagcataaggtagaaattaaaataacaaaattgtccacagcttcttactaagtttttaaaattattcataaaatgcagacatttttggtgaatgtttagccatttttaatattaataaattgatgttaagtgtttgattcagagatgtctgctcttttaaattatatataaggaaaaaaaatagcctgccttgggacaggtgtgtaatgttagtgtgcatgactaatgtaagaaattgttattctactaatatttacttgtgattgtgtgacaagtgtgtttacagattattggttacacttcaatttacagggcataaacaatgattatctattactctgaactttatgattacatgttcttcagattacatgggattgtagttgggagttaccatgtaactcaaacataattaacatgtaattagtttacagattgtagggcatcacttcaattcaccaagcatgtagttctagcgcactagcatggcgccagccatgtacttacaatgtagttacagagtaattacatggtgatttttgcaatgtaaaataaagtgtttctgattattttctatgtaaaggaaccctctcctttccccttctggtccctgcgctttggtataatatatatacttctccatacacagacctctgcagaatgcaaaataaaacttgcagtgaatgaatttagcattttatgagagtgctgttggaaagacttgataattcaccccttttgttttgaagagttgaatcttctgttaaaaggtgatttaaaacttgaatgtgatgaattgtggcaagttaacttcaagttatgtgcaatacttatttcaaacttttgaaagatctttgcagtgtaattctttgtttttaattgcagacatttaaaaatgtcattttctactgttaagagtaatcctctttcttgctggtgtttctaaagaaaagaatcagaaatcaatctttctactaatgtaaatttgagattatttttaaaaatggaataaaagaggttttggtcatttgctttattttattattttaaagctactgtgattgatagcattgtaagaatcgggacaatattgtattcaactgttttattttttatatttttaaaatttaaagtataattagtttttataattttcatcagatttttgttatattttttggaagtgaaacttttagcaagtgggtgtctagtttttactaatccctaattttttttccagtgtattgctcatattatcagaaggaaaagttatttaagtatgtcagttaattgtactacttggctgaatttccatatagtttttactgtgtatggggaggttgtagtatttattatagcattttaaataagggtaattcattttttattaaagtcattttcacgttaagttcctatttttgtatgttctactcttaagttatataacacagttccttttttaaaagagttcatttgttgaagtgctagtgaaaaattaatgttattaaatagtttgcaaatgactatttataccagtatgcatataatttttaaatatttgtaatgtgagatgttgaatgaataaaacttttaactcaaaaaaaaaaaaaaaaaaaaa

SEQ ID NO: 697 - protein, 729 aa, Homo sapiens
MGDYGFGVLVQSNTGNKSAFPVRFHPHLQPPHHHQNATPSPAAFINNNTAANGSSAGSAWLFPAPATHNIQDEILGSEKAKSQQQEQQDPLEKQQLSPSPGQEAGILPETEKAKSEENQGDNSSENGNGKEKIRIESPVLTGFDYQEATGLGTSTQPLTSSASSLTGFSNWSAAIAPSSSTIINEDASFFHQGGVPAASANNGALLFQNFPHHVSPGFGGSFSPQIGLLSQHHPHHPHFQHHHSQHQQQRRSPASPHPPPFTHRNAAFNQLPHLANNLNKPPSPWSSYQSPSPTPSSSWSPGGGGYGGWGGSQGRDHRRGLNGGITPLNSISPLKKNFASNHIQLQKYARPSSAFAPKSWMEDSLNRADNIFPFPDRPRTFDMHSLESSLIDIMRAENDTIKGRLNYSYPGSDSSLLINARTYGRRRGQSSLFPMEDGFLDDGRGDQPLHSGLGSPHCFSHQNGERVERYSRKVFVGGLPPDIDEDEITASFRRFGPLIVDWPHKAESKSYFPPKGYAFLLFQDESSVQALIDACIEEDGKLYLCVSSPTIKDKPVQIRPWNLSDSDFVMDGSQPLDPRKTIFVGGVPRPLRAVELAMIMDRLYGGVCYAGIDTDPELKYPKGAGRVAFSNQQSYIAAISARFVQLQHGEIDKRVEVKPYVLDDQLCDECQGARCGGKFAPFFCANVTCLQYYCEYCWAAIHSRAGREFHKPLVKEGGDRPRHISFRWN

SEQ ID NO: 698 - DNA, 3749 bp, Homo sapiens
gcattgctgcgctcccgtgcccaagggagccacgcgccgcgtgcgcccggcagccggccgcccggaggcagcgcagtccgctggcatgggccccgggggcgccccgagctggggctccgggctgaggcgctaaagccgccctcccgcccgcggggccccgcgcccggcccgcccgcctgcccgcccgcggccatggccgtccggcccggcctgtggccagcgctcctgggcatagtcctcgccgcttggctccgcggctcgggtgcccagcagagtgccaccgtggccaacccagtgcctggtgccaacccggacctgcttccccacttcctggtggagcccgaggatgtgtacatcgtcaagaacaagccagtgctgcttgtgtgcaaggccgtgcccgccacgcagatcttcttcaagtgcaacggggagtgggtgcgccaggtggaccacgtgatcgagcgcagcacagacgggagcagtgggctgcccaccatggaggtccgcattaatgtctcaaggcagcaggtcgagaaggtgttcgggctggaggaatactggtgccagtgcgtggcatggagctcctcgggcaccaccaagagtcagaaggcctacatccgcatagcctatttgcgcaagaacttcgagcaggagccgctggccaaggaggtgtccctggagcagggcatcgtgctgccctgccgtccaccggagggcatccctccagccgaggtggagtggctccggaacgaggacctggtggacccgtccctggaccccaatgtatacatcacgcgggagcacagcctggtggtgcgacaggcccgccttgctgacacggccaactacacctgcgtggccaagaacatcgtggcacgtcgccgcagcgcctccgctgctgtcatcgtctacgtggacggcagctggagcccgtggagcaagtggtcggcctgtgggctggactgcacccactggcggagccgtgagtgctctgacccagcaccccgcaacggaggggaggagtgccagggcactgacctggacacccgcaactgtaccagtgacctctgtgtacacactgcttctggccctgaggacgtggccctctatgtgggcctcatcgccgtggccgtctgcctggtcctgctgctgcttgtcctcatcctcgtttattgccggaagaaggaggggctggactcagatgtggctgactcgtccattctcacctcaggcttccagcccgtcagcatcaagcccagcaaagcagacaacccccatctgctcaccatccagccggacctcagcaccaccaccaccacctaccagggcagtctctgtccccggcaggatgggcccagccccaagttccagctcaccaatgggcacctgctcagccccctgggtggcggccgccacacactgcaccacagctctcccacctctgaggccgaggagttcgtctcccgcctctccacccagaactacttccgctccctgccccgaggcaccagcaacatgacctatgggaccttcaacttcctcgggggccggctgatgatccctaatacaggaatcagcctcctcatccccccagatgccataccccgagggaagatctatgagatctacctcacgctgcacaagccggaagacgtgaggttgcccctagctggctgtcagaccctgctgagtcccatcgttagctgtggaccccctggcgtcctgctcacccggccagtcatcctggctatggaccactgtggggagcccagccctgacagctggagcctgcgcctcaaaaagcagtcgtgcgagggcagctgggaggatgtgctgcacctgggcgaggaggcgccctcccacctctactactgccagctggaggccagtgcctgctacgtcttcaccgagcagctgggccgctttgccctggtgggagaggccctcagcgtggctgccgccaagcgcctcaagctgcttctgtttgcgccggtggcctgcacctccctcgagtacaacatccgggtctactgcctgcatgacacccacgatgcactcaaggaggtggtgcagctggagaagcagctggggggacagctgatccaggagccacgggtcctgcacttcaaggacagttaccacaacctgcgcctatccatccacgatgtgcccagctccctgtggaagagtaagctccttgtcagctaccaggagatccccttttatcacatctggaatggcacgcagcggtacttgcactgcaccttcaccctggagcgtgtcagccccagcactagtgacctggcctgcaagctgtgggtgtggcaggtggagggcgacgggcagagcttcagcatcaacttcaacatcaccaaggacacaaggtttgctgagctgctggctctggagagtgaagcgggggtcccagccctggtgggccccagtgccttcaagatccccttcctcattcggcagaagataatttccagcctggacccaccctgtaggcggggtgccgactggcggactctggcccagaaactccacctggacagccatctcagcttctttgcctccaagcccagccccacagccatgatcctcaacctgtgggaggcgcggcacttccccaacggcaacctcagccagctggctgcagcagtggctggactgggccagccagacgctggcctcttcacagtgtcggaggctgagtgctgaggccggccaggcccgacacctacactctcaccagctttggcacccaccaaggacaggcagaagccggacaggggcccttccccacaccggggagagctgctcggacaggccccctcccggccgaagctgtcccttaatgctggtccttcagaccctgcccgaactcccacctctccatggcctgcctagccaggctggcactgccactcacactcggccccagggcccaggagggacagtgcctggagcctgggccaggcccagcccatctgtgtgtgtgtatgtgcgtgtgatgctacctctcctcccgtccctctccaggggccccgcatacacacggccatgcacgcacacactgggcctgggccagggccccagagctcctgcctgagctggaccttatgcaaacatttctgtgcctgctgggtaggggcacgtctgaggggccctgctccaagcctgcaggaccgagggccacagccggacagggggtagcccctggattcaggcacacgaccaccacacgagcacgtgccacgcatgcctcgtgtgctcatctcacacacacccccctcccgggtcacgcagacaccccccaaccacacacatctcatgctgtacacctgaggctgctcacgtctcacgcccagtgttggtgcacatttgcctctcacatgctgccctctccacccacccagggacaccccacggctcctccctgcccctgcccctcccccagccttgaggtgccctgcccggcggggcctgtgaatatgcaatgggagtcccaggctgtacagtggtgagtgtgtgtgtggcgtggcgtgcccgtccccagggctggctggtgccccacgcggggcctgtcatgtgaagctcgtgtcctgactttgtcttaagtgcattcacgcacttactcttggccttatgtacacagccttgcccggccgccggggcacataggggttttatcgggcgtgaatgtaaataaattatatatatatattgctaaaaaaaaaaaaaaaaaa

SEQ ID NO: 699 - protein, 842 aa, Homo sapiens
MAVRPGLWPALLGIVLAAWLRGSGAQQSATVANPVPGANPDLLPHFLVEPEDVYIVKNKPVLLVCKAVPATQIFFKCNGEWVRQVDHVIERSTDGSSGLPTMEVRINVSRQQVEKVFGLEEYWCQCVAWSSSGTTKSQKAYIRIAYLRKNFEQEPLAKEVSLEQGIVLPCRPPEGIPPAEVEWLRNEDLVDPSLDPNVYITREHSLVVRQARLADTANYTCVAKNIVARRRSASAAVIVYVDGSWSPWSKWSACGLDCTHWRSRECSDPAPRNGGEECQGTDLDTRNCTSDLCVHTASGPEDVALYVGLIAVAVCLVLLLLVLILVYCRKKEGLDSDVADSSILTSGFQPVSIKPSKADNPHLLTIQPDLSTTTTTYQGSLCPRQDGPSPKFQLTNGHLLSPLGGGRHTLHHSSPTSEAEEFVSRLSTQNYFRSLPRGTSNMTYGTFNFLGGRLMIPNTGISLLIPPDAIPRGKIYEIYLTLHKPEDVRLPLAGCQTLLSPIVSCGPPGVLLTRPVILAMDHCGEPSPDSWSLRLKKQSCEGSWEDVLHLGEEAPSHLYYCQLEASACYVFTEQLGRFALVGEALSVAAAKRLKLLLFAPVACTSLEYNIRVYCLHDTHDALKEVVQLEKQLGGQLIQEPRVLHFKDSYHNLRLSIHDVPSSLWKSKLLVSYQEIPFYHIWNGTQRYLHCTFTLERVSPSTSDLACKLWVWQVEGDGQSFSINFNITKDTRFAELLALESEAGVPALVGPSAFKIPFLIRQKIISSLDPPCRRGADWRTLAQKLHLDSHLSFFASKPSPTAMILNLWEARHFPNGNLSQLAAAVAGLGQPDAGLFTVSEAEC

SEQ ID NO: 700 - DNA, 3062 bp, Homo sapiens
gacaagagctcagacctgaggagagtgactagcttctctgtgtcccaggtggccaccttccactgtggaagctcatggactccattgggtcttcagggttgcggcagggggaagaaaccctgagttgctctgaggagggcttgcccgggccctcagacagctcagagctggtgcaggagtgcctgcagcagttcaaggtgacaagggcacagctacagcagatccaagccagcctcttgggttccatggagcaggcgctgaggggacaggccagccctgcccctgcggtccggatgctgcctacatacgtggggtccaccccacatggcactgagcaaggagacttcgtggtgctggagctgggggccacaggggcctcactgcgtgttttgtgggtgactctaactggcattgaggggcatagggtggagcccagaagccaggagtttgtgatcccccaagaggtgatgctgggtgctggccagcagctctttgactttgctgcccactgcctgtctgagttcctggatgcgcagcctgtgaacaaacagggtctgcagcttggcttcagcttctctttcccttgtcaccagacgggcttggacaggagcaccctcatttcctggaccaaaggttttaggtgcagtggtgtggaaggccaggatgtggtccagctgctgagagatgccattcggaggcagggggcctacaacatcgacgtggttgctgtggtgaacgacacagtgggcaccatgatgggctgtgagccgggggtcaggccgtgtgaggttgggctagttgtagacacgggcaccaacgcgtgttacatggaggaggcacggcatgtggcagtgctggacgaagaccggggccgcgtctgcgtcagcgtcgagtggggctccttaagcgatgatggggcgctgggaccagtgctgaccaccttcgaccataccctggaccatgagtccctgaatcctggtgctcagaggtttgagaagatgatcggaggcctgtacctgggtgagctggtgcggctggtgctggctcacttggcccggtgtggggtcctctttggtggctgcacctcccctgccctgctgagccaaggcagcatcctcctggaacacgtggctgagatggaggacccctctactggggcagcccgtgtccatgctatcctgcaggacttgggcctgagccctggggcttcggatgttgagcttgtgcagcacgtctgtgcggccgtgtgcacgcgggctgcccagctctgtgctgccgccctggccgctgttctctcctgcctccagcacagccgggagcaacaaacactccaggttgctgtggccaccggaggccgagtgtgtgagcggcaccccaggttctgcagcgtcctgcaggggacagtgatgctcctggccccggaatgcgatgtctccttaatcccctctgtggatggtggtggccggggagtggcgatggtgactgctgtggctgcccgtctggctgcccaccggcgcctgctggaggagaccctggccccattccggttgaaccatgatcaactggctgcggttcaggcacagatgcggaaggccatggccaaggggctccgaggggaggcctcctcccttcgcatgctgcccactttcgtccgggccacccctgacggcagcgagcgaggggatttcctggccctggacctcgggggcacgaacttccgtgtcctcctggtacgtgtgaccacaggcgtgcagatcaccagcgagatctactccattcccgagactgtggcccagggttctgggcagcagctctttgaccacatcgtggactgcatcgtggacttccagcagaagcagggcctgagcgggcagagcctcccactgggttttaccttctccttcccatgtaggcagcttggcctagaccagggcatcctcctgaactggaccaagggtttcaaggcatcagactgcgagggccaagatgtcgtgagtctgttgcgggaagccatcactcgcagacaggcagtggagctgaatgtggttgccattgtcaatgacacggtggggaccatgatgtcctgtggctatgaggacccccgttgcgagataggcctcattgtcggaaccggcaccaatgcctgctacatggaggagctccggaatgtggcgggcgtgcctggggactcaggccgcatgtgcatcaacatggagtggggcgcctttggggacgatggctctctggccatgctcagcacccgctttgatgcaagtgtggaccaggcgtccatcaaccccggcaagcagaggtttgaaaagatgatcagcggcatgtacctgggggagatcgtccgccacatccttttacatttaaccagccttggcgttctcttccggggccagcagatccagcgccttcagaccagggacatcttcaagaccaagttcctctctgagatcgaaagtgacagcctggccctgcggcaggtccgagccatcctagaggatctggggctacccctgacctcagatgacgccctgatggtgctagaggtgtgccaggctgtgtcccagagggctgcccagctctgtggggcgggtgtagctgccgtggtggagaagatccgggggaaccggggcctggaagagctggcagtgtctgtgggggtggatggaacgctctacaagctgcacccgcgcttctccagcctggtggcggccacagtgcgggagctggcccctcgctgtgtggtcacgttcctgcagtcagaggatgggtccggcaaaggtgcggccctggtcaccgctgttgcctgccgccttgcgcagttgactcgtgtctgaggaaacctccaggctgaggaggtctccgccgcagccttgctggagccgggtcggggtctgcctgtttcccagccaggcccagccacccaggactcctgggacatcccatgtgtgacccctctgcggccatttggccttgctccctggctttccctgagagaagtagcactcaggttagcaatatatatatataatttatttacaaaaaaaaaaaaa

SEQ ID NO: 701 - protein, 923 aa, Homo sapiens
MDSIGSSGLRQGEETLSCSEEGLPGPSDSSELVQECLQQFKVTRAQLQQIQASLLGSMEQALRGQASPAPAVRMLPTYVGSTPHGTEQGDFVVLELGATGASLRVLWVTLTGIEGHRVEPRSQEFVIPQEVMLGAGQQLFDFAAHCLSEFLDAQPVNKQGLQLGFSFSFPCHQTGLDRSTLISWTKGFRCSGVEGQDVVQLLRDAIRRQGAYNIDVVAVVNDTVGTMMGCEPGVRPCEVGLVVDTGTNACYMEEARHVAVLDEDRGRVCVSVEWGSLSDDGALGPVLTTFDHTLDHESLNPGAQRFEKMIGGLYLGELVRLVLAHLARCGVLFGGCTSPALLSQGSILLEHVAEMEDPSTGAARVHAILQDLGLSPGASDVELVQHVCAAVCTRAAQLCAAALAAVLSCLQHSREQQTLQVAVATGGRVCERHPRFCSVLQGTVMLLAPECDVSLIPSVDGGGRGVAMVTAVAARLAAHRRLLEETLAPFRLNHDQLAAVQAQMRKAMAKGLRGEASSLRMLPTFVRATPDGSERGDFLALDLGGTNFRVLLVRVTTGVQITSEIYSIPETVAQGSGQQLFDHIVDCIVDFQQKQGLSGQSLPLGFTFSFPCRQLGLDQGILLNWTKGFKASDCEGQDVVSLLREAITRRQAVELNVVAIVNDTVGTMMSCGYEDPRCEIGLIVGTGTNACYMEELRNVAGVPGDSGRMCINMEWGAFGDDGSLAMLSTRFDASVDQASINPGKQRFEKMISGMYLGEIVRHILLHLTSLGVLFRGQQIQRLQTRDIFKTKFLSEIESDSLALRQVRAILEDLGLPLTSDDALMVLEVCQAVSQRAAQLCGAGVAAVVEKIRGNRGLEELAVSVGVDGTLYKLHPRFSSLVAATVRELAPRCVVTFLQSEDGSGKGAALVTAVACRLAQLTRV

SEQ ID NO: 702 - DNA, 2656 bp, Homo sapiens
gaagtcgggggtgggtccctccggacgccgaagtgggctcgggatgcggggctgggaccctcccgattccggggcggattccggacgccgggaccggccattactggtgccgggttgggcttctccagatgccggggctgggtccttcccaaggttgagacaaaaggatgccacggagaaagaaaaaagttaaagaagtctccgaatctcggaacctggagaagaaggatgtggaaactaccagttctgtcagtgtgaagaggaagcgtagacttgaggatgcattcattgtgatatccgatagtgatggagaggaaccaaaggaggaaaatgggttgcagaaaacgaagacaaaacagtcgaatagagcaaagtgtttggccaaaagaaaaattgcacagatgacagaagaagaacagtttgctctggctctcaaaatgagtgagcaggaagctagggaggtgaacagccaggaggaggaagaagaggagctcttgaggaaagccattgctgaaagcctgaatagttgccggccttctgatgcttccgctaccagatctcgacctctggccactggaccgtcttcccagtcccatcaagagaaaaccacagactctgggctcactgaaggcatatggcagctggtacctccatcactgtttaaaggctcacatatcagtcagggaaacgaggctgaggaaagagaggagccttgggaccacactgaaaaaactgaagaggagccggtctctggcagctcaggaagctgggaccagtcaagccagccagtgtttgagaatgtgaacgttaaatcttttgacagatgtactggccactcggctgagcacacacagtgtgggaagccacaggaaagtactgggaggggttctgcttttctcaaagctgtccagggtagcggggacacatctaggcactgtctacctaccctagcagatgccaaaggtctccaggacactgggggcactgtgaactatttctggggtattccattctgccctgatggagtagaccctaaccagtataccaaggtcattctctgccagttggaggtttatcaaaagagcctgaaaatggctcagaggcagctccttaataaaaaaggttttggggaaccagtgttacctagacctccttctctgatccagaatgaatgtggccaaggagagcaggctagtgagaaaaatgaatgcatctcagaagatatgggagatgaagacaaagaggagaggcaggagtctagggcatctgactggcactcaaaaaccaaggatttccaggaaagctcaattaaaagcttgaaagagaaacttttgttggaggaagaaccaacaaccagtcatggtcagtcttcccaagggattgttgaagaaacttctgaagagggaaactctgtacctgcttcacaaagtgttgctgctttgaccagtaagagaagcttagtccttatgccagagagttctgcagaagaaatcactgtttgtcctgagacacagctaagttcctctgaaacttttgaccttgaaagagaagtctctccaggtagcagagatatcttggatggagtcagaataataatggcagataaggaggttggtaacaaggaagatgctgagaaggaagtagctatttctaccttctcatccagtaaccaggtatcctgcccgctatgtgaccaatgctttccacccacaaagattgaacgacatgccatgtactgcaatggtctgatggaggaagatacagtattgactcggagacaaaaagaggccaagaccaagagtgacagtgggacagctgcccagacttctctagacattgacaagaatgagaagtgttacctctgtaaatccctggtcccatttagagagtatcagtgtcatgtggactcctgtctccagcttgcaaaggctgaccaaggagatggacctgaagggagtggaagagcatgttcaactgtggaggggaagtggcagcagaggctgaagaacccaaaggaaaaaggccacagtgaaggccgactccttagtttcttggaacagtctgagcacaagacttcagatgcagacatcaagtcttcagaaacaggagccttcagggtgccttcaccagggatggaagaggcaggctgcagcagagagatgcagagttctttcacacgtcgtgacttaaatgaatctcccgtcaagtcttttgtttccatttcagaagccacagattgcttagtggactttaaaaagcaagttactgtccagccaggtagtcggacacggaccaaagctggcagaggaagaaggagaaaattctgaatttctagggtccaaaagttgacaaaaccattagtaggaggggtgggccatgttcattaagccatagtggtccctagttcattgttgagcaagttttagccctgcagttttcaccaccagcacctacccagcattctggtttttatgttttttatgatctatgcagacaactgtgtattctgttttataacagtttgtttgaatttacttacagttaaaaaatttaaatatatttatgtttgtacgaaatcttatttcaatagatggaaattttaataaaaaaaaaaaaaaaaaaaaaaaaacaaaaaagaaaaaaaaaaaaaaaaaaa

SEQ ID NO: 703 - protein, 719 aa, Homo sapiens
MPRRKKKVKEVSESRNLEKKDVETTSSVSVKRKRRLEDAFIVISDSDGEEPKEENGLQKTKTKQSNRAKCLAKRKIAQMTEEEQFALALKMSEQEAREVNSQEEEEEELLRKAIAESLNSCRPSDASATRSRPLATGPSSQSHQEKTTDSGLTEGIWQLVPPSLFKGSHISQGNEAEEREEPWDHTEKTEEEPVSGSSGSWDQSSQPVFENVNVKSFDRCTGHSAEHTQCGKPQESTGRGSAFLKAVQGSGDTSRHCLPTLADAKGLQDTGGTVNYFWGIPFCPDGVDPNQYTKVILCQLEVYQKSLKMAQRQLLNKKGFGEPVLPRPPSLIQNECGQGEQASEKNECISEDMGDEDKEERQESRASDWHSKTKDFQESSIKSLKEKLLLEEEPTTSHGQSSQGIVEETSEEGNSVPASQSVAALTSKRSLVLMPESSAEEITVCPETQLSSSETFDLEREVSPGSRDILDGVRIIMADKEVGNKEDAEKEVAISTFSSSNQVSCPLCDQCFPPTKIERHAMYCNGLMEEDTVLTRRQKEAKTKSDSGTAAQTSLDIDKNEKCYLCKSLVPFREYQCHVDSCLQLAKADQGDGPEGSGRACSTVEGKWQQRLKNPKEKGHSEGRLLSFLEQSEHKTSDADIKSSETGAFRVPSPGMEEAGCSREMQSSFTRRDLNESPVKSFVSISEATDCLVDFKKQVTVQPGSRTRTKAGRGRRRKF

SEQ ID NO: 704 - DNA, 758 bp, Homo sapiens
ctctctgatctgactaacctctttcattctttgccctatgttatatggcttagaccaaagcctgagacatttaaccaatttataaatattaaatgcagaaggcatactttatcagttcctggaaacatcaaagaagctggaaggggaatggaaattggatggcactttgtggaggtcactttgctgacagtcaagtattcaaagatctcctaagatacccggtctttaaagtattatacaaaatatcaggcccagtcccaaggcgcaacttgtgccagcagcccgcgccagcagcctgcaccagcaaaatagcagtagcaagaagagagccagcagaagacacctaccctggccggaagacgcgtacccctgaagattgaggaagaggccatccgggtacaacgtagcagttacgtcagactaagacacttcctgtttataggagactataaaacctttgccctgtcctcactaggggctgacaccattttagtcctcagaccgcctgcacccaggcgctcattaaaacagcatgttgcttccaccgcctcatgttgtctgttggcgcgctctcggggttcgaaccagtacaagaaccttagatatatgatactgcacctaataaaaatagtctaaaataacaacagccaatataggcacaaacctgaaagtgtctgcatagaagtaacacatccatgtacttgataaactaaagtgtagatattttatgcggaataaactttgaagtgaggaatacc

SEQ ID NO: 705 - protein, 73 aa, Homo sapiens
MALCGGHFADSQVFKDLLRYPVFKVLYKISGPVPRRNLCQQPAPAACTSKIAVARREPAEDTYPGRKTRTPED

SEQ ID NO: 706 - DNA, 1215 bp, Homo sapiens
cgtcagttggtcacgtggttgttcggagcgggcgagcggagttagcagggctttactgcagagcgcgccgggcactccagcgaccgtggggatcagcgtaggtgagctgtggccttttgcgaggtgctgcagccatagctacgtgcgttcgctacgaggattgagcgtctccacccagtaagtgggcaagaggcggcaggaagtgggtacgcaggggcgcaaggcgcacagcctctagacgactcgctttccctccggccaacctctgaagccgcgtcctactttgacagctgcagggccgcggcctggtcttctgtgcttcaccatctacataatgaatcccagtatgaagcagaaacaagaagaaatcaaagagaatataaagaatagttctgtcccaagaagaactctgaagatgattcagccttctgcatctggatctcttgttggaagagaaaatgagctgtccgcaggcttgtccaaaaggaaacatcggaatgaccacttaacatctacaacttccagccctggggttattgtcccagaatctagtgaaaataaaaatcttggaggagtcacccaggagtcatttgatcttatgattaaagaaaatccatcctctcagtattggaaggaagtggcagaaaaacggagaaaggcgctgtatgaagcacttaaggaaaatgagaaacttcataaagaaattgaacaaaaggacaatgaaattgcccgcctgaaaaaggagaataaagaactggcagaagtagcagaacatgtacagtatatggcagagctaatagagagactgaatggtgaacctctggataattttgaatcactggataatcaggaatttgattctgaagaagaaactgttgaggattctctagtggaagactcagaaattggcacgtgtgctgaaggaactgtatcttcctctacggatgcaaagccatgtatatgaaatgcattaatatttgactgttgagaattttactgccgaagtttacctccactagttctttgtagcagagtacataactacataatgccaactctggaatcaaatttccttgtttgaatcctgggaccctattgcattaaagtacaaatactatgtatttttaatctatgatggtttatgtgaataggattttctcagttgtcagccatgacttatgtttattactaaataaacttcaaactcctgttgaa

SEQ ID NO: 707 - protein, 209 aa, Homo sapiens
MNPSMKQKQEEIKENIKNSSVPRRTLKMIQPSASGSLVGRENELSAGLSKRKHRNDHLTSTTSSPGVIVPESSENKNLGGVTQESFDLMIKENPSSQYWKEVAEKRRKALYEALKENEKLHKEIEQKDNEIARLKKENKELAEVAEHVQYMAELIERLNGEPLDNFESLDNQEFDSEEETVEDSLVEDSEIGTCAEGTVSSSTDAKPCI

SEQ ID NO: 708 - DNA, 2452 bp, Homo sapiens
cgcaagaatgcatacaaactccagggctgctctctcctggagagggagggaggggatttaaaaacctgcagcaacatgggggaggaggctgtttgtccttctctctctggggaagtaactcgctcaaactgccttccttgctgagctgcttcgcgtagctttgaggaaggtctagtgaaattggtctttccattacatctggatgtactaccagagagttctgctgctgttgttttttttagcttttctttctttgagtctttaaagggcaattgtcgacactctgcaaacataccgatttgttgtctgcccactttggagtcttcaatctgggcagtaactatttaccctttttcctgctagcctgtccccctctctggattgaagtcacctgctaagacaatggactaccgaccagactcccggaaatcatgttggtaggatcccagtctttttcgcctggagggcccaatgggatcattagaagccagtcctttgcgggtttcagcggcctccaggaaaggcgatccaggtgtaactccttcattgaaaattcctccgctctcaagaagcctcaggccaaactgaagaaaatgcacaatttaggccacaaaaacaacaatccccccaaagagcctcagcctaaaagggtggaagaagtctacagggccttgaaaaatggacttgatgaatatctggaggttcaccagacggagctggacaagttgacagctcagttaaaagatatgaaaagaaactctcgcctgggtgtactgtatgacctagacaagcaaattaaaacaattgaaagatacatgagacgcctggagtttcatataagtaaggtagatgaactctatgaagcttattgtatccagcgacgcctccaggatggtgccagcaaaatgaagcaagccttcgcaacatcccctgccagcaaagctgcccgggagagtctgacagagatcaatcggagcttcaaggagtacacagagaatatgtgcaccattgaagtggagctagagaatctgctgggagaattctccatcaagatgaaaggtctggctggctttgcacgcctctgtcctggagatcaatatgaaattttcatgaagtatggccggcagcggtggaaactgaaaggcaaaatagaagtaaatggcaagcagagctgggatggagaagaaacagtttttctgcccctgatagttgggttcatctccatcaaggtcacggagctcaaagggctagcaactcacatcctggtaggtagcgtgacctgtgagaccaaagagctgtttgcagcccgacctcaggtagtggctgtcgacatcaatgaccttggtaccatcaaactgaacctggaaatcacctggtatccatttgacgtggaggacatgaccgcatcctcaggcgctgggaacaaggcagcagcccttcagaggagaatgtccatgtacagccagggtaccccggaaacgcccaccttcaaagaccactccttcttttcaaatctacctgatgacatctttgaaaatggaaaggcagccgaggagaaaatgccactgtcgctcagcttcagtgacctgcccaacggggactgcgccctcacctcccactcaacaggctccccttccaactcaacaaatccagaaattaccatcacccctgcggagtttaacctcagcagcttggcctcccagaatgagggtatggatgacaccagctcagcatcttccaggaactccctgggagaaggccaagagccaaagtcacacctgaaggaggaagacccagaggagcccagaaaacctgcctcggccccatctgaggcttgccgccgacagtcctcaggtgctggggctgagcacctgttccttgagaatgatgttgcagaagcacttctgcaagagtctgaggaggcctctgagctcaagcctgtggaactggacacttcggaaggaaacatcacaaagcagctggtcaagaggctcacatctgcagaggtgccaatggccacagacaggctgctctctgagggttctgttggtggagaatctgaaggctgcagatcctttctagatggaagcttagaggatgcttttaatgggcttttacttgcattagaaccacataaagagcagtataaagagtttcaggatctgaaccaagaagtcatgaatttggatgatattctaaaaaagtagagaagatcctctaatggatcccagtgtgcccatccctcaacctcctcagtgatcaactcatggccaatcttgtttcctattcttcaacctgctgacttccctctggattcttctgcaaccagtcccagatattgtgccattttatccatggttgtacttcttttttggatataaagatttttaaatgcattttttaaatgctaacaaaaaataaaaacttgaaacaaaaaaaaaaaaaaaaaaaa

SEQ ID NO: 709 - protein, 591 aa, Homo sapiens
MLVGSQSFSPGGPNGIIRSQSFAGFSGLQERRSRCNSFIENSSALKKPQAKLKKMHNLGHKNNNPPKEPQPKRVEEVYRALKNGLDEYLEVHQTELDKLTAQLKDMKRNSRLGVLYDLDKQIKTIERYMRRLEFHISKVDELYEAYCIQRRLQDGASKMKQAFATSPASKAARESLTEINRSFKEYTENMCTIEVELENLLGEFSIKMKGLAGFARLCPGDQYEIFMKYGRQRWKLKGKIEVNGKQSWDGEETVFLPLIVGFISIKVTELKGLATHILVGSVTCETKELFAARPQVVAVDINDLGTIKLNLEITWYPFDVEDMTASSGAGNKAAALQRRMSMYSQGTPETPTFKDHSFFSNLPDDIFENGKAAEEKMPLSLSFSDLPNGDCALTSHSTGSPSNSTNPEITITPAEFNLSSLASQNEGMDDTSSASSRNSLGEGQEPKSHLKEEDPEEPRKPASAPSEACRRQSSGAGAEHLFLENDVAEALLQESEEASELKPVELDTSEGNITKQLVKRLTSAEVPMATDRLLSEGSVGGESEGCRSFLDGSLEDAFNGLLLALEPHKEQYKEFQDLNQEVMNLDDILKK

SEQ ID NO: 710 - DNA, 1048 bp, Homo sapiens
gtcatgctattgcagcatatgattcatttttataatctggtcttctctttgcccaattcctgaaaggaaaccaggcgacatcatggaaagaaagaatcaaacagctataactgaattcatcatcttgggattctccaacctaaatgaattgcagtttttactattcaccatcttctttctgacttatttctgtactttgggaggaaatatattaattatcttgacgactgtgactgatccacacctgcatacacctatgtattattttctagggaacttggcctttattgacatctgctacaccaccagcaatgtcccccagatgatggtgcacctcctctcaaagaaaaaaagcatttcttatgtggggtgtgtggttcaactttttgcatttgttttctttgtaggatcagagtgtctcctactggcagcaatggcatatgatcgttacattgcaatctgcaatcctttaaggtattcagttattctgagcaaggttctatgcaatcaattagcagcctcatgctgggctgctggtttccttaactcagtggtgcatacagtgttgacattctgcctgcccttctgtggcaacaatcagattaattacttcttctgtgacatcccccctttgctgatcttgtcttgtggaaacacttctgtcaatgagttggcactgctatccactggggtcttcattggttggactcctttcctttgtatcgtactttcctacatttgcataatctccaccatcttgaggatccagtcctcagagggaagacgaaaagccttttctacatgtgcctcccacctggccattgtctttctcttttatggcagcgccatctttacatatgtacggcccatctcaacttactcattaaagaaagataggttggtttcagtgttgtacagtgttgttacccccatgctaaaccctataatttacacattgaggaataaggacatcaaagaagctgtcaaaactatagggagcaagtggcagccaccaatttcctctttggatagtaaactcacttattga

SEQ ID NO: 711 - protein, 321 aa, Homo sapiens
MERKNQTAITEFIILGFSNLNELQFLLFTIFFLTYFCTLGGNILIILTTVTDPHLHTPMYYFLGNLAFIDICYTTSNVPQMMVHLLSKKKSISYVGCVVQLFAFVFFVGSECLLLAAMAYDRYIAICNPLRYSVILSKVLCNQLAASCWAAGFLNSVVHTVLTFCLPFCGNNQINYFFCDIPPLLILSCGNTSVNELALLSTGVFIGWTPFLCIVLSYICIISTILRIQSSEGRRKAFSTCASHLAIVFLFYGSAIFTYVRPISTYSLKKDRLVSVLYSVVTPMLNPIIYTLRNKDIKEAVKTIGSKWQPPISSLDSKLTY

SEQ ID NO: 712 - DNA, 1869 bp, Homo sapiens
agcaatggagaatgtcactacaatgaatgagtttcttctacttggcctgactggtgttcaggagctgcagcctttcttctttgggattttcttaatcatttacctgataaacttgattggaaatggatctatattggtgatggttgttttggaaccacaactccactcccctatgtatttttttctgggaaacctttcttgtctggatatttcttattcttcagtgacactgcccaagctgctcgtaaacctcgtgtgcagtcgcagggctatatcttttctaggctgtatcacccagctacacttcttccactttttgggaagcacagaggccattttactggctatcatggcctttgaccgttttgttgccatctgcaatcctcttcgctacactgtcatcatgaacccccaggtgtgtattctgttggcagctgcggcctggctcatcagcttcttttacgctctgatgcattctgtcatgactgcacacctgagtttttgtggctctcagaaactcaatcacttcttctacgatgtcaagccgctcttagaattggcctgtagtgacacattactcaatcaatggcttctttccattgtcacaggcagcatatccatgggagctttctttctgactcttctctcctgcttctatgtaattggcttccttctgtttaagaacaggtcctgcagaatactccacaaggctctgtccacttgtgcctcccattttatggtggtatgtcttttctatggacctgtgggcttcacatatattcgtcctgcttcagccacctccatgattcaggaccggataatggccatcatgtatagcgccgtcacccctgtactgaatccactaatctacacccttaggaacaaagaagtgatgatggctctgaagaaaatctttggtaggaagttgtttaaagactggcagcaacaccactaggactaatgagggatatctgatttctattaagactgatttccatcacttcactgtaagaaatgatttgtttacctggtttatatttttctttcaaaaattttgagcacatattatattaggcagtgtagtaggttcaagaaacacaggagcaagcaaaacaaattccataatgtcatcaaacataaagtttaatgtgatggaggccccaaataaccaaacgcgtaagtacatatgtcaggataattcggtggcaaggagaactaaggaggtaggaagtatggggagggttagagtaggaatctgctgtgtaaaaaagaatgtggcatttctcctaggacaaaaacctttggaattttccaagtaatagaagtatcttactgaaattccatatgagataatctttatttttgcctattttttttccttttgtgtttccttcagcaggaatgtactgatgataatttttctcacaacagtttttatctagaatatcatttttgttaatcttaattcttgaagagaatttttaatgggtatttaattttagggagagatttttctagccattgaaaatatcttgtttttccccagcttattgaagtataattaacaaataaaaattgcatatatttaggcttcacaacatgatgctttagtatatgtatacattgtgaagagactaccacaatcaagctaaacctacattactgtccctgcattagtttactgttgaatactagaagttcttcattctatctaactgcattttcatacccattaagccaatgtgacaagctctttgtttcagttggagtgtttgcacaatttaaatttgataaatttttgatagaattaaatttaaatttatcctccaactaaatttttgatagaattaaatttaaatttgtcctcca

SEQ ID NO: 713 - protein, 316 aa, Homo sapiens
MENVTTMNEFLLLGLTGVQELQPFFFGIFLIIYLINLIGNGSILVMVVLEPQLHSPMYFFLGNLSCLDISYSSVTLPKLLVNLVCSRRAISFLGCITQLHFFHFLGSTEAILLAIMAFDRFVAICNPLRYTVIMNPQVCILLAAAAWLISFFYALMHSVMTAHLSFCGSQKLNHFFYDVKPLLELACSDTLLNQWLLSIVTGSISMGAFFLTLLSCFYVIGFLLFKNRSCRILHKALSTCASHFMVVCLFYGPVGFTYIRPASATSMIQDRIMAIMYSAVTPVLNPLIYTLRNKEVMMALKKIFGRKLFKDWQQHH

SEQ ID NO: 714 - DNA, 924 bp, Homo sapiens
atgctgaatacaacctcagtcaccgaatttctcctcttgggagtgacagacattcaagaactgcagccttttctcttcgtggttttcctcaccatctacttcatcagtgtgactgggaatggagccgttctgatgattgtcatctccgatcctagactccattcccttatgtatttcttcctgggaaacctgtcctacctggatatctgttactctacggtgacactgccaaaaatgctgcagaactttctctctacacacaaagcaatttctttcttgggatgcataagccagcttcatttcttccactccctgggcagcacggagtccatgttgttcgccgtgatggcatttgacctctctgtggctatctgcaagccacttcgctacactgtcatcatgaaccctcagctctgtacccagatggccatcacaatctgggtcattggttttttccatgccctgctgcactccgtaatgacttctcgcttgaacttctgtggttccaaccgtatccatcattttctctgtgatattaagccattgctaaagctggcctgtgggaacactgagcttaatcagtggctactcagtactgtcacggggacaattgccatgggccccttctttctgacacttctctcctatttctacattatcacttatctcttcttcaagacccgttcttgtagcatgctctgtaaagcactgtccacttgtgcctcccacttcatggtagttattcttttctatgcacctgttcttttcacctatatccatcctgcgttagagagcttcatggaccaggaccggattgttgccatcatgtacactgtggtcactcctgtactaaacccactgatctatactttgaggaacaaggaagtgaagggggccttgggtagagtgatcagaaggctttga

SEQ ID NO: 715 - protein, 307 aa, Homo sapiens
MLNTTSVTEFLLLGVTDIQELQPFLFVVFLTIYFISVTGNGAVLMIVISDPRLHSLMYFFLGNLSYLDICYSTVTLPKMLQNFLSTHKAISFLGCISQLHFFHSLGSTESMLFAVMAFDLSVAICKPLRYTVIMNPQLCTQMAITIWVIGFFHALLHSVMTSRLNFCGSNRIHHFLCDIKPLLKLACGNTELNQWLLSTVTGTIAMGPFFLTLLSYFYIITYLFFKTRSCSMLCKALSTCASHFMVVILFYAPVLFTYIHPALESFMDQDRIVAIMYTVVTPVLNPLIYTLRNKEVKGALGRVIRRL

SEQ ID NO: 716 - DNA, 2229 bp, Homo sapiens
ctctaataacgttaggcttggtatagaagatgcagagacatgctaaaatttctcccccaattattgccaagcagaaacttggacgatcgacatggaaattgtctccacaggaaacgaaactattactgaatttgtcctccttggcttctatgacatccctgaactgcatttcttgttttttattgtattcactgctgtctatgtcttcatcatcatagggaatatgctgattattgtagcagtggttagctcccagaggctccacaaacccatgtatattttcttggcgaatctgtccttcctggatattctctacacctccgcagtgatgccaaaaatgctggagggcttcctgcaagaagcaactatctctgtggctggttgcttgctccagttctttatcttcggctctctagccacagctgaatgcttactgctggctgtcatggcatatgaccgctacctggcaatttgctacccactccactacccactcctgatggggcccagacggtacatggggctggtggtcacaacctggctctctggatttgtggtagatggactggttgtggccctggtggcccagctgaggttctgtggccccaaccacattgaccagttttactgtgactttatgcttttcgtgggcctggcttgctcggatcccagagtggctcaggtgacaactctcattctgtctgtgttctgcctcactattccttttggactgattctgacatcttatgccagaattgtggtggcagtgctgagagttcctgctggggcaagcaggagaagggctttctccacatgctcctcccacctagctgtagtgaccacattctatggaacgctcatgatcttttatgttgcaccctctgctgtccattcccagctcctctccaaggtcttctccctgctctacactgtggtcacccctctcttcaatcctgtgatctataccatgaggaacaaggaggtgcatcaggcacttcggaagattctctgtatcaaacaaactgaaacacttgattgaaggagagtaatgaagatgttattttggacttcggacacctccattggggactcttccaggatgggttggagaggagtaactttgtcttattcgaccattctctttgaactcttctgcagttatactaaaaatgaaaatgatagggcaacaattttttaacttttattttaagttcaagggtacatgtgcaggtttgttacataggtaaacttgtgtcatgggggtttactgtacagattatttcatcacccaggtattaagcctagtactcattaatcatttttcctgatcttctccctcctcccaacctccaccctcaagtaggattcagtgtgttgttcccctctatgtatccatatgttttcataatttagctcccacttatgagtgaagacatacggtatttgattttctgttcctgtgttagtttgcgaaggatagtagcctccaattccatccatgtcaaataatcaaaattatttaaactttgattagttctttattaaatatgtcataaatatttaaaaataatacagcaataccaaaataaacctagaaatattgttttttatattattgttgtatgacatttaaaaatttctttctatgtgtatttatatttatacatacaagttggatcatggagtttgtaatctggttttccactgaacactgtgtcacgaacaactttttctattaacaagcatctatttctttattcttctgggcttcatcgtatggctaaacatgatttgttattctattttgggaatttttagttgtattctattcttttactgtacattgtttacatctggattttcctgtaataaacttttagcacctaaattgcaagatctaaggatatgtgtttttaaaaatctaaagctgaattccttttcttttaaacttcttttcttgtagaacatttcaaacatacataaaagagaagagcacagtgaacccccatgtactccatgtagccaccatccagcttcaacatcaacattttgctaatcttattttaattagctacagctccttgtttgttagttttcatggaaaattttagggcaaattccagatgttgtataactattatgttgtgtaagttatgtatgtacatattccacatatgtatttagtataatctgtgactaataaagacattttaaaaaaccatgcccaca

SEQ ID NO: 717 - protein, 315 aa, Homo sapiens
MEIVSTGNETITEFVLLGFYDIPELHFLFFIVFTAVYVFIIIGNMLIIVAVVSSQRLHKPMYIFLANLSFLDILYTSAVMPKMLEGFLQEATISVAGCLLQFFIFGSLATAECLLLAVMAYDRYLAICYPLHYPLLMGPRRYMGLVVTTWLSGFVVDGLVVALVAQLRFCGPNHIDQFYCDFMLFVGLACSDPRVAQVTTLILSVFCLTIPFGLILTSYARIVVAVLRVPAGASRRRAFSTCSSHLAVVTTFYGTLMIFYVAPSAVHSQLLSKVFSLLYTVVTPLFNPVIYTMRNKEVHQALRKILCIKQTETLD

SEQ ID NO: 718 - DNA, 939 bp, Homo sapiens
atgagtgcaaacacctccatggtgactgagtttcttcttctcggcttctcccacctggccgacctccagggcttgctcttctctgtctttctcactatctacctgctgaccgtggcaggcaatttcctcattgtggtgctggtctccactgatgctgccctccagtcccctatgtacttcttcctgcgcaccctctcggccttggagattggctatacgtctgtcacggtccccctgctacttcaccacctccttactggccggcgccacatctctcgctctggatgtgctctccagatgttcttcttcctcttctttggcgccacggagtgctgcctcctggcagccatggcctatgaccgctatgcagccatctgtgaacccctccgctacccactgctgctgagccaccgggtgtgtctacagctagctgggtcggcgtgggcctgtggggtgctggtggggctgggccacacccctttcatcttctctttgcccttctgcggccccaataccatcccgcagttcttctgtgagatccagcctgtcctgcagctggtatgtggagacacctcgcttaatgaactgcagattatcctggcaacagccctcctcatcctctgcccctttggcctcatcctgggctcctacgggcgtatcctcgttaccatcttccggatcccatctgttgcgggccgccgcaaggccttctccacctgctcctcccacctgatcgtggtctccctcttctatggcaccgcactctttatctatattcgccctaaggccagctacgatccggccactgaccctctggtgtccctcttctatgctgtggtcacccccatcctcaaccccatcatctacagcctgcggaacacagaggtcaaagctgccctaaagagaaccatccagaaaacggtgcctatggagatttga

SEQ ID NO: 719 - protein, 312 aa, Homo sapiens
MSANTSMVTEFLLLGFSHLADLQGLLFSVFLTIYLLTVAGNFLIVVLVSTDAALQSPMYFFLRTLSALEIGYTSVTVPLLLHHLLTGRRHISRSGCALQMFFFLFFGATECCLLAAMAYDRYAAICEPLRYPLLLSHRVCLQLAGSAWACGVLVGLGHTPFIFSLPFCGPNTIPQFFCEIQPVLQLVCGDTSLNELQIILATALLILCPFGLILGSYGRILVTIFRIPSVAGRRKAFSTCSSHLIVVSLFYGTALFIYIRPKASYDPATDPLVSLFYAVVTPILNPIIYSLRNTEVKAALKRTIQKTVPMEI

SEQ ID NO: 720 - DNA, 3009 bp, Homo sapiens
gtttgcttttagttctcattgtgagatcacaagtggaggctccaaccagtccagaagttcctttctatggggaagctgtggcagcaaggccgtgaagagagtctgacttaattgcaaagacgaggtttcaccatgttgaccaggctgatctcaaacatctgacctcaggaagtcagaggcaccaatgtgaggttccacctgctttccagcacattcttggtttcctcacttctgctagacaacgtttgatcagaaggaacagggaacgagaaggagctgctggatgacgataagcctgggaaagggaggctgggtgagcagagacagaaaagaaacacctacctgctgtgacctcacaaacacccaggctgagttttgataagacaggttgaatcacactggggtgacagcctcatccctccaggtacaaacaagaacaggccatggttaaccaaagctcccccatgggcttcctccttctgggcttctctgaacacccagcactggaaaggactctctttgtggttgtcttcacttcctacctcttgaccctggtgggcaacacactcatcatcctgctgtctgtactgtaccccaggctccactctccaatgtactttttcctctctgacctctccttcttggacctctgctttaccacaagttgtgtcccccagatgctggtcaacctctggggcccaaagaagaccatcagcttcctgggatgctctgtccagctcttcatcttcctgtccctggggaccactgagtgcatcctcctgacagtgatggcctttgaccgatacgtggctgtctgccagcccctccactatgccaccatcatccacccccgcctgtgctggcagctggcatctgtggcctgggttatgagtctggttcaatcgatagtccagacaccatccaccctccacttgcccttctgtccccaccagcagatagatgactttttatgtgaggtcccatctctgattcgactctcctgtggagatacctcctacaatgaaatccagttggctgtgtccagtgtcatcttcgtggttgtgcctctcagcctcatccttgcctcttatggagccactgcccaggcagtgctgaggattaactctgccacagcatggagaaaggcctttgggacctgctcctcccatctcactgtggtcaccctcttctacagctcagtcattgctgtctacctccagcccaaaaatccgtatgcccaagggaggggcaagttctttggtctcttctatgcagtgggcactccttcacttaaccctctcgtatacaccctgaggaacaaggagataaagcgagcactcaggaggttactagggaaggaaagagactccagggaaagctggagagctgcttaatatactttcgaaagtaagaagagtttcttcaagatttatgaacatgttaagttttccagactactacccttcccacatacacctgagccactgtggtgggtcacagtgtggctatgttatctatgagagggagaatgagaaagagagggacagagagataaaagaaattgggtgagaggagataggtagctccataaggcacacaaattcaaatattatcattcctatcactgtccattcttaatatttctatcctccattctgttctttttactgtcatcacttctatagatttcctaactccaccatgcctatttctggttatataattgctctccaattgtcatgtcagtgtaggggaactactccatcatagcattctggacaccttgcatgtatctacgtaggtcatgtaagcaaaggcttgaagaacagctaatctgagatttagaagaatgctttttgatcctcctggaatatgagaggatgggaggccctttagagcctgcctcaatgccatctctcactctccttcttatatccctgggagtatgtcatgtgacaagtctttactgtctcccaggttttggatggagcatggggttttctgccccacaccctttaggatatagctgaagaatataatgaggaatagctggattctagaactgactcctcaccagtggtatattccacaacagtgtcacagtcgtctggcccctttggtttccgtgtcatcctttttggtgtgtaggacaaggagccagggaattggcacgtttggcttttacttcttttttatatgtaaataataagccatctaagtgtaaaagtggctcatatcttctccagccaaatcagctaggccatggccttgccttgcttctcatgagtgtgcttgacagtcatcaccgtcactctatcttcatttctggttcttaccgtgttagcttagttcattcaagctactatcacaagctacacataaattgggtggtttataaataacaaacatttctttcttacagttctggaggctggaaactccaagattaaggcagatttcatgcctattgagggcctgctttctgattatagaaggtgacttcttgctgtgcccacacatggtgaaagggactaccaactctctggagtctcttttatgagggcactaattccaattatgaagcctcttccctcatgacctaatcactgcccaaaggccccatgttctaatgccatcatcttggtggtttaggatttcaacatatgaattttggaaggacataagcattcaaccccctgcacatgtcttctttcctacttcctcaaggttctttctgtccagttgctccttcttctattgacccttttttgccttctctttctccttcactgcctcaagttacagccagaggaaaggaggaactaaaacttagcaaatctataatcacatgcaaatacacagaatggattgttacaaccaaaatgcaggctctattgttttcaatttagcagcctttcaaatgtatatggttctggccacattaaagttgcaaataacactttttttgagactgaaataaaggtgaaatattggaaaaaaaaaaaaaaa

SEQ ID NO: 721 - protein, 316 aa, Homo sapiens
MVNQSSPMGFLLLGFSEHPALERTLFVVVFTSYLLTLVGNTLIILLSVLYPRLHSPMYFFLSDLSFLDLCFTTSCVPQMLVNLWGPKKTISFLGCSVQLFIFLSLGTTECILLTVMAFDRYVAVCQPLHYATIIHPRLCWQLASVAWVMSLVQSIVQTPSTLHLPFCPHQQIDDFLCEVPSLIRLSCGDTSYNEIQLAVSSVIFVVVPLSLILASYGATAQAVLRINSATAWRKAFGTCSSHLTVVTLFYSSVIAVYLQPKNPYAQGRGKFFGLFYAVGTPSLNPLVYTLRNKEIKRALRRLLGKERDSRESWRAA

SEQ ID NO: 722 - DNA, 486 bp, Homo sapiens
atgagccatacgggaggtgagtggttggtggacaggcaggtggtcttctccctgacagtgctggtggccctctgtggactggtaggcaatgatgtgatctgctggcttctctactcacaggtctggagcagcccctatgtgacctacatccttaacctggccactgttgatatggtcaacctctcctgtgtaactgtgatcctgctggagaaaatcctcatgctgtatcaccaggcggcattgcaggtggctgtgtttctggatcctgtctcctatttctccgacacagtgggtctctgtctcctggtggccatgagtattgagagctttctctgtgccctctgtcccacctggtgctgccaccgcccagagcacacctctgccatggtgaggtgggccctggccctttctttgtatgcagttagccaggtctgtgagtactgggagaagtgcttggcatgtgaccaatttcatgaggctttatga

SEQ ID NO: 723 - protein, 161 aa, Homo sapiens [sequence omitted]

SEQ ID NO: 724 - DNA, 1137 bp, Homo sapiens
atggtctgggggaaaatttgctggttcagccagagggctggatggacagtgtttgctgagtcacagatatctctctcatgtagcctttgtctccacagtggtgaccaggaggcacagaacccaaacctggtatctcagctctgtggcgtctttcttcaaaatgagacgaatgaaaccatacatatgcagatgagcatggcagtgggacagcaggccctgcccttgaatatcattgcccccaaggctgtgctggtctccctctgtggggtcttattgaatggcactgtcttctggctgctttgctgtggggccacgaatccctacatggtatacatcctccacctggtcgctgctgacgtgatctatctttgctgctcggcagtggggttcttacaggtgactctgctaacttatcatggagtcgtgttttttatccctgatttcctggccatattgtctcccttctcctttgaggtgtgtctctgtctcctggtggccatcagcacagagcggtgtgtgtgtgtcctcttccccatctggtacagatgccaccgcccaaaatacacatctaatgttgtctgcaccctcatctggggcctgcctttttgcatcaacatagtaaaatcacttttcctaacttactggaaacatgtaaaggcatgtgtcatatttctaaagctttctgggctcttccatgctatcctttcacttgtgatgtgtgtgtcgagtctgactctactcattagattcctgtgctgctcccagcagcaaaaggccaccagggtctatgcggtggtgcagatctcggcccccatgttcctactctgggccctacccctgagcgtggcacccctcataacagatttcaaaatgtttgtcaccacctcctatttaatttccttgttcctcattataaacagcagcgccaaccctatcatttatttctttgtggggagcctcagaaagaaaaggctgaaggaatctctcagagtgattctccaacgggcgttagcagataagccagaggtggggaggaacaaaaaggcagctggcatcgacccaatggagcaaccacactctactcagcatgtggagaaccttcttcccagggagcacagggtcgatgtggaaacataa

SEQ ID NO: 725 - protein, 378 aa, Homo sapiens
MVWGKICWFSQRAGWTVFAESQISLSCSLCLHSGDQEAQNPNLVSQLCGVFLQNETNETIHMQMSMAVGQQALPLNIIAPKAVLVSLCGVLLNGTVFWLLCCGATNPYMVYILHLVAADVIYLCCSAVGFLQVTLLTYHGVVFFIPDFLAILSPFSFEVCLCLLVAISTERCVCVLFPIWYRCHRPKYTSNVVCTLIWGLPFCINIVKSLFLTYWKHVKACVIFLKLSGLFHAILSLVMCVSSLTLLIRFLCCSQQQKATRVYAVVQISAPMFLLWALPLSVAPLITDFKMFVTTSYLISLFLIINSSANPIIYFFVGSLRKKRLKESLRVILQRALADKPEVGRNKKAAGIDPMEQPHSTQHVENLLPREHRVDVET

SEQ ID NO: 726 - DNA, 406 bp, Homo sapiens
atgggtcgtgttggcatcaagactgtgacgaaggtggcctaggtcatcgtagaaaagtactacatgtgcctgggcaatgacttccacacaaacaagtgtgtgtgaggagatccccattatcctcagcaagaagctccacaacaggagagcaggctgcgtcacgcatctgacgaaccagattcagagaggtccagtgagaggtatctccatcaagctacaggaggaggagaaagaaaggagggacaattatgtccccaaggtctcagccctggatcaggagatcatcgaagtagatcctgacactaaggaaatgctgaagcttttggactttggcagcctgtccaacctgcaggtcactcggcctacagttgggatgaatttcaaaatgcctcgtggagctgtttga

SEQ ID NO: 727 - DNA, 593 bp, Homo sapiens
atgccccactctgttcctcccacactgaccggcttttctcacccatcagctctgaagtacaagaggctcctggacttcaaggtgctctgcaagctcctcacctgtgcttgcttccccttggtgttctgccataaattttatcatttctggattgctgtctgtcattttgggaagaaaatcaaacaagcatctgccctgctcagtcctgggtggagaagctaccagaaccacatctcctgtctgtcccaccataagtctctgcttcattcacgctttcatgtgtcgtgcatcaagcaagcatttgcctgtaggcttggggagctctgagaggggttgagagtgaacaaaattaatcaaatcgtataacagaagaggaagtcccatcctgccgaggatcctggatgtgagaacctgctgctggcctggtgggatcgtggtgccccaggagcatgaactgctcaggagcagaccctgaccagatcccctgcaggcctggaacagcctgatcagcagcctcctaagccccatggctgccacagtgggcctcattgtccttccctatcacctagccggggtgttcccagctgccagac

SEQ ID NO: 728 - protein, 108 aa, Homo sapiens
MPHSVPPTLTGFSHPSALKYKRLLDFKVLCKLLTCACFPLVFCHKFYHFWIAVCHFGKKIKQASALLSPGWRSYQNHISCLSHHKSLLHSRFHVSCIKQAFACRLGEL

SEQ ID NO: 729 - DNA, 1157 bp, Homo sapiens
gctcacagtcatcaattatagaccccacaacatgcgccctgaagacagaatgttccatatcagagctgtgatcttgagagccctctccttggctttcctgctgagtctccgaggagctggggccatcaaggcggaccatgtgtcaacttatgccgcgtttgtacagacgcatagaccaacaggggagtttatgtttgaatttgatgaagatgagatgttctatgtggatctggacaagaaggagaccgtctggcatctggaggagtttggccaagccttttcctttgaggctcagggcgggctggctaacattgctatattgaacaacaacttgaataccttgatccagcgttccaaccacactcaggccaccaacgatccccctgaggtgaccgtgtttcccaaggagcctgtggagctgggccagcccaacaccctcatctgccacattgacaagttcttcccaccagtgctcaacgtcacgtggctgtgcaacggggagctggtcactgagggtgtcgctgagagcctcttcctgcccagaacagattacagcttccacaagttccattacctgacctttgtgccctcagcagaggacttctatgactgcagggtggagcactggggcttggaccagccgctcctcaagcactgggaggcccaagagccaatccagatgcctgagacaacggagactgtgctctgtgccctgggcctggtgctgggcctagtcggcatcatcgtgggcaccgtcctcatcataaagtctctgcgttctggccatgacccccgggcccaggggaccctgtgaaatactgtaaaggtgacaaaatatctgaacagaagaggacttaggagagatctgaactccagctgccctacaaactccatctcagcttttcttctcacttcatgtgaaaactactccagtggctgactgaattgctgacccttcaagctctgtccttatccattacctcaaagcagtcattccttagtaaagtttccaacaaatagaaattaatgacactttggtagcactaatatggagattatcctttcattgagccttttatcctctgttctcctttgaagaacccctcactgtcaccttcccgagaataccctaagaccaataaatacttcagtatttc

SEQ ID NO: 730 - protein, 260 aa, Homo sapiens
MRPEDRMFHIRAVILRALSLAFLLSLRGAGAIKADHVSTYAAFVQTHRPTGEFMFEFDEDEMFYVDLDKKETVWHLEEFGQAFSFEAQGGLANIAILNNNLNTLIQRSNHTQATNDPPEVTVFPKEPVELGQPNTLICHIDKFFPPVLNVTWLCNGELVTEGVAESLFLPRTDYSFHKFHYLTFVPSAEDFYDCRVEHWGLDQPLLKHWEAQEPIQMPETTETVLCALGLVLGLVGIIVGTVLIIKSLRSGHDPRAQGTL

SEQ ID NO: 731 - DNA, 1501 bp, Homo sapiens
agcgagtccttcttttcctgactgcagctcttttcattttgccatccttttccagctccatgatggttctgcaggtttctgcggccccccggacagtggctctgacggcgttactgatggtgctgctcacatctgtggtccagggcagggccactccagagaattaccttttccagggacggcaggaatgctacgcgtttaatgggacacagcgcttcctggagagatacatctacaaccgggaggagttcgcgcgcttcgacagcgacgtgggggagttccgggcggtgacggagctggggcggcctgctgcggagtactggaacagccagaaggacatcctggaggagaagcgggcagtgccggacaggatgtgcagacacaactacgagctgggcgggcccatgaccctgcagcgccgagtccagcctagggtgaatgtttccccctccaagaaggggcccttgcagcaccacaacctgcttgtctgccacgtgacggatttctacccaggcagcattcaagtccgatggttcctgaatggacaggaggaaacagctggggtcgtgtccaccaacctgatccgtaatggagactggaccttccagatcctggtgatgctggaaatgaccccccagcagggagatgtctacacctgccaagtggagcacaccagcctggatagtcctgtcaccgtggagtggaaggcacagtctgattctgcccggagtaagacattgacgggagctgggggcttcgtgctggggctcatcatctgtggagtgggcatcttcatgcacaggaggagcaagaaagttcaacgaggatctgcataaacagggttcctgagctcactgaaaagactattgtgccttaggaaaagcatttgctgtgtttcgttagcatctggctccaggacagaccttcaacttccaaattggatactgctgccaagaagttgctctgaagtcagtttctatcattctgctctttgattcaaagcactgtttctctcactgggcctccaaccatgttcccttcttcttagcaccacaaataatcaaaacccaacatgactgtttgttttcctttaaaaatatgcaccaaatcatctctcatcacttttctctgagggttttagtagacagtaggagttaataaagaagttcattttggtttaaacataggaaagaagagaaccatgaaaatggggatatgttaactattgtataatggggcctgttacacatgacactcttctgaattgactgtatttcagtgagctgcccccaaatcaagtttagtgccctcatccatttatgtctcagaccactattcttaactattcaatggtgagcagactgcaaatctgcctgataggacccatattcccacagcactaattcaacatataccttactgagagcatgttttatcattaccattaagaagttaaatgaacatcagaatttaaaatcataaatataatctaatacacttt

SEQ ID NO: 732 - protein, 258 aa, Homo sapiens
MMVLQVSAAPRTVALTALLMVLLTSVVQGRATPENYLFQGRQECYAFNGTQRFLERYIYNREEFARFDSDVGEFRAVTELGRPAAEYWNSQKDILEEKRAVPDRMCRHNYELGGPMTLQRRVQPRVNVSPSKKGPLQHHNLLVCHVTDFYPGSIQVRWFLNGQEETAGVVSTNLIRNGDWTFQILVMLEMTPQQGDVYTCQVEHTSLDSPVTVEWKAQSDSARSKTLTGAGGFVLGLIICGVGIFMHRRSKKVQRGSA

SEQ ID NO: 733 - DNA, 1207 bp, Homo sapiens
atggccatgaagggccagtctgtcaccctcattgttgactgcaagatttgttctcatatcttccagtattctctgtcagttggactgcttcctgtctactctgctacatcttctgcctgccttgcagttatggctgccttttctaccctgctgctgcatcccacacctcctgctcttggcacccgtgagcttctgctgcctttcctttatgctgctgtctgggtctttggggttgatgtgggatctgggagaattttgaaacggatcattgctgtcaggatgaaggctgcccatgggccccgggggctgaagggagagaagagagagcctgcagtgctggaacctggtatgctcgtggaggggccccctggtttagaaggccctgtggtgaacagtctgtggtctctgcagggcctgtaccacccctgggcactgtatgccccacagagtgggcctctcctgtgcagggcctgggaagaggttgattataatctggtgtctgaggcctggcagcaccacactctcttcacagaccatgtgtcaacatatgcggagtttgtgcagacgcacagaccctctggggagtatatgtttgaatttgatgaggaggagcagttctacgtgaacctggatgagaaggagatggtctggcctctaccagagtttattcacacctttgactttggtgctcagaggggtattgctggcatcgtcatggcaaggaagcacttgaacacccggatcaatggtccaaacagacttgggccacaaatgcccccaccgaggtaagcgtctttcccaaggagcctgtggatctgggccagcccaacaccctcgtctgccatgttgacaagttcttcccaccagtgctgaacatcacgtggctgcgcaatggggagccagtcattgagggtattgcagagaccatcttcctgcccagcaagaaactcagattacacaggttccactatctgaccctcgttcccatggccgaggacacctgtgacctccagggggagcactggggcctgcaccagcctctcctcaggcactgggaggtccatgaactaatccaggtgcctgagaccatggagatgctggtctgtgccctcggcctgctggtgggcctggcgggggtccttaatggcaccattgtctcaaagaccaagcgatctgacagcatccccgggtccaggggctcctatga

SEQ ID NO: 734 - DNA, 805 bp, Homo sapiens
atgatgatcctgcaggtttcagcgggcccccggacagtggctctgacagcattactgatggtgcggctcatatctgtggtccagagcaggaccactccagagaattccgtctaccaggaacggcaggaatgctatgcgttcaatgggactcagcgcgttgtggacgggctcatctacaaccgggaggaatacgtgcattttgacagcgcagtgggggagttcctagcagtgatggagctggggcggcccataggcgagtacttcaatagccagaaggactttatggaacggaagcgagccgaggtggacaaggtgtgcagacacaagtacgagctgatggagccactcatccggcagcgccgagtccagcctagggtgaacatctcccctccaagaaggagccccagcagcaccacgacctgcttgtctaccacgtgacagatttctacccagacagcattcaagtccgatgcttcctgaatggacaggaggaaacagctggggtcgtgtccaccaacctgatccgtaatggagactggaccttccagatcctggagatgctggaaatgaccccccagcagggaaacatctacacctgccaagtggagcaccccagcctggacagtcctgtcaccgtggagtggaaggcacagtctgattctgtgcagagcaagatgctgacaggagctaggggcttcatgctggggctcatcatctgtggagtggacatcttcacgcacagaaggaggaagaaagttcaacaaggacctgcataaacaggcaatattcctgctttgatttcctt

SEQ ID NO: 735 - DNA, 6104 bp, Homo sapiens
cacacagaagcggcagccaccgaggagggagcagtgccgggagccccgacggcgccttgctgcatggagctgggccgctgacagctgtcgctgcccgcagcctctgacctccctgggaccccggcgtctgaggctcatagtctgctccctgtcttctgtcagcctcagggcatccagcgtctcaggccgacctgggtccctgggacccggcgtttcggcttctcagccatggagcggtgcagccgctgccatcgcctcctcctcctcctacctctggtgctggggctgagcgcggccccaggctgggcaggtgcaccccctgtggatgtgctccgggccctgaggttcccctccctccctgatggtgtccggagagcgaaaggcatctgtccagctgatgtggcctaccgagtggcacgacctgcccagctcagtgcacccactcgccagcttttcccaggaggatttcccaaagatttctctctgctgactgttgtccggacccgccctggtctccaagctcccctcctgactctctacagtgcccagggtgtccgacagctgggcctggagctgggccgacctgtccgcttcctgtatgaagaccagactgggcggcctcaacctccctctcagccagtcttccgaggcctcagcctagcagatggcaagtggcaccgtgtggctgtggctgtgaagggccagtctgtcaccctcattgttgactgcaagaagcgagtcacccggcctctcccccgaagtgctcgtccagtattggacacccatggagtgatcatctttggtgcccgtattctggatgaagaagtctttgagggtgatgtccaggagctggccattgtcccaggggtccaggcagcctatgaatcatgtgaacagaaggagctggaatgcgaggggggccagagggaaagaccccaaaaccaacagcctcacagagcccagagatctccacagcagcaaccatcaagacttcacaggccacaaaatcaggaaccccagagccaggctgcccatggaccccgagggctgaagggagagaaaggagagcctgcagtgttggaacctggtatgctcgtggaggggccccctggcccagaaggccctgcgggattgattggtccccctggcatccaggggaacccaggcccagttggagaccctggagagaggggcccccctggccgagcagggctccctggatcagatggggctcctggtcctcctggcacatctctcatgctcccattccggtttggcagtggtgggggtgacaagggccctgtggtggcggcccaggaggctcaggcccaggcgatcctgcagcaggcgaggctggcgctccgtggaccccctggccccatgggatacacagggcgccctggacccttgggccaacctgggagccctggcctgaaaggagagtctggagacttaggacctcagggccccagaggacctcagggcctcacaggccctcctggcaaggctgggcgaaggggccgggcaggtgctgatggagcccgagggatgcctggagatcctggagtgaagggtgaccgaggttttgatggactcccagggctccctggagagaagggccataggggtgatactggtgcccagggccttcctggtccccctggtgaggatggagagaggggagatgacggggagattgggcctcgagggctgcctggagagtcgggacctcgaggtctccttggccccaaaggcccacctggtattcctggaccccctggcgtccgaggcatggatggtccccagggccccaaagggagcttgggaccccagggagagccaggacctcctggacaacagggcacccctgggacccagggtcttcccgggccccagggtgccatcggccctcatggagagaagggtcctcaagggaagccagggctccccggcatgcctggctcagacggacccccgggtcacccagggaaggaaggtccccctggaaccaaaggaaaccagggtccctctggacctcagggacctctaggatacccaggacctcgaggggtcaagggtgtggacggaattcggggtctgaagggtcataagggtgagaagggtgaggatggctttcctgggttcaaaggtgacataggcgtgaaaggtgacaggggcgaagttggagtccctggttccaggggagaggatggtcctgaggggccaaagggacgcactggaccgactggagaccctgggcccccagggctcatgggcgagaagggcaagctgggtgttcctggtctgcctggctatcctggacgtcagggacccaaggggtccctaggatttcctggctttcctggtgccagtggagagaagggagcccggggcctgtcggggaagtcagggcctcggggagaacggggccccacgggtccacggggtcagcggggaccccgaggtgccactgggaagtctggagctaagggaacatctggtggtgatggcccccatgggccccctggagagaggggcctccctggacctcagggtcccaacgggtttcctggaccgaaaggacccccgggcccccctgggaaggatgggctgccgggacacccaggccaaagaggagaagtgggtttccaagggaagaccggcccccctggtcctccaggagtggtgggacctcagggagcagcaggagaaaccggccctatgggggagagaggtcacccaggccccccggggccccctggagagcagggactacctgggacagctggaaaagaaggaacaaagggtgaccctggtccccctggggccccagggaaggatggtcctgctggtctgaggggattcccaggagagagaggcctcccaggcactgctggtggacctggtttgaaggggaatgaaggtccgtctggcccccctggccctgcaggctcccctggggaacgaggtgcagcaggatcagggggacccattggtccgccagggcgcccaggcccgcagggtccccctggagcagcaggagagaaaggtgtcccaggtgagaagggccccattggcccgactggccgagatggagtgcagggtcctgtggggcttcctggtcctgctgggcctccaggtgtggctggagaggatggagacaagggtgaggtgggggaccccggacagaagggcaccaaagggaacaagggtgaacatggccctcctggaccccctggacccattggtcctgtggggcagcctggagcagcgggagcagatggggagcccggagctcggggaccccagggacactttggagccaaaggtgatgaaggaacaagaggattcaatgggcccccaggacccattggcctacagggtttgccaggcccctctggggagaagggagaaacaggagatgtgggtcctatgggaccacctggccccccaggacctcgaggtccagctggacccaatggcgctgatggcccacaaggtcccccaggaggtgttgggaacctgggtccccctggagagaagggggaaccaggagagtcaggatctccagggatccagggcgagccaggtgtcaagggtccacgcggggaacgtggagagaaaggagagtcggggcagccaggagagccagggccaccagggcctaaaggccccacaggcgatgatggccccaaagggaaccctggtcctgttggttttcctggtgaccctggcccccctggagaaggtggccctcggggccaggatggtgctaagggtgaccgaggcgaggatggtgagccaggacagcctggatcccctggtcccaccggggagaatggacccccagggccacttggaaagcgaggtcctgctggctcgcctggttccgaggggcgacaaggagggaagggagccaagggagatcctggcgctataggtgccccggggaagacaggcccggtgggtcctgcaggcccagcagggaaacctggccctgatggtctgagggggctcccaggctcagtgggtcagcaaggccgacctggagctacaggccaggctgggcccccaggtcctgtgggacccccagggctgcctggtctccggggcgatgctggagccaagggagagaagggccacccaggtctcattggactgattgggcccccgggtgagcagggagagaagggagatcggggacttcctgggcctcagggctcccctgggcagaagggtgagatgggtatcccaggagcatccggccccattggtcctggaggtccccccggcctccccggacctgctggccccaaaggagccaaaggagccacaggcccaggcggacccaagggagagaagggtgtgcagggccctccaggacacccgggtcccccaggcgaggtgatccagccactgcccattcagatgcccaagaagactcggcgctcggtggatggaagccgtctgatgcaggaagatgaggccataccgaccgggggagcccccggcagtcctggggggctggaggagatctttggctcactcgactccctgcgggaggagatcgagcagatgaggcggccaacagggacccaggacagccctgctcgcacctgccaggacctgaagctgtgccacccagagcttcccgatggagagtactgggtcgaccccaaccagggctgtgctcgggatgccttccgagttttctgcaacttcacagcagggggtgagacctgtgtgacgcctagggatgacgtcacgcagttctcttacgtggactcagagggctccccagtgggtgtggtccagctcaccttcctgcggctgctcagcgtctcagcccaccaggacgtctcctacccctgctctggagcagcccgtgacggtcccctgagactccgtggggccaatgaggatgagctgagcccggagactagcccctatgtcaaagaattcagagatggctgccagacacagcaaggccggacggtgctggaggtgcgaacgcctgtgctggagcagctgccagtgctggatgcctccttctcagacctgggagccccaccgaggcggggaggggtgctgctggggcctgtctgcttcatgggataggaccgtctctgtctgatcctgtccattcggaaccaggcccacctggaatcccacaacatcagctctgtgccacctcccaagagggctcctcactatctagggagccctgggccagggcgtggagagccctcagtcggggcaggccaggggaggggtgaagtggttgcctggacaccccacgggaggagtggcatctggggctcttggccctcccacctggagcctgttacccgttagagagctgagacccttatttaaaactcacctcccaatcaccccaaacaaatggaagagaagagaaaggacatggcgtattttgtatttaaaagtaattgtattaattatttaaagtgtggaaagcaaaataacaaaaaagagaaacgccaacaaaaatcagcagatgttgaagacaggggtctcgggggtgggctccggcacccacatcctggagtcaggactttcctcagtgactgtgtgtaggggggtttcagggctgaaccccacctccctcccaccttcctcccacctcacctgtcgcacccactgtgaaagttggaatatgtggtctccctggcctcagggctctgactctgccagggtggggctctctaacccacaggtgttggctgcctggcccatgtgcccactgtctcttccacttggtctgggtttggcaggcactgcctgctacttgagggccaggatgctcccccagggaagaaacggaatagtgtggggtgtgtgcagggctgcatcccgcagatggctggaatattaaaattcttctatattggctggtaaattgccatggccctgagccactgagtatgttcattgccacccctgtccctcccctgggcacccctcactttccctgatcctgcaattaaagggttaatgtgtggcatatggaagggactcccaggaccctgtgcccagcttccatgctgactgatggttaaataatgtgattgtctcctcccagg

SEQ ID NO: 736 - protein, 1629 aa, Homo sapiens
MERCSRCHRLLLLLPLVLGLSAAPGWAGAPPVDVLRALRFPSLPDGVRRAKGICPADVAYRVARPAQLSAPTRQLFPGGFPKDFSLLTVVRTRPGLQAPLLTLYSAQGVRQLGLELGRPVRFLYEDQTGRPQPPSQPVFRGLSLADGKWHRVAVAVKGQSVTLIVDCKKRVTRPLPRSARPVLDTHGVIIFGARILDEEVFEGDVQELAIVPGVQAAYESCEQKELECEGGQRERPQNQQPHRAQRSPQQQPSRLHRPQNQEPQSQAAHGPRGLKGEKGEPAVLEPGMLVEGPPGPEGPAGLIGPPGIQGNPGPVGDPGERGPPGRAGLPGSDGAPGPPGTSLMLPFRFGSGGGDKGPVVAAQEAQAQAILQQARLALRGPPGPMGYTGRPGPLGQPGSPGLKGESGDLGPQGPRGPQGLTGPPGKAGRRGRAGADGARGMPGDPGVKGDRGFDGLPGLPGEKGHRGDTGAQGLPGPPGEDGERGDDGEIGPRGLPGESGPRGLLGPKGPPGIPGPPGVRGMDGPQGPKGSLGPQGEPGPPGQQGTPGTQGLPGPQGAIGPHGEKGPQGKPGLPGMPGSDGPPGHPGKEGPPGTKGNQGPSGPQGPLGYPGPRGVKGVDGIRGLKGHKGEKGEDGFPGFKGDIGVKGDRGEVGVPGSRGEDGPEGPKGRTGPTGDPGPPGLMGEKGKLGVPGLPGYPGRQGPKGSLGFPGFPGASGEKGARGLSGKSGPRGERGPTGPRGQRGPRGATGKSGAKGTSGGDGPHGPPGERGLPGPQGPNGFPGPKGPPGPPGKDGLPGHPGQRGEVGFQGKTGPPGPPGVVGPQGAAGETGPMGERGHPGPPGPPGEQGLPGTAGKEGTKGDPGPPGAPGKDGPAGLRGFPGERGLPGTAGGPGLKGNEGPSGPPGPAGSPGERGAAGSGGPIGPPGRPGPQGPPGAAGEKGVPGEKGPIGPTGRDGVQGPVGLPGPAGPPGVAGEDGDKGEVGDPGQKGTKGNKGEHGPPGPPGPIGPVGQPGAAGADGEPGARGPQGHFGAKGDEGTRGFNGPPGPIGLQGLPGPSGEKGETGDVGPMGPPGPPGPRGPAGPNGADGPQGPPGGVGNLGPPGEKGEPGESGSPGIQGEPGVKGPRGERGEKGESGQPGEPGPPGPKGPTGDDGPKGNPGPVGFPGDPGPPGEGGPRGQDGAKGDRGEDGEPGQPGSPGPTGENGPPGPLGKRGPAGSPGSEGRQGGKGAKGDPGAIGAPGKTGPVGPAGPAGKPGPDGLRGLPGSVGQQGRPGATGQAGPPGPVGPPGLPGLRGDAGAKGEKGHPGLIGLIGPPGEQGEKGDRGLPGPQGSPGQKGEMGIPGASGPIGPGGPPGLPGPAGPKGAKGATGPGGPKGEKGVQGPPGHPGPPGEVIQPLPIQMPKKTRRSVDGSRLMQEDEAIPTGGAPGSPGGLEEIFGSLDSLREEIEQMRRPTGTQDSPARTCQDLKLCHPELPDGEYWVDPNQGCARDAFRVFCNFTAGGETCVTPRDDVTQFSYVDSEGSPVGVVQLTFLRLLSVSAHQDVSYPCSGAARDGPLRLRGANEDELSPETSPYVKEFRDGCQTQQGRTVLEVRTPVLEQLPVLDASFSDLGAPPRRGGVLLGPVCFMG

SEQ ID NO: 737 - DNA, 6425 bp, Homo sapiens
cacacagaagcggcagccaccgaggagggagcagtgccgggagccccgacggcgccttgctgcatggagctgggccgctgacagctgtcgctgcccgcagcctctgacctccctgggaccccggcgtctgaggctcatagtctgctccctgtcttctgtcagcctcagggcatccagcgtctcaggccgacctgggtccctgggacccggcgtttcggcttctcagccatggagcggtgcagccgctgccatcgcctcctcctcctcctacctctggtgctggggctgagcgcggccccaggctgggcaggtgcaccccctgtggatgtgctccgggccctgaggttcccctccctccctgatggtgtccggagagcgaaaggcatctgtccagctgatgtggcctaccgagtggcacgacctgcccagctcagtgcacccactcgccagcttttcccaggaggatttcccaaagatttctctctgctgactgttgtccggacccgccctggtctccaagctcccctcctgactctctacagtgcccagggtgtccgacagctgggcctggagctgggccgacctgtccgcttcctgtatgaagaccagactgggcggcctcaacctccctctcagccagtcttccgaggcctcagcctagcagatggcaagtggcaccgtgtggctgtggctgtgaagggccagtctgtcaccctcattgttgactgcaagaagcgagtcacccggcctctcccccgaagtgctcgtccagtattggacacccatggagtgatcatctttggtgcccgtattctggatgaagaagtctttgagggtgatgtccaggagctggccattgtcccaggggtccaggcagcctatgaatcatgtgaacagaaggagctggaatgcgaggggggccagagggaaagaccccaaaaccaacagcctcacagagcccagagatctccacagcagcaaccatcaagacttcacaggccacaaaatcaggaaccccagagccagcccactgagtctctctactatgactacgagcccccctattatgatgtgatgactacggggacaacccctgattatcaggaccccaccccaggtgaagaggaagaaatcctggagtcgagcctcttgccaccccttgaggaggagcagacagatctccaggtcccccccacagccgacaggttccaggcagaggaatatggggagggtggcacagacccccctgaagggccctacgattacacctatggctatggggatgattatcgtgaggagacagagcttggccctgccctctctgcggagacagcccactcaggagccgctgcccatggaccccgagggctgaagggagagaaaggagagcctgcagtgttggaacctggtatgctcgtggaggggccccctggcccagaaggccctgcgggattgattggtccccctggcatccaggggaacccaggcccagttggagaccctggagagaggggcccccctggccgagcagggctccctggatcagatggggctcctggtcctcctggcacatctctcatgctcccattccggtttggcagtggtgggggtgacaagggccctgtggtggcggcccaggaggctcaggcccaggcgatcctgcagcaggcgaggctggcgctccgtggaccccctggccccatgggatacacagggcgccctggacccttgggccaacctgggagccctggcctgaaaggagagtctggagacttaggacctcagggccccagaggacctcagggcctcacaggccctcctggcaaggctgggcgaaggggccgggcaggtgctgatggagcccgagggatgcctggagatcctggagtgaagggtgaccgaggttttgatggactcccagggctccctggagagaagggccataggggtgatactggtgcccagggccttcctggtccccctggtgaggatggagagaggggagatgacggggagattgggcctcgagggctgcctggagagtcgggacctcgaggtctccttggccccaaaggcccacctggtattcctggaccccctggcgtccgaggcatggatggtccccagggccccaaagggagcttgggaccccagggagagccaggacctcctggacaacagggcacccctgggacccagggtcttcccgggccccagggtgccatcggccctcatggagagaagggtcctcaagggaagccagggctccccggcatgcctggctcagacggacccccgggtcacccagggaaggaaggtccccctggaaccaaaggaaaccagggtccctctggacctcagggacctctaggatacccaggacctcgaggggtcaagggtgtggacggaattcggggtctgaagggtcataagggtgagaagggtgaggatggctttcctgggttcaaaggtgacataggcgtgaaaggtgacaggggcgaagttggagtccctggttccaggggagaggatggtcctgaggggccaaagggacgcactggaccgactggagaccctgggcccccagggctcatgggcgagaagggcaagctgggtgttcctggtctgcctggctatcctggacgtcagggacccaaggggtccctaggatttcctggctttcctggtgccagtggagagaagggagcccggggcctgtcggggaagtcagggcctcggggagaacggggccccacgggtccacggggtcagcggggaccccgaggtgccactgggaagtctggagctaagggaacatctggtggtgatggcccccatgggccccctggagagaggggcctccctggacctcagggtcccaacgggtttcctggaccgaaaggacccccgggcccccctgggaaggatgggctgccgggacacccaggccaaagaggagaagtgggtttccaagggaagaccggcccccctggtcctccaggagtggtgggacctcagggagcagcaggagaaaccggccctatgggggagagaggtcacccaggccccccggggccccctggagagcagggactacctgggacagctggaaaagaaggaacaaagggtgaccctggtccccctggggccccagggaaggatggtcctgctggtctgaggggattcccaggagagagaggcctcccaggcactgctggtggacctggtttgaaggggaatgaaggtccgtctggcccccctggccctgcaggctcccctggggaacgaggtgcagcaggatcagggggacccattggtccgccagggcgcccaggcccgcagggtccccctggagcagcaggagagaaaggtgtcccaggtgagaagggccccattggcccgactggccgagatggagtgcagggtcctgtggggcttcctggtcctgctgggcctccaggtgtggctggagaggatggagacaagggtgaggtgggggaccccggacagaagggcaccaaagggaacaagggtgaacatggccctcctggaccccctggacccattggtcctgtggggcagcctggagcagcgggagcagatggggagcccggagctcggggaccccagggacactttggagccaaaggtgatgaaggaacaagaggattcaatgggcccccaggacccattggcctacagggtttgccaggcccctctggggagaagggagaaacaggagatgtgggtcctatgggaccacctggccccccaggacctcgaggtccagctggacccaatggcgctgatggcccacaaggtcccccaggaggtgttgggaacctgggtccccctggagagaagggggaaccaggagagtcaggatctccagggatccagggcgagccaggtgtcaagggtccacgcggggaacgtggagagaaaggagagtcggggcagccaggagagccagggccaccagggcctaaaggccccacaggcgatgatggccccaaagggaaccctggtcctgttggttttcctggtgaccctggcccccctggagaaggtggccctcggggccaggatggtgctaagggtgaccgaggcgaggatggtgagccaggacagcctggatcccctggtcccaccggggagaatggacccccagggccacttggaaagcgaggtcctgctggctcgcctggttccgaggggcgacaaggagggaagggagccaagggagatcctggcgctataggtgccccggggaagacaggcccggtgggtcctgcaggcccagcagggaaacctggccctgatggtctgagggggctcccaggctcagtgggtcagcaaggccgacctggagctacaggccaggctgggcccccaggtcctgtgggacccccagggctgcctggtctccggggcgatgctggagccaagggagagaagggccacccaggtctcattggactgattgggcccccgggtgagcagggagagaagggagatcggggacttcctgggcctcagggctcccctgggcagaagggtgagatgggtatcccaggagcatccggccccattggtcctggaggtccccccggcctccccggacctgctggccccaaaggagccaaaggagccacaggcccaggcggacccaagggagagaagggtgtgcagggccctccaggacacccgggtcccccaggcgaggtgatccagccactgcccattcagatgcccaagaagactcggcgctcggtggatggaagccgtctgatgcaggaagatgaggccataccgaccgggggagcccccggcagtcctggggggctggaggagatctttggctcactcgactccctgcgggaggagatcgagcagatgaggcggccaacagggacccaggacagccctgctcgcacctgccaggacctgaagctgtgccacccagagcttcccgatggagagtactgggtcgaccccaaccagggctgtgctcgggatgccttccgagttttctgcaacttcacagcagggggtgagacctgtgtgacgcctagggatgacgtcacgcagttctcttacgtggactcagagggctccccagtgggtgtggtccagctcaccttcctgcggctgctcagcgtctcagcccaccaggacgtctcctacccctgctctggagcagcccgtgacggtcccctgagactccgtggggccaatgaggatgagctgagcccggagactagcccctatgtcaaagaattcagagatggctgccagacacagcaaggccggacggtgctggaggtgcgaacgcctgtgctggagcagctgccagtgctggatgcctccttctcagacctgggagccccaccgaggcggggaggggtgctgctggggcctgtctgcttcatgggataggaccgtctctgtctgatcctgtccattcggaaccaggcccacctggaatcccacaacatcagctctgtgccacctcccaagagggctcctcactatctagggagccctgggccagggcgtggagagccctcagtcggggcaggccaggggaggggtgaagtggttgcctggacaccccacgggaggagtggcatctggggctcttggccctcccacctggagcctgttacccgttagagagctgagacccttatttaaaactcacctcccaatcaccccaaacaaatggaagagaagagaaaggacatggcgtattttgtatttaaaagtaattgtattaattatttaaagtgtggaaagcaaaataacaaaaaagagaaacgccaacaaaaatcagcagatgttgaagacaggggtctcgggggtgggctccggcacccacatcctggagtcaggactttcctcagtgactgtgtgtaggggggtttcagggctgaaccccacctccctcccaccttcctcccacctcacctgtcgcacccactgtgaaagttggaatatgtggtctccctggcctcagggctctgactctgccagggtggggctctctaacccacaggtgttggctgcctggcccatgtgcccactgtctcttccacttggtctgggtttggcaggcactgcctgctacttgagggccaggatgctcccccagggaagaaacggaatagtgtggggtgtgtgcagggctgcatcccgcagatggctggaatattaaaattcttctatattggctggtaaattgccatggccctgagccactgagtatgttcattgccacccctgtccctcccctgggcacccctcactttccctgatcctgcaattaaagggttaatgtgtggcatatggaagggactcccaggaccctgtgcccagcttccatgctgactgatggttaaataatgtgattgtctcctcccagg

SEQ ID NO: 738 - protein, 1736 aa, Homo sapiens
MERCSRCHRLLLLLPLVLGLSAAPGWAGAPPVDVLRALRFPSLPDGVRRAKGICPADVAYRVARPAQLSAPTRQLFPGGFPKDFSLLTVVRTRPGLQAPLLTLYSAQGVRQLGLELGRPVRFLYEDQTGRPQPPSQPVFRGLSLADGKWHRVAVAVKGQSVTLIVDCKKRVTRPLPRSARPVLDTHGVIIFGARILDEEVFEGDVQELAIVPGVQAAYESCEQKELECEGGQRERPQNQQPHRAQRSPQQQPSRLHRPQNQEPQSQPTESLYYDYEPPYYDVMTTGTTPDYQDPTPGEEEEILESSLLPPLEEEQTDLQVPPTADRFQAEEYGEGGTDPPEGPYDYTYGYGDDYREETELGPALSAETAHSGAAAHGPRGLKGEKGEPAVLEPGMLVEGPPGPEGPAGLIGPPGIQGNPGPVGDPGERGPPGRAGLPGSDGAPGPPGTSLMLPFRFGSGGGDKGPVVAAQEAQAQAILQQARLALRGPPGPMGYTGRPGPLGQPGSPGLKGESGDLGPQGPRGPQGLTGPPGKAGRRGRAGADGARGMPGDPGVKGDRGFDGLPGLPGEKGHRGDTGAQGLPGPPGEDGERGDDGEIGPRGLPGESGPRGLLGPKGPPGIPGPPGVRGMDGPQGPKGSLGPQGEPGPPGQQGTPGTQGLPGPQGAIGPHGEKGPQGKPGLPGMPGSDGPPGHPGKEGPPGTKGNQGPSGPQGPLGYPGPRGVKGVDGIRGLKGHKGEKGEDGFPGFKGDIGVKGDRGEVGVPGSRGEDGPEGPKGRTGPTGDPGPPGLMGEKGKLGVPGLPGYPGRQGPKGSLGFPGFPGASGEKGARGLSGKSGPRGERGPTGPRGQRGPRGATGKSGAKGTSGGDGPHGPPGERGLPGPQGPNGFPGPKGPPGPPGKDGLPGHPGQRGEVGFQGKTGPPGPPGVVGPQGAAGETGPMGERGHPGPPGPPGEQGLPGTAGKEGTKGDPGPPGAPGKDGPAGLRGFPGERGLPGTAGGPGLKGNEGPSGPPGPAGSPGERGAAGSGGPIGPPGRPGPQGPPGAAGEKGVPGEKGPIGPTGRDGVQGPVGLPGPAGPPGVAGEDGDKGEVGDPGQKGTKGNKGEHGPPGPPGPIGPVGQPGAAGADGEPGARGPQGHFGAKGDEGTRGFNGPPGPIGLQGLPGPSGEKGETGDVGPMGPPGPPGPRGPAGPNGADGPQGPPGGVGNLGPPGEKGEPGESGSPGIQGEPGVKGPRGERGEKGESGQPGEPGPPGPKGPTGDDGPKGNPGPVGFPGDPGPPGEGGPRGQDGAKGDRGEDGEPGQPGSPGPTGENGPPGPLGKRGPAGSPGSEGRQGGKGAKGDPGAIGAPGKTGPVGPAGPAGKPGPDGLRGLPGSVGQQGRPGATGQAGPPGPVGPPGLPGLRGDAGAKGEKGHPGLIGLIGPPGEQGEKGDRGLPGPQGSPGQKGEMGIPGASGPIGPGGPPGLPGPAGPKGAKGATGPGGPKGEKGVQGPPGHPGPPGEVIQPLPIQMPKKTRRSVDGSRLMQEDEAIPTGGAPGSPGGLEEIFGSLDSLREEIEQMRRPTGTQDSPARTCQDLKLCHPELPDGEYWVDPNQGCARDAFRVFCNFTAGGETCVTPRDDVTQFSYVDSEGSPVGVVQLTFLRLLSVSAHQDVSYPCSGAARDGPLRLRGANEDELSPETSPYVKEFRDGCQTQQGRTVLEVRTPVLEQLPVLDASFSDLGAPPRRGGVLLGPVCFMG

SEQ ID NO: 739 - DNA, 6167 bp, Homo sapiens
cacacagaagcggcagccaccgaggagggagcagtgccgggagccccgacggcgccttgctgcatggagctgggccgctgacagctgtcgctgcccgcagcctctgacctccctgggaccccggcgtctgaggctcatagtctgctccctgtcttctgtcagcctcagggcatccagcgtctcaggccgacctgggtccctgggacccggcgtttcggcttctcagccatggagcggtgcagccgctgccatcgcctcctcctcctcctacctctggtgctggggctgagcgcggccccaggctgggcaggtgcaccccctgtggatgtgctccgggccctgaggttcccctccctccctgatggtgtccggagagcgaaaggcatctgtccagctgatgtggcctaccgagtggcacgacctgcccagctcagtgcacccactcgccagcttttcccaggaggatttcccaaagatttctctctgctgactgttgtccggacccgccctggtctccaagctcccctcctgactctctacagtgcccagggtgtccgacagctgggcctggagctgggccgacctgtccgcttcctgtatgaagaccagactgggcggcctcaacctccctctcagccagtcttccgaggcctcagcctagcagatggcaagtggcaccgtgtggctgtggctgtgaagggccagtctgtcaccctcattgttgactgcaagaagcgagtcacccggcctctcccccgaagtgctcgtccagtattggacacccatggagtgatcatctttggtgcccgtattctggatgaagaagtctttgagggtgatgtccaggagctggccattgtcccaggggtccaggcagcctatgaatcatgtgaacagaaggagctggaatgcgaggggggccagagggaaagaccccaaaaccaacagcctcacagagcccagagatctccacagcagcaaccatcaagacttcacaggccacaaaatcaggaaccccagagccaggaccccaccccaggtgaagaggaagaaatcctggagtcgagcctcttgccaccccttgaggaggctgcccatggaccccgagggctgaagggagagaaaggagagcctgcagtgttggaacctggtatgctcgtggaggggccccctggcccagaaggccctgcgggattgattggtccccctggcatccaggggaacccaggcccagttggagaccctggagagaggggcccccctggccgagcagggctccctggatcagatggggctcctggtcctcctggcacatctctcatgctcccattccggtttggcagtggtgggggtgacaagggccctgtggtggcggcccaggaggctcaggcccaggcgatcctgcagcaggcgaggctggcgctccgtggaccccctggccccatgggatacacagggcgccctggacccttgggccaacctgggagccctggcctgaaaggagagtctggagacttaggacctcagggccccagaggacctcagggcctcacaggccctcctggcaaggctgggcgaaggggccgggcaggtgctgatggagcccgagggatgcctggagatcctggagtgaagggtgaccgaggttttgatggactcccagggctccctggagagaagggccataggggtgatactggtgcccagggccttcctggtccccctggtgaggatggagagaggggagatgacggggagattgggcctcgagggctgcctggagagtcgggacctcgaggtctccttggccccaaaggcccacctggtattcctggaccccctggcgtccgaggcatggatggtccccagggccccaaagggagcttgggaccccagggagagccaggacctcctggacaacagggcacccctgggacccagggtcttcccgggccccagggtgccatcggccctcatggagagaagggtcctcaagggaagccagggctccccggcatgcctggctcagacggacccccgggtcacccagggaaggaaggtccccctggaaccaaaggaaaccagggtccctctggacctcagggacctctaggatacccaggacctcgaggggtcaagggtgtggacggaattcggggtctgaagggtcataagggtgagaagggtgaggatggctttcctgggttcaaaggtgacataggcgtgaaaggtgacaggggcgaagttggagtccctggttccaggggagaggatggtcctgaggggccaaagggacgcactggaccgactggagaccctgggcccccagggctcatgggcgagaagggcaagctgggtgttcctggtctgcctggctatcctggacgtcagggacccaaggggtccctaggatttcctggctttcctggtgccagtggagagaagggagcccggggcctgtcggggaagtcagggcctcggggagaacggggccccacgggtccacggggtcagcggggaccccgaggtgccactgggaagtctggagctaagggaacatctggtggtgatggcccccatgggccccctggagagaggggcctccctggacctcagggtcccaacgggtttcctggaccgaaaggacccccgggcccccctgggaaggatgggctgccgggacacccaggccaaagaggagaagtgggtttccaagggaagaccggcccccctggtcctccaggagtggtgggacctcagggagcagcaggagaaaccggccctatgggggagagaggtcacccaggccccccggggccccctggagagcagggactacctgggacagctggaaaagaaggaacaaagggtgaccctggtccccctggggccccagggaaggatggtcctgctggtctgaggggattcccaggagagagaggcctcccaggcactgctggtggacctggtttgaaggggaatgaaggtccgtctggcccccctggccctgcaggctcccctggggaacgaggtgcagcaggatcagggggacccattggtccgccagggcgcccaggcccgcagggtccccctggagcagcaggagagaaaggtgtcccaggtgagaagggccccattggcccgactggccgagatggagtgcagggtcctgtggggcttcctggtcctgctgggcctccaggtgtggctggagaggatggagacaagggtgaggtgggggaccccggacagaagggcaccaaagggaacaagggtgaacatggccctcctggaccccctggacccattggtcctgtggggcagcctggagcagcgggagcagatggggagcccggagctcggggaccccagggacactttggagccaaaggtgatgaaggaacaagaggattcaatgggcccccaggacccattggcctacagggtttgccaggcccctctggggagaagggagaaacaggagatgtgggtcctatgggaccacctggccccccaggacctcgaggtccagctggacccaatggcgctgatggcccacaaggtcccccaggaggtgttgggaacctgggtccccctggagagaagggggaaccaggagagtcaggatctccagggatccagggcgagccaggtgtcaagggtccacgcggggaacgtggagagaaaggagagtcggggcagccaggagagccagggccaccagggcctaaaggccccacaggcgatgatggccccaaagggaaccctggtcctgttggttttcctggtgaccctggcccccctggagaaggtggccctcggggccaggatggtgctaagggtgaccgaggcgaggatggtgagccaggacagcctggatcccctggtcccaccggggagaatggacccccagggccacttggaaagcgaggtcctgctggctcgcctggttccgaggggcgacaaggagggaagggagccaagggagatcctggcgctataggtgccccggggaagacaggcccggtgggtcctgcaggcccagcagggaaacctggccctgatggtctgagggggctcccaggctcagtgggtcagcaaggccgacctggagctacaggccaggctgggcccccaggtcctgtgggacccccagggctgcctggtctccggggcgatgctggagccaagggagagaagggccacccaggtctcattggactgattgggcccccgggtgagcagggagagaagggagatcggggacttcctgggcctcagggctcccctgggcagaagggtgagatgggtatcccaggagcatccggccccattggtcctggaggtccccccggcctccccggacctgctggccccaaaggagccaaaggagccacaggcccaggcggacccaagggagagaagggtgtgcagggccctccaggacacccgggtcccccaggcgaggtgatccagccactgcccattcagatgcccaagaagactcggcgctcggtggatggaagccgtctgatgcaggaagatgaggccataccgaccgggggagcccccggcagtcctggggggctggaggagatctttggctcactcgactccctgcgggaggagatcgagcagatgaggcggccaacagggacccaggacagccctgctcgcacctgccaggacctgaagctgtgccacccagagcttcccgatggagagtactgggtcgaccccaaccagggctgtgctcgggatgccttccgagttttctgcaacttcacagcagggggtgagacctgtgtgacgcctagggatgacgtcacgcagttctcttacgtggactcagagggctccccagtgggtgtggtccagctcaccttcctgcggctgctcagcgtctcagcccaccaggacgtctcctacccctgctctggagcagcccgtgacggtcccctgagactccgtggggccaatgaggatgagctgagcccggagactagcccctatgtcaaagaattcagagatggctgccagacacagcaaggccggacggtgctggaggtgcgaacgcctgtgctggagcagctgccagtgctggatgcctccttctcagacctgggagccccaccgaggcggggaggggtgctgctggggcctgtctgcttcatgggataggaccgtctctgtctgatcctgtccattcggaaccaggcccacctggaatcccacaacatcagctctgtgccacctcccaagagggctcctcactatctagggagccctgggccagggcgtggagagccctcagtcggggcaggccaggggaggggtgaagtggttgcctggacaccccacgggaggagtggcatctggggctcttggccctcccacctggagcctgttacccgttagagagctgagacccttatttaaaactcacctcccaatcaccccaaacaaatggaagagaagagaaaggacatggcgtattttgtatttaaaagtaattgtattaattatttaaagtgtggaaagcaaaataacaaaaaagagaaacgccaacaaaaatcagcagatgttgaagacaggggtctcgggggtgggctccggcacccacatcctggagtcaggactttcctcagtgactgtgtgtaggggggtttcagggctgaaccccacctccctcccaccttcctcccacctcacctgtcgcacccactgtgaaagttggaatatgtggtctccctggcctcagggctctgactctgccagggtggggctctctaacccacaggtgttggctgcctggcccatgtgcccactgtctcttccacttggtctgggtttggcaggcactgcctgctacttgagggccaggatgctcccccagggaagaaacggaatagtgtggggtgtgtgcagggctgcatcccgcagatggctggaatattaaaattcttctatattggctggtaaattgccatggccctgagccactgagtatgttcattgccacccctgtccctcccctgggcacccctcactttccctgatcctgcaattaaagggttaatgtgtggcatatggaagggactcccaggaccctgtgcccagcttccatgctgactgatggttaaataatgtgattgtctcctcccagg

SEQ ID NO: 740 - protein, 1650 aa, Homo sapiens
MERCSRCHRLLLLLPLVLGLSAAPGWAGAPPVDVLRALRFPSLPDGVRRAKGICPADVAYRVARPAQLSAPTRQLFPGGFPKDFSLLTVVRTRPGLQAPLLTLYSAQGVRQLGLELGRPVRFLYEDQTGRPQPPSQPVFRGLSLADGKWHRVAVAVKGQSVTLIVDCKKRVTRPLPRSARPVLDTHGVIIFGARILDEEVFEGDVQELAIVPGVQAAYESCEQKELECEGGQRERPQNQQPHRAQRSPQQQPSRLHRPQNQEPQSQDPTPGEEEEILESSLLPPLEEAAHGPRGLKGEKGEPAVLEPGMLVEGPPGPEGPAGLIGPPGIQGNPGPVGDPGERGPPGRAGLPGSDGAPGPPGTSLMLPFRFGSGGGDKGPVVAAQEAQAQAILQQARLALRGPPGPMGYTGRPGPLGQPGSPGLKGESGDLGPQGPRGPQGLTGPPGKAGRRGRAGADGARGMPGDPGVKGDRGFDGLPGLPGEKGHRGDTGAQGLPGPPGEDGERGDDGEIGPRGLPGESGPRGLLGPKGPPGIPGPPGVRGMDGPQGPKGSLGPQGEPGPPGQQGTPGTQGLPGPQGAIGPHGEKGPQGKPGLPGMPGSDGPPGHPGKEGPPGTKGNQGPSGPQGPLGYPGPRGVKGVDGIRGLKGHKGEKGEDGFPGFKGDIGVKGDRGEVGVPGSRGEDGPEGPKGRTGPTGDPGPPGLMGEKGKLGVPGLPGYPGRQGPKGSLGFPGFPGASGEKGARGLSGKSGPRGERGPTGPRGQRGPRGATGKSGAKGTSGGDGPHGPPGERGLPGPQGPNGFPGPKGPPGPPGKDGLPGHPGQRGEVGFQGKTGPPGPPGVVGPQGAAGETGPMGERGHPGPPGPPGEQGLPGTAGKEGTKGDPGPPGAPGKDGPAGLRGFPGERGLPGTAGGPGLKGNEGPSGPPGPAGSPGERGAAGSGGPIGPPGRPGPQGPPGAAGEKGVPGEKGPIGPTGRDGVQGPVGLPGPAGPPGVAGEDGDKGEVGDPGQKGTKGNKGEHGPPGPPGPIGPVGQPGAAGADGEPGARGPQGHFGAKGDEGTRGFNGPPGPIGLQGLPGPSGEKGETGDVGPMGPPGPPGPRGPAGPNGADGPQGPPGGVGNLGPPGEKGEPGESGSPGIQGEPGVKGPRGERGEKGESGQPGEPGPPGPKGPTGDDGPKGNPGPVGFPGDPGPPGEGGPRGQDGAKGDRGEDGEPGQPGSPGPTGENGPPGPLGKRGPAGSPGSEGRQGGKGAKGDPGAIGAPGKTGPVGPAGPAGKPGPDGLRGLPGSVGQQGRPGATGQAGPPGPVGPPGLPGLRGDAGAKGEKGHPGLIGLIGPPGEQGEKGDRGLPGPQGSPGQKGEMGIPGASGPIGPGGPPGLPGPAGPKGAKGATGPGGPKGEKGVQGPPGHPGPPGEVIQPLPIQMPKKTRRSVDGSRLMQEDEAIPTGGAPGSPGGLEEIFGSLDSLREEIEQMRRPTGTQDSPARTCQDLKLCHPELPDGEYWVDPNQGCARDAFRVFCNFTAGGETCVTPRDDVTQFSYVDSEGSPVGVVQLTFLRLLSVSAHQDVSYPCSGAARDGPLRLRGANEDELSPETSPYVKEFRDGCQTQQGRTVLEVRTPVLEQLPVLDASFSDLGAPPRRGGVLLGPVCFMG

SEQ ID NO: 741 - DNA, 2892 bp, Homo sapiens
caaagatggctgccacattggcgctgtcattttggtactgagcagagcgacgggcttaattcgacccaatccaggccagagtctttctctcaggggcttcctcgtgctcagctaatcctccgatcaatccttgggaatccctgggacctcttcggtatccctactctcagccagggatcatgtcttgggccgctcgcccgcccttcctccctcagcggcatgccgcagggcagtgtgggccggtgggggtgcgaaaagaaatgcattgtggggtcgcgtcccggtggcggcggcgacggccctggctggatcccgcagcggcggcggcggcggcggtggcaggcggagaacaacaaaccccggagccggagccaggggaggctggacgggacgggatgggcgacagcgggcgggactcccgaagcccagacagctcctccccaaatccccttccccagggagtccctcccccttctcctcctgggccacccctacccccttcaacagctccatcccttggaggctctggggccccacccccacccccgatgccaccacccccactgggctctccctttccagtcatcagttcttccatggggtcccctggtctgccccctccagctcccccaggattctccgggcctgtcagcagcccccagattaactcaacagtgtcactccctgggggtgggtctggcccccctgaagatgtgaagccaccagtcttaggggtccggggcctgcactgtccaccccctccaggtggccctggggctggcaaacggctatgtgcaatctgcggggacagaagctcaggcaaacactacggggtttacagctgtgagggttgcaagggcttcttcaaacgcaccatccgcaaagaccttacatactcttgccgggacaacaaagactgcacagtggacaagcgccagcggaaccgctgtcagtactgccgctatcagaagtgcctggccactggcatgaagagggaggcggtacaggaggagcgtcagcggggaaaggacaaggatggggatggggagggggctgggggagcccccgaggagatgcctgtggacaggatcctggaggcagagcttgctgtggaacagaagagtgaccagggcgttgagggtcctgggggaaccgggggtagcggcagcagcccaaatgaccctgtgactaacatctgtcaggcagctgacaaacagctattcacgcttgttgagtgggcgaagaggatcccacacttttcctccttgcctctggatgatcaggtcatattgctgcgggcaggctggaatgaactcctcattgcctccttctcacaccgatccattgatgttcgagatggcatcctccttgccacaggtcttcacgtgcaccgcaactcagcccattcagcaggagtaggagccatctttgatcgggtgctgacagagctagtgtccaaaatgcgtgacatgaggatggacaagacagagcttggctgcctgagggcaatcattctgtttaatccagatgccaagggcctctccaaccctagtgaggtggaggtcctgcgggagaaagtgtatgcatcactggagacctactgcaaacagaagtaccctgagcagcagggacggtttgccaagctgctgctacgtcttcctgccctccggtccattggccttaagtgtctagagcatctgtttttcttcaagctcattggtgacacccccatcgacaccttcctcatggagatgcttgaggctccccatcaactggcctgagctcagacccagacgtggtgcttctcacactggaggagcacacatccaagagggactccaagccctggggcagggtggggggccatgttcccagaaccttgatggggtgagaagtacagggcagaaccaagaacataaaccctccaagggatctgcttgatatcccaagttggaagggaccccagatacctgtgaggactggttgtctctcttcggtggccttgagtctctgaatttgtcgggttctcccatgatttggggtgatttctcaccctctgtccttcccccagcacaaagcactggccttgcctccaggaccttgcttccttctcatcttgcctcattttgcttcccatctgaagagtggaaatggggaactcccccagaggtggatactggggggcaggcctcccaagctgatggacatgagagtagggccctgacaggccttcctcctctcaaacctggcagatgggggcctctctggaagagggaggggccctgtcactgtccagagtctctttttacacttcacctccttctgcagtcagactgaaatataaaaaaggtggtggtggtggtgaaggggctggtggagatgtaggaaccgatctgctatttttaatttcctgtgaggatagagacttgcagttagactcaaagaagtactgtactttcccaggttgactaagaaatgccagtggtggaggtgggtgtttgggaaaggcagggccctgaaatggcctgtccctagggctctccaagcactagccttcccagcttcccgccgccccccctatctcttcctgtctaacttggggaaggggcctgggctgtgaggacagggcccccacaggggatggtttcacgagtgtagtcccggaggccttccctttacagctctcctccagccctgggcacatagcataggctggggacacaggatcctggcctgagaattgaggggaggtggccagcccgcagaggtggggtgctggggctgcatgatttttgccctgcgtcccttctctttggggctcctttcccctctcatacataaaatcgctttcaaattaaaatcgctgttttctggaaaaaaaaaaaaaaaaaa

SEQ ID NO: 742 - protein, 533 aa, Homo sapiens
MSWAARPPFLPQRHAAGQCGPVGVRKEMHCGVASRWRRRRPWLDPAAAAAAAVAGGEQQTPEPEPGEAGRDGMGDSGRDSRSPDSSSPNPLPQGVPPPSPPGPPLPPSTAPSLGGSGAPPPPPMPPPPLGSPFPVISSSMGSPGLPPPAPPGFSGPVSSPQINSTVSLPGGGSGPPEDVKPPVLGVRGLHCPPPPGGPGAGKRLCAICGDRSSGKHYGVYSCEGCKGFFKRTIRKDLTYSCRDNKDCTVDKRQRNRCQYCRYQKCLATGMKREAVQEERQRGKDKDGDGEGAGGAPEEMPVDRILEAELAVEQKSDQGVEGPGGTGGSGSSPNDPVTNICQAADKQLFTLVEWAKRIPHFSSLPLDDQVILLRAGWNELLIASFSHRSIDVRDGILLATGLHVHRNSAHSAGVGAIFDRVLTELVSKMRDMRMDKTELGCLRAIILFNPDAKGLSNPSEVEVLREKVYASLETYCKQKYPEQQGRFAKLLLRLPALRSIGLKCLEHLFFFKLIGDTPIDTFLMEMLEAPHQLA

SEQ ID NO: 743 - DNA, 2475 bp, Homo sapiens
atattggtaaaggcattagggcgaaggtggaacggaacttcctgttctcgcgggatctaaaggcgggactgccacgtccaagcaaaccgggaaaggagaggatcccggagccggtgagaattctctgttttttctctaccatcctttccaggccttttcctcacctaatgagtcgtagagacgagggcccagagagtctgtaaagtggctggtgaaagattagtgtcccagggccctacatccgggaggtggttcgggataaagagaactagtcttgggaacaatgtaggtgggaacttaagggaatgggagagcggcccatagaggtggacggagggcgcgattggagtaaagcggaccctgtgtaggtatagagttgagtcaagtggagtcactgcctctgtccctctggtcagcgtgatggccagaggcctgggggccccccactgggtggccgtgggactgctgacctgggcgaccttggggcttctggtggctggactcgggggtcatgacgacctgcacgacgatctgcaagaggacttccatggccacagccacaggcactcacatgaagatttccaccatggccacagccatgcccatggccatggccacactcacgagagcatctggcatggacatacccacgatcacgaccatggacattcacatgaggatttacaccatggccatagccatggctactcccatgagagcctctaccacagaggacatggacatgaccatgagcatagccatggaggctatggggagtctggggctccaggcatcaagcaggacctggatgctgtcactctctgggcttatgcactgggggccacagtgctgatctcagcagctccattttttgtcctcttccttatccccgtggagtcgaactctccccggcatcgctctctacttcagatcttgctcagttttgcttccggtgggctcctgggagatgctttcctgcacctcattcctcatgctcttgaacctcattctcaccacactctggagcaacccggacatggacactcccacagtggccagggccccattctgtctgtgggactgtgggttctcagtggaattgttgcctttcttgtcgtggagaaatttgtgagacatgtgaaaggaggacatggtcacagtcatggacatggacacgctcacagtcatacacgtggaagtcatggacatggaagacaagagcgttctaccaaggagaagcagagctcagaggaagaagaaaaggaaacaagaggggttcagaagaggcgaggagggagcacagtacccaaagatgggccagtgagacctcagaacgctgaagaagaaaaaagaggcttagacctgcgtgtgtcggggtacctgaatctggctgctgacttggcacacaacttcactgatggtctggccattggggcttcctttcgagggggccggggactagggatcctgaccacaatgactgtcctgctacatgaagtgccccacgaggtcggagactttgccatcttggtccagtctggctgcagcaaaaagcaggcgatgcgtctgcaactactgacagcagtaggggcactggcaggcacagcctgtgcccttctcactgaaggaggagcagtgggcagtgaaattgcaggtggtgcaggtcctggctgggtcctgccatttactgcaggtggctttatctacgtagcaacagtgtctgtgttgcccgagctgctgagggaggcatcaccattgcaatcacttctggaggtgctggggctgctggggggagttatcatgatggtgctgattgcccaccttgagtgaggggtggataaactacccctgccccaaacctctacccctaactccaggtcaggggtgcgtagaggttgggggccctggccagggacatctgccaaaggaaggaactgtagcctgggagaatggttactttggcattagggccttcaagggctggcagtcttacagaggctggagcggtgagaatgagaggccagagggaccatagtgttgggcactgtctgaccatgttgcatttggaaggctaaatggggccatgaagaaggctggaagggacagggggtgatggcagcctacctggtgtcccctaccccacctgttctcggagaaccaagttgctacacaggaagttctccaaggtccagtttcctttctcccaccagttggtggaggcttcagggaagaccagagtcctggacagagagggtaacaggaggagtcggggataaacatcaaacatcaatcgtgtgtcctgatttgggagtgattggggggatggggtgggagagggttagttggtattctcatggcctgattttttttgtttctattccttttatatcactgtgtttgaatcgagggggaggggtggtaaccggaaataaagacctccgatcttccgccccaaaaaaaaaaaaaaaaaaaaaa

SEQ ID NO: 744 - protein, 469 aa, Homo sapiens
MARGLGAPHWVAVGLLTWATLGLLVAGLGGHDDLHDDLQEDFHGHSHRHSHEDFHHGHSHAHGHGHTHESIWHGHTHDHDHGHSHEDLHHGHSHGYSHESLYHRGHGHDHEHSHGGYGESGAPGIKQDLDAVTLWAYALGATVLISAAPFFVLFLIPVESNSPRHRSLLQILLSFASGGLLGDAFLHLIPHALEPHSHHTLEQPGHGHSHSGQGPILSVGLWVLSGIVAFLVVEKFVRHVKGGHGHSHGHGHAHSHTRGSHGHGRQERSTKEKQSSEEEEKETRGVQKRRGGSTVPKDGPVRPQNAEEEKRGLDLRVSGYLNLAADLAHNFTDGLAIGASFRGGRGLGILTTMTVLLHEVPHEVGDFAILVQSGCSKKQAMRLQLLTAVGALAGTACALLTEGGAVGSEIAGGAGPGWVLPFTAGGFIYVATVSVLPELLREASPLQSLLEVLGLLGGVIMMVLIAHLE

SEQ ID NO: 745 - DNA, 989 bp, Homo sapiens
gggattcccacccacccacagcccgccatggcgtctcagctccagaaccgactccgctccgcactggccttggtcacaggtgcggggagcggcatcggccgagcggtcagtgtacgcctggccggagagggggccaccgtagctgcctgcgacctggaccgggcagcggcacaggagacggtgcggctgctgggcgggccagggagcaaggaggggccgccccgagggaaccatgctgccttccaggctgacgtgtctgaggccagggccgccaggtgcctgctggaacaagtgcaggcctgcttttctcgcccaccatctgtcgttgtgtcctgtgcgggcatcacccaggatgagtttctgctgcacatgtctgaggatgactgggacaaagtcatagctgtcaacctcaagggcaccttcctagtcactcaggctgcagcacaagccctggtgtccaatggttgtcgtggttccatcatcaacatcagtagcatcgtaggaaaggtggggaacgtggggcagacaaactatgcagcatccaaggctggagtgattgggctgacccagaccgcagcccgggagcttggacgacatgggatccgctgtaactctgtcctcccagggttcattgcaacacccatgacacagaaagtgccacagaaagtggtggacaagattactgaaatgatcccgatgggacacttgggggaccctgaggatgtggcagatgtggtcgcattcttggcatctgaagatagtggatacatcacagggacctcagtggaagtcactggaggtcttttcatgtaactgcctcaaggaccctggactctgctcacccccccaccactctgcctggcctcctgctgatgaggactctaagttcccaggatacaaaaggggtggcagtgtatggttcaggaatgctgaatatgggaagcaggggtgcttgtgaccctaataaattccaagtcctcttccctgcc

SEQ ID NO: 746 - protein, 261 aa, Homo sapiens
MASQLQNRLRSALALVTGAGSGIGRAVSVRLAGEGATVAACDLDRAAAQETVRLLGGPGSKEGPPRGNHAAFQADVSEARAARCLLEQVQACFSRPPSVVVSCAGITQDEFLLHMSEDDWDKVIAVNLKGTFLVTQAAAQALVSNGCRGSIINISSIVGKVGNVGQTNYAASKAGVIGLTQTAARELGRHGIRCNSVLPGFIATPMTQKVPQKVVDKITEMIPMGHLGDPEDVADVVAFLASEDSGYITGTSVEVTGGLFM

SEQ ID NO: 747 - DNA, 1744 bp, Homo sapiens
cagcgcccgggccatggcggcggcggtggcgggagctgctgtctgagcagcggttgcggaccgagcgaacttggcccaggagcccgggcctagggagaggcgcggcggcggcgggagcgcgaacggctggagctggccttcttcgccttctcctcggctgtggagccctggtggggggtctgcgcccggtcaccatgacgacgccggcgaatgcccagaatgccagcaaaacgtgggaactgagtctgtatgagctgcaccggaccccgcaggaagccataatggatggcacagagattgctgtttcccctcggtcactgcattcagaactcatgtgccctatctgcctggacatgctgaagaatacgatgaccaccaaggagtgcctccacagattctgctctgactgcattgtcacagccctacggagcgggaacaaggagtgtcctacctgccgaaagaagctggtgtccaagcgatccctacggccagaccccaactttgatgccctgatctctaagatctatcctagccgggaggaatacgaggcccatcaagaccgagtgcttatccgcctgagccgcctgcacaaccagcaggcattgagctccagcattgaggaggggctacgcatgcaggccatgcacagggcccagcgtgtgaggcggccgataccagggtcagatcagaccacaacgatgagtgggggggaaggagagcccggggagggagaaggggatggagaagatgtgagctcagactccgcccctgactctgccccaggccctgctcccaagcgaccccgtggagggggcgcaggggggagcagtgtagggacagggggaggcggcactggtggggtgggtgggggtgccggttcggaagactctggtgaccggggagggactctgggagggggaacgctgggccccccaagccctcctggggcccccagccccccagagccaggtggagaaattgagctcgtgttccggccccaccccctgctcgtggagaagggagaatactgccagacgaggtatgtgaagacaactgggaatgccacagtggaccacctctccaagtacttggccctgcgcattgccctcgagcggaggcaacagcaggaagcaggggagccaggagggcctggagggggcgcctctgacaccggaggacctgatgggtgtggcggggagggtgggggtgccggaggaggtgacggtcctgaggagcctgctttgcccagcctggagggcgtcagtgaaaagcagtacaccatctacatcgcacctggaggcggggcgttcacgacgttgaatggctcgctgaccctggagctggtgaatgagaaattctggaaggtgtcccggccactggagctgtgctatgctcccaccaaggatccaaagtgaccccaccaggggacagccagaggaaggggaccatggggtatccctgtgtcctggtctatcaccccagcttctttgtcccccagtacccccagcccagccagccaataagaggacacaaatgaggacacgtggcttttatacaaagtatctatatgagattcttctatattgtacagagtggggcaaaacacgcccccatctgctgccttttctattgccctgcaacgtcccatctatacgaggtgttggagaaggtgaagaaccctcccattcacgcccgcctaccaacaacaaacgtgcttttttcctctttgaaacctgcaaaaaaa

SEQ ID NO: 748 - protein, 406 aa, Homo sapiens
MTTPANAQNASKTWELSLYELHRTPQEAIMDGTEIAVSPRSLHSELMCPICLDMLKNTMTTKECLHRFCSDCIVTALRSGNKECPTCRKKLVSKRSLRPDPNFDALISKIYPSREEYEAHQDRVLIRLSRLHNQQALSSSIEEGLRMQAMHRAQRVRRPIPGSDQTTTMSGGEGEPGEGEGDGEDVSSDSAPDSAPGPAPKRPRGGGAGGSSVGTGGGGTGGVGGGAGSEDSGDRGGTLGGGTLGPPSPPGAPSPPEPGGEIELVFRPHPLLVEKGEYCQTRYVKTTGNATVDHLSKYLALRIALERRQQQEAGEPGGPGGGASDTGGPDGCGGEGGGAGGGDGPEEPALPSLEGVSEKQYTIYIAPGGGAFTTLNGSLTLELVNEKFWKVSRPLELCYAPTKDPK

SEQ ID NO: 749 - DNA, 2990 bp, Homo sapiens
tccggggctagtttgtgtttcagacttccatatttccatttgcagttgggtgaagtggttagagctgaaaggggacagctggagtcaaacaacttaactcaaatatctgggaacgatttcgcgctgaggaagaccctttgggacttgtagctccactccggggaacggactcgccgggactgacagttgccggaagtgaggctgcggggaatggccgccgctgcgaccatggcggctgcggcccgggaactggtgttgcgggctgggacctcagatatggaggaggaagagggcccgctggcgggtggtcctgggctccaggaaccactgcaacttggggagttggatatcacttctgatgaattcatcctggatgaagtggatgttcacattcaggcaaatctggaggatgagttagtaaaggaagctcttaaaacgggtgtagatctccgtcactattcaaagcaagttgagctggagctacagcagattgaacagaaatccattcgggattatattcaagagagtgagaatatagcatctctacacaaccagatcacagcctgtgatgctgtcctggagcgaatggagcagatgttgggagcttttcagagtgacctcagctccatcagctctgagatccggacactgcaggaacagtcaggagccatgaacattcgacttcgaaatcgccaggcagttcgggggaaacttggggagcttgttgatggtctggtggtgccttctgctctggtcacggcaattctggaggctccagtgacagagcccaggttcttggagcagctacaggagctggatgccaaggcagccgcagtcagagagcaggaagctagaggcacagcagcctgcgcagatgtcagaggcgtgctcgatcggctccgggtcaaggcagtgacgaagatccgagagtttatcctccagaagatttattccttcaggaaacccatgaccaactatcagatcccccagacggccctgctgaagtacaggttcttctatcagtttctgctgggcaatgaacgagcaacagcaaaggagatcagggatgaatatgtggagacgctgagcaagatttacctgtcttactaccgctcttacctggggcggctcatgaaggtgcagtatgaggaagtcgctgagaaagatgatctaatgggtgtggaagatacagcaaagaaaggattcttctcaaagccatcgctccgcagcaggaacaccattttcaccctaggaacccgcggctctgtcatctcccccactgaacttgaggcccccatcctggtgcctcacacagcgcagcgcggagagcagaggtatccatttgaggccctcttccgcagccagcactacgccctcctagacaattcctgccgcgaataccttttcatctgtgaattttttgttgtgtctggcccagctgcacacgacctgttccatgctgtcatgggccgtacactcagcatgaccctgaaacacctggattcttatctagctgactgctacgatgccattgctgtttttctctgtatccacattgttctccggttccgtaacattgcagcaaagagggatgttcctgccctggacaggtactgggaacaggtgcttgccttgctatggccacggtttgaactgatcctggagatgaatgttcagagcgtccgaagcactgacccccagcgcctaggggggttggatactcggccccactatatcacacgccgctatgcagagttctcctccgctcttgtcagtatcaaccagacaattcctaatgaacggaccatgcaattgctgggacagctgcaggtggaggtggagaattttgtcctccgagtggcagctgagttctcctcaaggaaggagcagcttgtgtttctgatcaacaactatgacatgatgctgggtgtgctgatggagcgggctgcagatgacagcaaagaggttgagagcttccagcagctgctcaatgctcggacacaggaattcattgaagagttgctgtctcccccttttgggggtttagtggcatttgtgaaggaggctgaggctttgattgagcgtggacaggctgagcgacttcgaggggaagaagcccgggtaactcagctgatccgtggctttggtagttcctggaaatcatcagtggaatctctgagtcaggatgtaatgcggagtttcaccaacttcagaaatggcaccagtatcattcagggagcgctgacccagctgatccagctctatcatcgcttccaccgggtgctgtcccagccgcagctccgagccctccctgcccgggctgagctcatcaacattcaccaccttatggtggagctcaagaagcataagcccaacttctgatgtgccagaaaccgccctgagatctgccggtcatctccatggacttctgcaccccattccatacccttcttcacctggggtaccccttccagttttccccttgcttcccaggcccttgacatggcttacctgccttcactcccagcaccttgcccaacaggataagctggatccccttggccttctgaatatcccagtgtcttcaggtttcccaagaccacttccctgtgggcttccaaaatggcctttatcatttctccagtctgtcaccctcctttcctgctcccatacacccaaggcttgtttcttcccctgtaaaaaccactgcctcaatctctggttcactcaactagtcaccatgtcctgaggcatgaagcctcctcagctcttggaattgctggcaaggggtgactgcctctgagtcattgtgtttttcaaagtgatttcttttctgtagctttttgacctaagatctcagcaatttgaacactaacctctcccctcctggctcaagaattactccgaagtcagtctgcagaaaataaatatttagtatgacatgacacttaaaaaaaaaaaaaaaaaaaaaaaaaaaaaaaaaaaaaaaa

SEQ ID NO: 750 - protein, 723 aa, Homo sapiens
MAAAATMAAAARELVLRAGTSDMEEEEGPLAGGPGLQEPLQLGELDITSDEFILDEVDVHIQANLEDELVKEALKTGVDLRHYSKQVELELQQIEQKSIRDYIQESENIASLHNQITACDAVLERMEQMLGAFQSDLSSISSEIRTLQEQSGAMNIRLRNRQAVRGKLGELVDGLVVPSALVTAILEAPVTEPRFLEQLQELDAKAAAVREQEARGTAACADVRGVLDRLRVKAVTKIREFILQKIYSFRKPMTNYQIPQTALLKYRFFYQFLLGNERATAKEIRDEYVETLSKIYLSYYRSYLGRLMKVQYEEVAEKDDLMGVEDTAKKGFFSKPSLRSRNTIFTLGTRGSVISPTELEAPILVPHTAQRGEQRYPFEALFRSQHYALLDNSCREYLFICEFFVVSGPAAHDLFHAVMGRTLSMTLKHLDSYLADCYDAIAVFLCIHIVLRFRNIAAKRDVPALDRYWEQVLALLWPRFELILEMNVQSVRSTDPQRLGGLDTRPHYITRRYAEFSSALVSINQTIPNERTMQLLGQLQVEVENFVLRVAAEFSSRKEQLVFLINNYDMMLGVLMERAADDSKEVESFQQLLNARTQEFIEELLSPPFGGLVAFVKEAEALIERGQAERLRGEEARVTQLIRGFGSSWKSSVESLSQDVMRSFTNFRNGTSIIQGALTQLIQLYHRFHRVLSQPQLRALPARAELINIHHLMVELKKHKPNF

SEQ ID NO: 751 - DNA, 549 bp, Homo sapiens
ctctcttccacaggaggcctacacgccgccgcttgtgctgcagccatgtctctagtgatccctgaaaagttccagcatattttgcgagtactcaacaccaacatcgatgggcggcggaaaatagcctttgccatcactgccattaagggtgtgggccgaagatatgctcatgtggtgttgaggaaagcagacattgacctcaccaagagggcgggagaactcactgaggatgaggtggaacgtgtgatcaccattatgcagaatccacgccagtacaagatcccagactggttcttgaacagacagaaggatgtaaaggatggaaaatacagccaggtcctagccaatggtctggacaacaagctccgtgaagacctggagcgactgaagaagattcgggcccatagagggctgcgtcacttctggggccttcgtgtccgaggccagcacaccaagaccactggccgccgtggccgcaccgtgggtgtgtccaagaagaaataagtctgtaggccttgtctgttaataaatagtttatatacaaaaaaa

SEQ ID NO: 752 - protein, 152 aa, Homo sapiens [sequence omitted]

SEQ ID NO: 753 - DNA, 1704 bp, Homo sapiens
gaggcgggggaggggccgtgagtgccgcagtcggccagccatggagcggagcttgctggcggcgaggccgcggcgacaaggtagccacccccgcagcatgcctcgaccgcggtccgcagctgcaccgcctctccccgccccccagggtgcgctggtcccggtcgcgcgctcagacctccgcatcccgggcgtggtcggttaagtccccggccgtgacccaggcccggggagctagtctccgcccttcgctcttacggatcccctcggagtacgccgcaccatgcagctcaggctcttccggcgcctccttctcgccgctttgctgctggtgatcgtctggaccctcttcgggccttcggggttgggggaggagctgctgagcctctcactagcctccctgctcccagcccccgcctcaccggggccgcccctggccctgccccgcctcttgatccccaaccaggaagcttgcagtggtcccggggcccctcccttcctgctcatcctggtgtgcacggctccggagaacctgaaccagagaaacgccattcgggcttcgtggggcgggctgcgcgaggcccgggggctcagggtacagacgctattcttgctgggagagccgaacgcacagcaccccgtgtggggttcccaggggagtgacctggcctcggagtcagcagcccagggggatatcttgcaggccgccttccaggactcctaccgcaacctcaccctaaagaccctcagcgggctgaactgggctgagaaacactgccccatggcccgatacgtcctcaagacggacgatgatgtgtatgtcaacgtccctgaactggtatcagagctggtcttgcgagggggccgttgggggcaatgggagagaagcacggaaccccagagagaggctgagcaggaaggaggccaggttttgcacagcgaggaagtgcctcttctgtacttgggccgggtgcactggcgcgtgaacccctctcggacaccggggggcaggcaccgcgtatcagaggagcagtggcctcacacctggggcccctttccaccctatgcctcaggcacggggtatgtgctgtcagcgtctgctgtgcagctcattctcaaggtggccagccgggcaccccttctcccattagaggatgtctttgtgggggtaagtgcccgacgaggaggcctcgccccaacacagtgtgtcaagctggctggtgccacccactacccgctagaccggtgctgctatgggaaattcctgctgacgtcccacaggctggacccctggaagatgcaggaagcctggaagctggtgggtggctctgacggggaaaggactgcgcccttttgctcctggttccagggagtcctgggcatcctgcggtgtcgagcaatagcctggcttcagagctgagagtgcctggggccacaggaaaggcaggaacaggaccttctctctcccaggcccaacgcaggggccctcactggctgcagctgatctgtttccttataccagatcctcagtctcactaaagacagcgatatgggagacacccaggggcctggcccgccagcccaaaagatggtcatcgggaagagaaaaagaaaaaaatgctgcagttgttctctcaagctagggcagaagaggggtgtcaagctcctcaataaacttgtctccacttcaaaaaaaaaaaaaaaaaa

SEQ ID NO: 754 - protein, 378 aa, Homo sapiens
MQLRLFRRLLLAALLLVIVWTLFGPSGLGEELLSLSLASLLPAPASPGPPLALPRLLIPNQEACSGPGAPPFLLILVCTAPENLNQRNAIRASWGGLREARGLRVQTLFLLGEPNAQHPVWGSQGSDLASESAAQGDILQAAFQDSYRNLTLKTLSGLNWAEKHCPMARYVLKTDDDVYVNVPELVSELVLRGGRWGQWERSTEPQREAEQEGGQVLHSEEVPLLYLGRVHWRVNPSRTPGGRHRVSEEQWPHTWGPFPPYASGTGYVLSASAVQLILKVASRAPLLPLEDVFVGVSARRGGLAPTQCVKLAGATHYPLDRCCYGKFLLTSHRLDPWKMQEAWKLVGGSDGERTAPFCSWFQGVLGILRCRAIAWLQS

SEQ ID NO: 755 - DNA, 2065 bp, Homo sapiens
gctgagaagagttttgcacgtggatcgccgttcgggtgggcgagatggagacagcccccaagccgggcaaggatgtcccgcccaagaaagacaaacttcagaccaagagaaagaaaccgcggcgatactgggaggaagagaccgttccgaccacagccggagcctctccagggcctcctcgtaacaagaagaatcgggagctccgtcctcagagaccaaaaaatgcttacatcttaaagaagtctcggatctctaagaagcctcaggtcccgaagaaaccccgagaatggaagaacccggagtcccagcgcggcttgtccggggcccaagatccattcccaggccccgcccccgtccctgtggaagtggtccagaagttctgtcgcattgacaaatcccgaaagctaccacattctaaagccaaaactcgaagccgacttgaggtggctgaagctgaggaagaggaaacaagtatcaaagctgctcgttctgagctgctgcttgctgaagaacctgggtttctggaaggggaggatggggaagacacagcaaagatatgccaggctgacattgtggaggctgtggacattgcaagtgcagccaagcactttgacttgaatctgcggcagtttggaccctacagactaaactactctcgaactggaagacacctggcttttggagggcgccgaggtcatgtggctgcccttgattgggtaacaaagaagcttatgtgcgagatcaacgtcatggaggcggtgcgggacatccggtttctccattctgaggcactgcttgctgttgctcagaaccgctggctccacatctatgacaatcagggcattgagctccactgtatccgccgctgtgaccgagtaacacggcttgagttcctgcccttccacttcctcctggctacagcttcagaaacagggtttctaacctacctggatgtgtcagtggggaagattgtggcagctctgaatgctcgagctgggcggctcgatgttatgagtcagaacccttacaatgccgtcatccatctcggacacagcaatggtactgtgtctttatggagtccagctatgaaggagccactggcaaagattctctgtcatcgtggtggggtccgggctgtggcagtagattctacaggcacgtacatggccacctctggcctagaccaccagctgaagatctttgacttgcgagggacgtaccagcctctgagcactcggaccctgccccatggagcagggcacctggccttctcccagaggggactgctggtggcgggaatgggtgacgttgtcaacatctgggcagggcagggcaaggccagcccaccctcccttgaacagccctacctcacccaccggctctcaggccctgtgcatggccttcagttctgcccctttgaagatgtgctgggggtggggcacactgggggcatcaccagcatgctggtccctggggccggtgagcccaacttcgatggcctggagagtaatccatacagaagccggaagcagcgccaggagtgggaggtgaaggccctgctagagaaggtacctgcagagcttatttgtctggacccacgagccctggccgaggtggatgtcatctccctggagcagggaaagaaggagcagatagagaggctgggctatgacccgcaggctaaggctcccttccagccaaagccaaagcagaagggccgcagctccacggcaagcctggtgaagaggaagaggaaggtcatggatgaggaacacagggacaaggtccggcagagccttcagcagcagcatcataaggaggcgaaggccaagcccacgggggcccggccatctgccctggacagatttgtgcgctgagccagactccagggttgcctgggaacagtctctccccaagatcacctgtagggaaatgagtgttccctggaacaaggaggtgggggcagtgtggccccttccccaactgggggtggacagctgtctcctggggtgggttggtattaaagaggaaagcgattttttggaaaaaaaaaaaaaaaaaaaaa

SEQ ID NO: 756 - protein, 610 aa, Homo sapiens
METAPKPGKDVPPKKDKLQTKRKKPRRYWEEETVPTTAGASPGPPRNKKNRELRPQRPKNAYILKKSRISKKPQVPKKPREWKNPESQRGLSGAQDPFPGPAPVPVEVVQKFCRIDKSRKLPHSKAKTRSRLEVAEAEEEETSIKAARSELLLAEEPGFLEGEDGEDTAKICQADIVEAVDIASAAKHFDLNLRQFGPYRLNYSRTGRHLAFGGRRGHVAALDWVTKKLMCEINVMEAVRDIRFLHSEALLAVAQNRWLHIYDNQGIELHCIRRCDRVTRLEFLPFHFLLATASETGFLTYLDVSVGKIVAALNARAGRLDVMSQNPYNAVIHLGHSNGTVSLWSPAMKEPLAKILCHRGGVRAVAVDSTGTYMATSGLDHQLKIFDLRGTYQPLSTRTLPHGAGHLAFSQRGLLVAGMGDVVNIWAGQGKASPPSLEQPYLTHRLSGPVHGLQFCPFEDVLGVGHTGGITSMLVPGAGEPNFDGLESNPYRSRKQRQEWEVKALLEKVPAELICLDPRALAEVDVISLEQGKKEQIERLGYDPQAKAPFQPKPKQKGRSSTASLVKRKRKVMDEEHRDKVRQSLQQQHHKEAKAKPTGARPSALDRFVR

SEQ ID NO: 757 - DNA, 605 bp, Homo sapiens
attactactgaaggaagaacgtgagtaggccagatcagaaaagggagctcaggtaccttccagagagtgagacccagcgcccttgtctcgcacccagtaggctttcatccccgccatggcggagctgatccagaagaagctacagggagaagtggagaaatatcaacagctacagaaggacttaagtaaatccatgtcggggaggcagaaacttgaagcacaactaacagaaaataatatcgtgaaagaggaactggccctgctggatgggtccaacgtggtctttaaacttctgggtccggtgctagtcaaacaggagctgggggaggctcgggccacagtagggaagaggctggactatatcacagctgaaattaagcgatacgaatcccagcttcgggatcttgagcggcagtcagagcaacagagggagacccttgctcagctgcagcaggagttccagcgggcccaggcagcaaaggcaggggctcctggcaaggcctgaccccatggtggggggaggggaggggaggggagggaatgaggcagctctaggatctatactgtagctaataaaatgtaaaaacacctggcaaaaaaaaaaa

SEQ ID NO: 758 - protein, 129 aa, Homo sapiens
MAELIQKKLQGEVEKYQQLQKDLSKSMSGRQKLEAQLTENNIVKEELALLDGSNVVFKLLGPVLVKQELGEARATVGKRLDYITAEIKRYESQLRDLERQSEQQRETLAQLQQEFQRAQAAKAGAPGKA

SEQ ID NO: 759 - DNA, 2918 bp, Homo sapiens
acggaaaagccggggaggggactcggtccggggccggagaccgacggcaacagcggctcaggacccacgctgcccccacccctcccgagcaggcgcccccatggcccgaccccgctgattccttcactcggccatgctcccgcggcccctgcggctgcttttggacacgagcccccccgggggagtcgtactgagcagcttccgaagccgggaccccgaagagggtgggggcccaggtggcctggtcgtgggcggggggcaggaggaagaggaggaggaagaagaagaggcccctgtgtccgtctgggatgaggaggaggatggtgccgtgtttaccgtcacaagccgccaatatcgacctcttgatcccttggtccctatgcctcccccacgttcctcccgacggctccgagctggcactctggaggccctggtcagacacctactggatacccggacatcagggactgatgtgagcttcatgtcagccttcctggctacccaccgggccttcacctccacgcctgccttgctagggcttatggctgacaggctggaagcccttgaatctcatcctaccgacgaactagagaggacaacagaggtagccatctctgtactgtcaacctggctggcctctcaccctgaggattttggctctgaggccaagggtcagcttgaccggcttgagagcttcttacttcagacagggtatgcagcagggaagggtgttggggggggcagcgctgacctcatccgcaatctccggtcccgggtggacccccaggcccccgaccttcctaagcccctggccctccccggcgatccccctgctgaccccacggatgtcctggtgttcctcgctgaccacttggccgaacagctgaccctgctagatgcggaactttttctcaatttgatcccctctcagtgcctgggaggcctgtggggtcacagagaccggccaggacattctcacctctgcccatctgtccgagctactgtcacacagtttaacaaggtggcaggggcagtggttagttctgtcctgggggctacttccactggagagggacctggggaggtgaccatacggccactccgtcccccacagagggcccggctcctggagaagtggatccgcgtggcagaggagtgccggctgctccgaaacttctcttcagtttatgccgtggtgtcagccctgcagtccagccccatccacaggcttcgggcagcctggggggaagcaaccagggacagcctcagagtcttttccagcctctgccagattttctccgaggaggataattattcccagagtcgggagctgctcgtgcaggaggtgaagctgcagtctcctctggagccacactccaagaaggccccgaggtctggctcccggggtgggggtgtggtcccataccttggcaccttcctgaaggaccttgtgatgctggatgcagcctccaaggatgagttggagaatggatacatcaattttgacaagcggaggaaggagtttgcagtcctttctgagttgcgacggctccagaatgaatgtcgtggctataacctccaacctgaccatgatatccagaggtggctacaggggctccggccactgacagaggctcagagccatcgtgtatcctgtgaggtggagccacctggttccagtgaccctcctgccccacgggtgcttcggccaacattggtcatctcgcagtggacagaggttttgggctctgttggggtccctaccccgcttgtgtcctgtgaccggcccagtactgggggagatgaggcgcctacaactcctgctcctctgctgactcggctggcccagcacatgaagtggccatctgtctcgtcactagactctgccttggaaagcagtccatccctgcacagtccagctgaccccagccacctctccccaccagcctcctcccctaggccttctcgaggtcaccgccgctcagcctcctgtggctccccgctgagtgggggtgcagaagaggcctccggggggactggatatgggggagagggatctgggccaggggcctctgattgccgtatcatccgagtccagatggagttgggggaagatggcagtgtctataagagcattttggtgacaagccaggacaaggctccaagtgtcatcagtcgtgtccttaagaaaaacaatcgtgactctgcagtggcttcagagtatgagctggtacagctgctaccaggggagcgagagctgactatcccagcctcggctaatgtattctacgccatggatggagcttcacacgatttcctcctgcggcagcggcgaaggtcctctactgctacacctggcgtcaccagtggcccgtctgcctcaggaactcctccgagtgagggaggagggggctcctttcccaggatcaaggccacagggaggaagattgcacgggcactgttctgaggaggaagccccgttggcttacagaagtcatggtgttcataccagatgtgggtagccatcctgaatggtggcaattatatcacattgagacagaaattcagaaagggagccagccaccctggggcagtgaagtgccactggtttaccagacagctgagaaatccagccctgtgggaactggtgtcttataaccaagttggatacctgtgtatagcttcccaccttccatgagtgcagcacacaggtagtgctggaaaaacgcatcagtttctgattcttggccatatcctaacatgcaagggccaagcaaaggcttcaaggctctgagccccagggcagaggggaatggcaaaatgtaggtcctcgcaggagctcttcttcccactctgggggtttctatcactgtgacaacactaagataataaaccaaaacactacctgaaaaaaaaaa

SEQ ID NO: 760 - protein, 777 aa, Homo sapiens
MLPRPLRLLLDTSPPGGVVLSSFRSRDPEEGGGPGGLVVGGGQEEEEEEEEEAPVSVWDEEEDGAVFTVTSRQYRPLDPLVPMPPPRSSRRLRAGTLEALVRHLLDTRTSGTDVSFMSAFLATHRAFTSTPALLGLMADRLEALESHPTDELERTTEVAISVLSTWLASHPEDFGSEAKGQLDRLESFLLQTGYAAGKGVGGGSADLIRNLRSRVDPQAPDLPKPLALPGDPPADPTDVLVFLADHLAEQLTLLDAELFLNLIPSQCLGGLWGHRDRPGHSHLCPSVRATVTQFNKVAGAVVSSVLGATSTGEGPGEVTIRPLRPPQRARLLEKWIRVAEECRLLRNFSSVYAVVSALQSSPIHRLRAAWGEATRDSLRVFSSLCQIFSEEDNYSQSRELLVQEVKLQSPLEPHSKKAPRSGSRGGGVVPYLGTFLKDLVMLDAASKDELENGYINFDKRRKEFAVLSELRRLQNECRGYNLQPDHDIQRWLQGLRPLTEAQSHRVSCEVEPPGSSDPPAPRVLRPTLVISQWTEVLGSVGVPTPLVSCDRPSTGGDEAPTTPAPLLTRLAQHMKWPSVSSLDSALESSPSLHSPADPSHLSPPASSPRPSRGHRRSASCGSPLSGGAEEASGGTGYGGEGSGPGASDCRIIRVQMELGEDGSVYKSILVTSQDKAPSVISRVLKKNNRDSAVASEYELVQLLPGERELTIPASANVFYAMDGASHDFLLRQRRRSSTATPGVTSGPSASGTPPSEGGGGSFPRIKATGRKIARALF

SEQ ID NO: 761 - DNA, 3629 bp, Homo sapiens
ctggagaggatctacccgggtccctgcctggccagtggggaaacaccggtcccccaggcaccttcacctaaccagagcggggatttccaccgcccctcatgccgccctttggaggaaagtgaaagtgaaaggaggaagaggaggcttcatggctgaggaggtcgcagcgccatgaagtccctgtctctgctcctcgctgtggctttgggcctggcgaccgccgtctcagcaggacccgcggtgatcgagtgttggttcgtggaggatgcgagcggaaagggcctggccaagagacccggtgcactgctgttgcgccagggaccgggggaaccgccgccccggccggacctcgaccctgagctctatctcagtgtacacgaccccgcgggcgccctccaggctgccttcaggcggtatccccggggcgcccccgcaccacactgcgagatgagccgcttcgtgcctctccccgcctctgcgaaatgggccagcggcctgacccccgcgcagaactgcccgcgggccctggatggggcttggctgatggtcagcatatccagcccagtcctcagcctctccagcctcttgcgaccacagccagagcctcagcaggagcctgttctcatcaccatggcaacagtggtactgactgtcctcacccacacccctgcccctcgagtgagactgggacaagatgctctgctggacttgagctttgcctacatgccccccacctccgaggccgcctcatctctggctccgggtccccctccctttgggctagagtggcgacgccagcacctgggtaagggacatctgctcctggctgcaactcctgggctgaatggccagatgccagcagcccaagaaggggccgtggcatttgctgcttgggatgatgatgagccatggggcccatggaccggaaatgggaccttctggctgcctacagttcaaccctttcaggagggcacctatctggccaccatacacctgccatacctgcaaggacaggtcaccctggagcttgctgtgtacaaaccccccaaagtgtccctgatgccagcaacccttgcacgggccgccccaggggaggcacccccggaattgctctgccttgtgtcccacttctacccttctgggggcctggaggtggagtgggaactccggggtggcccagggggccgctctcagaaggccgaggggcagaggtggctctcggccctgcgccaccattccgatggctctgtcagcctctctgggcacttgcagccgcccccagtcaccactgagcagcatggggcacgctatgcctgtcgaattcaccatcccagcctgcctgcctcggggcgcagcgctgaggtcaccctggaggtagcaggtctttcagggccctcccttgaggacagcgtaggccttttcctgtctgcctttcttctgcttgggctcttcaaggcactgggctgggctgctgtctacctgtccacctgcaaggattcaaagaagaaagcagagtgagggcactcactgccatcctgtggaagccaccatcatctctggcccaagcttctgtagtagctccctaaaataataccctatcatctgctcctaatccctccaatctctctccactgagtggctggaatgcttttttttttttctttcacttatataagggataatttttcttttttttttttttttgagacggagtctcactcttccgcccaggctgcagtgcagtggcatgatcttggcttactgcaacctccgcctcctgggttcaagcaattctgtggcttcagcctccggagtagctgggattacaggcacatgccaccacacccagtgaatttttgtatttttagtagagacggggtttcaccatgttggccaggctggtcttgaattcctgacctcaggtgatctgcccacctcagcctcccaaagtgctgggattacaggcgtgagccaccacaccaggcccgagaaatgcttttttaaaaaacacacatcttatggcattcaccttcttggagctctaggacagtggttctcaaaatttttttctctcaggacctcttaaaaatcatcaaggaccccaaaaagcttttgggtatgtgggttatagctatcaatatttatggtactagaacttaaaagtgagaaaaatttaaaacacgagaatacataggcacacattctattcatcgtgggaaccatggtgtcaatacatatcatgtagcttctgaaaaactccactgtacacttatagaatgaagaaggcaaaaaacttttttttttttttttttgagacggagtctcgctctgtcgcccaggctggagtgcagtggcgcgatctcggctcactgcaagctccgcctctcgggttcacgccattctcctgcctcagcctcccaagtagctcggactacaggcgtcctccaccatgcctggctaatattttgtattttttagtagagacggggtttcaccgtgttagccaggatggtctcgatctcctaacctggtgatccgcccgcctcggcctcccaaagtattgggattacccgcgtgagccaccgcgcccggctgcaaataatctttctttttttctgagacagagtctcgctctgttgcccaggctggagtgcagtggcacgatctcggctcacggcacgctccgcctcccgggttcacgccattctcctgcctcagcttcccgagtagctgggactacaggggcccgccaccacgcccggctaactttttgtgtttttagtagagacggggtttcaccgtgttagccaggatggtctcgatctcctgaccttgtgatctgcccgcctcggcctcccaaagtgctgggattacaggcgtgagccaccgcgcccggcggcgaaacacgatattgtactaacatcttaattttgttataaaatctcacaaaccccctgacatagtctcagagatctgtagggccgaggttacatttggagaacccgtactctagggccaaatccattcttcttgccctggctcacttgtcccccccaccgccccgcgctggagccactgcctagttcttcagccctagatggtgctcgccagacctcctctcaatgctcatcacacacagggctattcctttcctccaatgaaccaaacgcctcccgcccacctccaggtcccagtcctctgttccctttgcctggtccacccttgccctccctgggtcgcagacgaggtcggcctcgtcattccccgcagaccgccgcgcgtccctcttgtgcggttcaccacagttgtatttaagtgatcgtgtgagtcgtcgttaaatgcctgtctccccgcggatcatgggctcctcgaggacagggactggcctgtctgtccactgctgtaaccccgcgccggcatagggacctaaggcccactggagggcgctcatcaagtagctgctggatgttgacgaaggaagcggcggcgcagctcagggatctccgagtcaggacggtcggccagacccacggggtaacgggtctaatcgtgtaggaataaagctgtattccagtgcttccaaaaaaaaaaaaaaaaaaaaaaaaaaaaaaaaaaaaaaaaaaaaaaaa

SEQ ID NO: 762 - protein, 448 aa, Homo sapiens
MKSLSLLLAVALGLATAVSAGPAVIECWFVEDASGKGLAKRPGALLLRQGPGEPPPRPDLDPELYLSVHDPAGALQAAFRRYPRGAPAPHCEMSRFVPLPASAKWASGLTPAQNCPRALDGAWLMVSISSPVLSLSSLLRPQPEPQQEPVLITMATVVLTVLTHTPAPRVRLGQDALLDLSFAYMPPTSEAASSLAPGPPPFGLEWRRQHLGKGHLLLAATPGLNGQMPAAQEGAVAFAAWDDDEPWGPWTGNGTFWLPTVQPFQEGTYLATIHLPYLQGQVTLELAVYKPPKVSLMPATLARAAPGEAPPELLCLVSHFYPSGGLEVEWELRGGPGGRSQKAEGQRWLSALRHHSDGSVSLSGHLQPPPVTTEQHGARYACRIHHPSLPASGRSAEVTLEVAGLSGPSLEDSVGLFLSAFLLLGLFKALGWAAVYLSTCKDSKKKAE

SEQ ID NO: 763 - DNA, 2404 bp, Homo sapiens
ctggagaggatctacccgggtccctgcctggccagtggggaaacaccggtcccccaggcaccttcacctaaccagagcggggatttccaccgcccctcatgccgccctttggaggaaagtgaaagtgaaaggaggaagaggaggcttcatggctgaggaggtcgcagcgccatgaagtccctgtctctgctcctcgctgtggctttgggcctggcgaccgccgtctcagcaggacccgcggtgatcgagtgttggttcgtggaggatgcgagcggaaagggcctggccaagagacccggtgcactgctgttgcgccagggaccgggggaaccgccgccccggccggacctcgaccctgagctctatctcagtgtacacgaccccgcgggcgccctccaggctgccttcaggcggtatccccggggcgcccccgcaccacactgcgagatgagccgcttcgtgcctctccccgcctctgcgaaatgggccagcggcctgacccccgcgcagaactgcccgcgggccctggatggggcttggctgatggtcagcatatccagcccagtcctcagcctctccagcctcttgcgaccacagccagagcctcagcaggagcctgttctcatcaccatggcaacagtggtactgactgtcctcacccacacccctgcccctcgagtgagactgggacaagatgctctgctggacttgagctttgcctacatgccccccacctccgaggccgcctcatctctggctccgggtccccctccctttgggctagagtggcgacgccagcacctgggtaagggacatctgctcctggctgcaactcctgggctgaatggccagatgccagcagcccaagaaggggccgtggcatttgctgcttgggatgatgatgagccatggggcccatggaccggaaatgggaccttctggctgcctacagttcaaccctttcaggagggcacctatctggccaccatacacctgccatacctgcaaggacaggtcaccctggagcttgctgtgtacagtgagttgggggacagaggtctccaggggtagagggtgggcactggattgtggggaccgtaatagggggagggatgatggataagagggtgcctgggcaagtaagtagagatagaaagaggttcctgggagttagaggggtaatgggaggctagaagtttcctggaaatttgaggggctttgacatgggtatttctgtgacgcaccaatggagagacagtgggttccctatttcaggagaagaaacctaaccttctttagttctgaggaagccagcaggcaaactgagggtctcttagggaggacagtatggactgatttccctatgctcatttcgtcctctttccccagaaccccccaaagtgtccctgatgccagcaacccttgcacgggccgccccaggggaggcacccccggaattgctctgccttgtgtcccacttctacccttctgggggcctggaggtggagtgggaactccggggtggcccagggggccgctctcagaaggccgaggggcagaggtggctctcggccctgcgccaccattccgatggctctgtcagcctctctgggcacttgcagccgcccccagtcaccactgagcagcatggggcacgctatgcctgtcgaattcaccatcccagcctgcctgcctcggggcgcagcgctgaggtcaccctggaggtagcaggtaagagctgggagctctgcggaatctgagccagcacccaggaagacaggagctcactctcaccccttctgcctgccaggtctttcagggccctcccttgaggacagcgtaggccttttcctgtctgcctttcttctgcttgggctcttcaaggcactgggctgggctggtaagtgtcagccctaccctgaccatgacctgaggttggtggactttccccacctactcccaagagcctgacacccatccctctgccctccacctctaccactccagcatcccatcccttctcaatctttccccacagctgtctacctgtccacctgcaaggattcaaagaaggtacagtgctccacctctctgtatctttcccttgtcactttatctcctcatcctatctcaaaacccatggagggaggctgctggtgtggtaggcagaacctaggcttggaattcacactgatctgggttaaaacctggcactatatcctaactgtaggactctttgagcatgctacttaatctatatgtttccttgggtgtagggattttaaaaagttacttaggcagtgctgtccaatagaaagataatgcaagccacatatgtaaatttaaatactctagtactcacattaaaaaaataagcagaaacaggtaaaaaaaaaaaaaaaaa

SEQ ID NO: 764 - protein, 299 aa, Homo sapiens
MKSLSLLLAVALGLATAVSAGPAVIECWFVEDASGKGLAKRPGALLLRQGPGEPPPRPDLDPELYLSVHDPAGALQAAFRRYPRGAPAPHCEMSRFVPLPASAKWASGLTPAQNCPRALDGAWLMVSISSPVLSLSSLLRPQPEPQQEPVLITMATVVLTVLTHTPAPRVRLGQDALLDLSFAYMPPTSEAASSLAPGPPPFGLEWRRQHLGKGHLLLAATPGLNGQMPAAQEGAVAFAAWDDDEPWGPWTGNGTFWLPTVQPFQEGTYLATIHLPYLQGQVTLELAVYSELGDRGLQG

SEQ ID NO: 765 - DNA, 1410 bp, Homo sapiens
ctggagaggatctacccgggtccctgcctggccagtggggaaacaccggtcccccaggcaccttcacctaaccagagcggggatttccaccgcccctcatgccgccctttggaggaaagtgaaagtgaaaggaggaagaggaggcttcatggctgaggaggtcgcagcgccatgaagtccctgtctctgctcctcgctgtggctttgggcctggcgaccgccgtctcagcaggacccgcggtgatcgagtgttggttcgtggaggatgcgagcggaaagggcctggccaagagacccggtgcactgctgttgcgccagggaccgggggaaccgccgccccggccggacctcgaccctgagctctatctcagtgtacacgaccccgcgggcgccctccaggctgccttcaggcggtatccccggggcgcccccgcaccacactgcgagatgagccgcttcgtgcctctccccgcctctgcgaaatgggccagcggcctgacccccgcgcagaactgcccgcgggccctggatggggcttggctgatggtcagcatatccagcccagtcctcagcctctccagcctcttgcgaccacagccagagcctcagcaggagcctgttctcatcaccatggcaacagtggtactgactgtcctcacccacacccctgcccctcgagtgagactgggacaagatgctctgctggacttgagctttgcctacatgccccccacctccgaggccgcctcatctctggctccgggtccccctccctttgggctagagtggcgacgccagcacctgggtaagggacatctgctcctggctgcaactcctgggctgaatggccagatgccagcagcccaagaaggggccgtggcatttgctgcttgggatgatgatgagccatggggcccatggaccggaaatgggaccttctggctgcctacagttcaaccctttcaggagggcacctatctggccaccatacacctgccatacctgcaaggacaggtcaccctggagcttgctgtgtacaaaccccccaaagtgtccctgatgccagcaacccttgcacgggccgccccaggggaggcacccccggaattgctctgccttgtgtcccacttctacccttctgggggcctggaggtggagtgggaactccggggtggcccagggggccgctctcagaaggccgaggggcagaggtggctctcggccctgcgccaccattccgatggctctgtcagcctctctgggcacttgcagccgcccccagtcaccactgagcagcatggggcacgctatgcctgtcgaattcaccatcccagcctgcctgcctcggggcgcagcgctgaggtcaccctggaggtagcaggtaagagctgggagctctgcggaatctga

SEQ ID NO: 766 - protein, 412 aa, Homo sapiens
MKSLSLLLAVALGLATAVSAGPAVIECWFVEDASGKGLAKRPGALLLRQGPGEPPPRPDLDPELYLSVHDPAGALQAAFRRYPRGAPAPHCEMSRFVPLPASAKWASGLTPAQNCPRALDGAWLMVSISSPVLSLSSLLRPQPEPQQEPVLITMATVVLTVLTHTPAPRVRLGQDALLDLSFAYMPPTSEAASSLAPGPPPFGLEWRRQHLGKGHLLLAATPGLNGQMPAAQEGAVAFAAWDDDEPWGPWTGNGTFWLPTVQPFQEGTYLATIHLPYLQGQVTLELAVYKPPKVSLMPATLARAAPGEAPPELLCLVSHFYPSGGLEVEWELRGGPGGRSQKAEGQRWLSALRHHSDGSVSLSGHLQPPPVTTEQHGARYACRIHHPSLPASGRSAEVTLEVAGKSWELCGI

SEQ ID NO: 767 - DNA, 1980 bp, Homo sapiens
agataaggaattgtataggaggaaacttcatagtaaacattgaacctctgtgcttgtctccttgttgaagttgggggttcatgtttattgttccaagggagcctcatcaaaaccacttttaaagcattgagaatccaaataaataccatggatcatacaggattggggataagtcttgaggtctccccgagaaggagaagttctttaatttggtaattttagggtaatggttggatgctctctggattaatggaaaccttcaggggtacttttaggcagagtataacccagtgaagagagcattattatatggtggaatgcgagagtctcagcctgaagcagaaattcctctccaagacaccactgcagaagcattcacaatgctactcaaatatatctacactgggcgggcaacgctgacagatgagaaggaggaggtgctgctggactttttgagcctggctcataaatatggatttccagagctagaggattctacctctgagtatctctgcaccatacttaacattcagaatgtctgcatgacttttgatgttgccagtctctactcacttcccaagttaacttgtatgtgctgcatgtttatggataggaatgctcaggaagtcctctcaagtgaaggtttcctctccctttctaagacagcacttttaaacatcgtgttaagagactcatttgcagctcccgaaaaagatattttcctagccttattaaactggtgtaagcacaattcaaaggagaatcatgctgaaatcatgcaggctgtgcgtttacctctcatgagcctcacagagcttctgaatgttgtgaggccttcaggactgctgtctcctgatgccatcctggatgccattaaagtgcgatctgagagccgggatatggacctcaattatagaggcatgctcataccagaagaaaacattgcaactatgaagtatggagcccaagttgtaaagggggagctgaaatcagccttattagatggtgatactcaaaattatgatttggatcatggattttcaaggcacccaattgatgatgactgccgttccggcatcgagattaagctaggtcagccatccgttatcaatcacatacggatactcttgtgggaccgagatagccggtcttactcatacttcattgaagtgtcaatggatgaacttgattgggtcagagtgatagatcattcacaatatctgtgtcgttcttggcagaaattatattttccagcccgtgtctgcaggtatattcgaattgttgggactcacaacacagtgaacaagatttttcacattgtggcttttgaatgtatgtttacaaacaaaaccttcactcttgagaaggggctgatagttcccatggagaatgttgcaacaattgctgattgtgccagtgtgattgaaggagtcagtcggagccgaaatgccttgctgaatggggacactaagaattatgactgggattctggctacacatgtcaccagctaggaagtggtgcgattgtggttcagttggcacaaccgtacatgattgggtcaatacggttactactttgggattgtgatgatcgaagctatagctactacgttgaggtttctaccaaccagcaacagtggaccatggttgctgacagaactaaagtctcctgcaagtcctggcagtcagtaacttttgaaaggcagcctgcctccttcatccgtatcgttgggacacacaacacagcaaatgaggtgttccactgtgtccactttgagtgtccagagcagcagagcagccagaaggaggaaaatagtgaggaatcggggacaggggacaccagcctggccggtcagcagctcgactcccatgcgctgcgggcgcctagtggcagctcactaccctccagcccaggctccaactcacgctcccccaaccggcagcaccaataaaggaggcagcgggcctggtgtgacttgg

SEQ ID NO: 768 - protein, 544 aa, Homo sapiens
MRESQPEAEIPLQDTTAEAFTMLLKYIYTGRATLTDEKEEVLLDFLSLAHKYGFPELEDSTSEYLCTILNIQNVCMTFDVASLYSLPKLTCMCCMFMDRNAQEVLSSEGFLSLSKTALLNIVLRDSFAAPEKDIFLALLNWCKHNSKENHAEIMQAVRLPLMSLTELLNVVRPSGLLSPDAILDAIKVRSESRDMDLNYRGMLIPEENIATMKYGAQVVKGELKSALLDGDTQNYDLDHGFSRHPIDDDCRSGIEIKLGQPSVINHIRILLWDRDSRSYSYFIEVSMDELDWVRVIDHSQYLCRSWQKLYFPARVCRYIRIVGTHNTVNKIFHIVAFECMFTNKTFTLEKGLIVPMENVATIADCASVIEGVSRSRNALLNGDTKNYDWDSGYTCHQLGSGAIVVQLAQPYMIGSIRLLLWDCDDRSYSYYVEVSTNQQQWTMVADRTKVSCKSWQSVTFERQPASFIRIVGTHNTANEVFHCVHFECPEQQSSQKEENSEESGTGDTSLAGQQLDSHALRAPSGSSLPSSPGSNSRSPNRQHQ

SEQ ID NO: 769 - DNA, 5703 bp, Homo sapiens
gacagtcgcggatcctgtgacacctccgggcagcccggcacttgttgctcccacgacctgttgtcattcccttaacccggctttccccgtggccccccgcctcctcccggcttcgctccttttcatgtgagcatctgggacactgatctctcagaccccgctgctcgggctggagaatagatggttttgtgaaaaattaaacaccgccctgaagaggagccccgctgggcagcggcaggagcgcagagtgctggcccaggtgctgcagaggtggcgcctccccggcccgggacggtagccccgggcgccaacggcatgacagactcggcgacagctaacggggacgacagggaccccgagatcgagctctttgtgaaggctggaatcgatggagaaagcatcggcaactgtcctttctctcagcgcctcttcatgatcctctggctgaaaggagtcgtgttcaatgtcaccactgtggatctgaaaagaaagccagctgacctgcacaacctagcccccggcacgcacccgcccttcctgaccttcaacggggacgtgaagacagacgtcaataagatcgaggagttcctggaggagaccttgacccctgaaaagtaccccaaactggctgcaaaacaccgggaatccaacacagcgggcatcgacatcttttccaagttttctgcctacatcaaaaataccaagcagcagaacaatgctgctcttgaaagaggcctaaccaaggctctaaagaaattggatgactacctgaacacccctctaccagaggagattgacgccaacacttgtggggaagacaaggggtcccggcgcaagttcctggatggggatgagctgaccctggctgactgcaatctgttgcccaagctccatgtggtcaagattgtggccaagaaataccgcaactatgatatcccggctgagatgacaggcctgtggcggtacctcaagaacgcctatgcccgtgatgagttcaccaacacctgtgcagctgacagtgagatcgagttggcctacgctgatgtcgccaaacgcctcagccgatcctgagcacagccattttgccccatccccgctgcagaaggactcaaccactcccctaagactccagcttcatagactcctctgtatcactgccttgaggcgcactttttataatcaagcctcatcttgctggtatcatgggaactccagcctgctatctttcatgaaggtcagcaccatccctggcctcctcacataggaatctagcagaaatgatagacacagtccacctttcggccggccagcctgatctgggctcagcatgtttggggtcagtcagtgttggagagcccacatatgggattgccactagcttcttctgccaatatcaaaataccttctcagatgctttagaaacatgcaacaccaactccttttctaccctcctctccgtccatacctacaaggccaaggacaaacgccatcttcatccttcttagaaagagatctattaccccattaggggagacagagagagtgaatggaggagtaccgagctggctatggacttgggtgtctggcaaacacagcttcagtctcactacttctgacactctggttattgggcactaagggccagactggaaagtcacttgagacacattctcagtttgttgcagtgccaggaatgctgcgctgctgctgctgcgcacctggcccatgctgtccctggcttccatgccgtccaggccctgccagaaaaggaaattggcatgcaattctaaactgcagtgactgggatgggaggggaggggagcagtgttgatgccaaaatacccacggggtctaccagccatggggtttgcttgcttaggagtagttgtttcagaggtgattacaggcctgggtttgactgtgcttaccaatgagtggtttttgagctatgagaaagtggatgggagtgggaggaggagagatgggtgaagacaaaagagttctttatgagcctcgatgttccctggtaaacttttaaaaaggccttctctcatgatctaagtcttggactggtggcatcatgtaactgctaaccttacagtaaaaacccaagaatgggtcaaaaatgtcttcccagtttctccaagctgcttctggaatgcaggtctgtcggctgggtgctctccagcagctgctcctgcctgattcaactgtagcctgtaatgggtaaaagccacatttaggaggtggtctgatcatagaacaccttaggaagaaagtccatgagactttctgactaggaaaccatgtggtttgaacttgaagaaaaatgtagacccatctgggttaattttcctacaatctgactcaactgccaggtgaaaaaaaaaaggaaaaatttttaagctaatatttcactcttttgtcattctccttaagtttcatctcctaaaaagcttacccagcctgagcttggggacctgtgcagaggaaactaagaaaaatgcactcatcaactccttctcccagtgaacgcccggtgagaaaatccatttgccacaggcccttaccttcaacaatcccccttctatagtgttcgctggtaaagggtgaggctcccaagtgctggaaagcccctggacttggctcatttctcagcaagggcaggatagcacgggtcctttccatagaaatatcaacaaattctaacccaagcaatccctggacctacctgcctccagggatctctgaagaaaaaaagtaacccattgatcaaatcagaggagaggaagcaggaggtctcctagagcccattgaggaagaggaactttctcagtaggacactttataagcctgagaaagctttgaaaaggcggaatgagttgattcatttccacctcaaaaggaacctttccaggtccccctggaaattgtgccctggagatgtttaacaaggagaactggtgaggaaagagtccttttttactgtagggaaaagccccaaactggcctcctgggggatgagggctgaaatgatcccgaaggccttttaattagtgtgaaatcctgctgtactcagaaatccttccccgaatttacagcacaggcaggatgacctaagaggcagtttacttccctgagacccacagttgggctgttctggaaacacatctgtgaatcatagccaattgccacagagaaaacagaaccaagcctccggtgaggccactccaccccagagaagtctgcagaattccaaggactcggattggatgttcagaattcagcaactggaaagtccttaaaaacaaacaggccaaaccaaatcaatattgctgtttctagatgtcccttctgtggttgagctagttttacagagataaatatattaagacaaggaggtgggggtgttatatgatcaatgatagccatttgaaagagagggaggagtacagaaggaaggcacttctgggtacttaattcagaaatttctttatatttcagcactggattatcatataatgcaagtgactatggactaagagttagttatggtgtcttatgactagatttattatggtatattaaagtaacaataatattaatattaccttcctttttttttttgtttcaaaagagatctttctccagatgcttcagcctgtctggccttcttatcatatgtgcagcacatcatgtctcagcaacagtgtggtgaggtccttaggtgtcccaagaacaactcagggagcacgggagggtctgcagttgggaccccacaactatacagctatagggtaggaggcttccttttcattggtcctgaatgaatacaaatcgctcagaaagcattttggtggcacagaaaggggatgtatttgtgttgagatcttattttattttgtatttatttatcttctttgacttgcacagcactattgggggtgggggaagcagggtagtgggagacgaaggcagaagcaagagtcaaactcagaatgactgagttgaattcactgtctagtcagcaatgcctgcttctgagtttggcccagagagaaggtattgagtaagattttaataactgtaaaaagtaagctggataagtaaaatcatgatggatccaaagcacagtttcttcatctcctgataaagaaagtcaaatgcttgataaattcagagtcacagatgtgagcatagctatattcttttaaacgagaggtagagtgacctagcactaagcaaatgagctgaaatgtcggaaacagagtccatcagcttatttggccacacgatcccaaactagttttatcttgggaaatggccctgtcctcagcattcccttcttgtgctggtggggccagtgaagtcttgatcttatcagaaaaaggccacaccaagtgcgagttttcccaggctgactttccaggcccttatcaaatgaaacaacagaagctcttcacagttctgtgccccatggccactccacagacagacaataccaagcatcttagaactgtcataagataggtcatgcctgaaatagatcttgaccatatgagagtcccagaaatcagcaaggcctggacaaatagaactaagagagaggcagaggcaggaagctgcgggtctatcttgtaaagagtttagcatcactgtgagagtgtgtgtctaaaattaaattaaactagaagcagcaggtgagtatttggtaagtacttctgtgactcgcctcaattcccactggccaggggccatctcaactgcacggtgaatcaagatgctggtgtcatcctccttggaaaaaggaaatgttaactcatggttaaaactaagtacaatgattcccaagggatcactttcttatttttttaaatgacattaaggagaatcttaagaaagcatcagagaaagacatgtgcatgtgaagcaccctgattctgatgttaggaaaacttaagcgaacaggacctgctgcacacagccccattgtcttctatccatttctctttatcattcaaatcaagcaacatgtgccctcctcatcaacacacattcttcccctttgtcagtatgcatctcccagcttagtgtcaggatactttcgattcataattatgtatgatccaaagtgtgcataatttcatttaacgttaaagaaatagatccaattcctttcttgcaaccaaaaataaataaaatacgttgcctcaatataaggtttgggctattctgtgtttctatagaagcaatctgtttttggtaaaatgtacttttaaggatccagtcatctgaagtattttatgtagagttagagatttcacaatattgactatacatatatttaaaatataaattatccagctgatgtttgaatttgtcttactttcctggccacctcgttgtcctattttataagctggggagttaactagcttaacaaaagatgcttagcttttgtaaaagaacaagtgtttcattttacaaagacactccaaatgatagttacttgattttctcgagacctttaactatggtgatgaataacaggacttgctttcaagccttaataaatgtaaaatgccttttaatgaagatacagctgagtgttttcctcatgaatctgaaccaattaccaatttgtgttccagtcttgattggtattgactgattcaaataaagttggtttattttcaaatatta

SEQ ID NO: 770 - protein, 251 aa, Homo sapiens
MTDSATANGDDRDPEIELFVKAGIDGESIGNCPFSQRLFMILWLKGVVFNVTTVDLKRKPADLHNLAPGTHPPFLTFNGDVKTDVNKIEEFLEETLTPEKYPKLAAKHRESNTAGIDIFSKFSAYIKNTKQQNNAALERGLTKALKKLDDYLNTPLPEEIDANTCGEDKGSRRKFLDGDELTLADCNLLPKLHVVKIVAKKYRNYDIPAEMTGLWRYLKNAYARDEFTNTCAADSEIELAYADVAKRLSRS

SEQ ID NO: 771 - DNA, 1373 bp, Homo sapiens
atgtttgcctccagaacacatgctgctaaaaccacccctaaaagccaaaatgcaaaggaagagattcttaacagcattattgttattggacacatagatctgggaaagtccatgactactggccatctgatccccaaatgtgattgtatcaacaaaagaaccatttaaaaattttagaaggaggctgctgaggtgcaaaagtgttcccttaaaggtgtctgggtcttacataaactgaaagctgagcatgaatgcgatatcaccattgaaatctccttgtggaattttgagatcagcaactactatgtcactgtcattgacaccccaagaaacagagactttatcaaaaacatgattacaggaggatctcaggcaaattcaaagctgctgtctccaaggatgagccaacctgtgatcatgcccttcttggttacactgtgggtgtgaaacaattgttggctttaataaaatggatttcgctgagccaccctatagccaggagagatatgaggagatcattaaggaagtcagcacttatattaagaagactggctacaaacttgacatagtagcatttgtgctaatttctggttggaatgttaataacgtgctggaactgcgatggttaaaagggatggagagccacctgaaagatgtcagtgccagtggaactacactgcctcaagctctggacgaccaactcttccaactaacaagcccttctatctgcctctccaagatgtctacaaaattggttgtattgatattgtccctgtgggcctagtggagacatgttctcaagcccagcatggtggtcatctttgctccagtcaatgttacaactgaagtaaagtctgctaaaatgcaacatgaatcttttgagtgaagccttttctggggacaatatgggcttcaatgtcaaaaatgtgtctgtcaaagatatttgttgtgacaatgttgctggtggcagcaaaaatgacctgcaaatggaagcagctggattcactgctcaggtgattatcctgaacaagccagaccaaatcactggtggctatgtccctgtactggattgccacacagctcacattgtttgcacgtctgctgagctgaaggaaaagattgaatactattctggtaataagctggaagatggccctaaattcttgaaatctgatgatgctgccattgttgatatggttcctgacaagcccatgtgtgttgacagcctctctgactattctcttctgggtcgttttgctgttcatgatatgagatagacagttactactggtgtcatcaaagcagtggacaagaaagcttctgaagctgtcaaagtcaccaagtctacccagaagcctcagaaggctaaatga

SEQ ID NO: 772 - DNA, 2798 bp, Homo sapiens
gccctctcccacagcggagtccaaaacaggcctaccagtcagttcttatttctattgggtgtttccatgctccaccatgttaagagctaagaatcagctttttttactttcacctcattacctgaggcaggtaaaagaatcatcaggctccaggctcatacagcaacgacttctacaccagcaacagccccttcacccagaatgggctgccctggctaaaaagcagctgaaaggcaaaaacccagaagacctaatatggcacaccccggaagggatctctataaaacccttgtattccaagagagatactatggacttacctgaagaacttccaggagtgaagccattcacacgtggaccatatcctaccatgtatacctttaggccctggaccatccgccagtatgctggttttagtactgtggaagaaagcaataagttctataaggacaacattaaggctggtcagcagggattatcagttgcctttgatctggcgacacatcgtggctatgattcagacaaccctcgagttcgtggtgatgttggaatggctggagttgctattgacactgtggaagataccaaaattctttttgatggaattcctttagaaaaaatgtcagtttccatgactatgaatggagcagttattccagttcttgcaaattttatagtaactggagaagaacaaggtgtacctaaagagaaacttactggtaccatccaaaatgatatactaaaggaatttatggttcgaaatacatacatttttcctccagaaccatccatgaaaattattgctgacatatttgaatatacagcaaagcacatgccaaaatttaattcaatttcaattagtggataccatatgcaggaagcaggggctgatgccattctggagctggcctatactttagcagatggattggagtactctagaactggactccaggctggcctgacaattgatgaatttgcaccaaggttgtctttcttctggggaattggaatgaatttctatatggaaatagcaaagatgagagctggtagaagactctgggctcacttaatagagaaaatgtttcagcctaaaaactcaaaatctcttcttctaagagcacactgtcagacatctggatggtcacttactgagcaggatccctacaataatattgtccgtactgcaatagaagcaatggcagcagtatttggagggactcagtctttgcacacaaattcttttgatgaagctttgggtttgccaactgtgaaaagtgctcgaattgccaggaacacacaaatcatcattcaagaagaatctgggattcccaaagtggctgatccttggggaggttcttacatgatggaatgtctcacaaatgatgtttatgatgctgctttaaagctcattaatgaaattgaagaaatgggtggaatggccaaagctgtagctgagggaatacctaaacttcgaattgaagaatgtgctgcccgaagacaagctagaatagattctggttctgaagtaattgttggagtaaataagtaccagttggaaaaagaagacgctgtagaagttctggcaattgataatacttcagtgcgaaacaggcagattgaaaaacttaagaagatcaaatccagcagggatcaagctttggctgaacattgtcttgctgcactaaccgaatgtgctgctagcggagatggaaatatcctggctcttgcagtggatgcatctcgggcaagatgtacagtgggagaaatcacagatgccctgaaaaaggtatttggtgaacataaagcgaatgatcgaatggtgagtggagcatatcgccaggaatttggagaaagtaaagagataacatctgctatcaagagggttcataaattcatggaacgtgaaggtcgcagacctcgtcttcttgtagcaaaaatgggacaagatggccatgacagaggagcaaaagttattgctacaggatttgctgatcttggttttgatgtggacataggccctcttttccagactcctcgtgaagtggcccagcaggctgtggatgcggatgtgcatgctgtgggcgtaagcaccctcgctgctggtcataaaaccctagttcctgaactcatcaaagaacttaactcccttggacggccagatattcttgtcatgtgtggaggggtgataccacctcaggattatgaatttctgtttgaagttggtgtttccaatgtatttggtcctgggactcgaattccaaaggctgccgttcaggtgcttgatgatattgagaagtgtttggaaaagaagcagcaatctgtataatatcctctttttgttttagcttttgtctaaaatattattttagttatgatcaaagaagagagtaaagctatgtcttcaatttaatttcaatacctgatttgtactttccttgaaagctttactttaaaataccttacttataggcctggtgtcatgctataagtatgtacatacagtttcacttcaaaaataaaaaaaaatccctaaaaactctctatactctctataacaatactttatcaagaactctggacaatggtattatttttaaaaatcatggtgatgtatttattagaatgtttcttataaatctctttcatttttatattaagaattaaactgtacctaaaaaaactctgactattcccatttctcagtttagcattacattgtcttgagcaccagaaaataaaatccatatattaattaaaacctatcttgaaaaaaaaaaaaaaaaaaaaaaaaaaaa

SEQ ID NO: 773 - protein, 750 aa, Homo sapiens
MLRAKNQLFLLSPHYLRQVKESSGSRLIQQRLLHQQQPLHPEWAALAKKQLKGKNPEDLIWHTPEGISIKPLYSKRDTMDLPEELPGVKPFTRGPYPTMYTFRPWTIRQYAGFSTVEESNKFYKDNIKAGQQGLSVAFDLATHRGYDSDNPRVRGDVGMAGVAIDTVEDTKILFDGIPLEKMSVSMTMNGAVIPVLANFIVTGEEQGVPKEKLTGTIQNDILKEFMVRNTYIFPPEPSMKIIADIFEYTAKHMPKFNSISISGYHMQEAGADAILELAYTLADGLEYSRTGLQAGLTIDEFAPRLSFFWGIGMNFYMEIAKMRAGRRLWAHLIEKMFQPKNSKSLLLRAHCQTSGWSLTEQDPYNNIVRTAIEAMAAVFGGTQSLHTNSFDEALGLPTVKSARIARNTQIIIQEESGIPKVADPWGGSYMMECLTNDVYDAALKLINEIEEMGGMAKAVAEGIPKLRIEECAARRQARIDSGSEVIVGVNKYQLEKEDAVEVLAIDNTSVRNRQIEKLKKIKSSRDQALAEHCLAALTECAASGDGNILALAVDASRARCTVGEITDALKKVFGEHKANDRMVSGAYRQEFGESKEITSAIKRVHKFMEREGRRPRLLVAKMGQDGHDRGAKVIATGFADLGFDVDIGPLFQTPREVAQQAVDADVHAVGVSTLAAGHKTLVPELIKELNSLGRPDILVMCGGVIPPQDYEFLFEVGVSNVFGPGTRIPKAAVQVLDDIEKCLEKKQQSV

SEQ ID NO: 774 - DNA, 1678 bp, Homo sapiens
gatgacaagggcaaaggcgttagaagtcaccaccgacccagcccctcaacagcaagttggttcttcagcattaagatccaggtgtcagcctatgtctttatattgtcaagatgtctctttctaagaagttgactttagacaaactggatgttagagggaagcgagtcatcatgagagtagacttcaatgttcccatgaagaagaaccagattacaaacaaccagaggatcaaggcttccatcccaagcatcaagtactgcctggacaatggagccaaggcagtagttcttatgagtcatctaggtcggcctgatggtgttcccatgcctgacaaatattccttagcacctgttgctgttgagctcaaatccttgctgggcaaggatgttctgttcctgaaggactgtgtaggcgcagaagtggagaaagcctgtgccaacccagctcctggttcagtcatcctgctggagaacctgcgctttcatgtggaggaagaagggaagggccaagatccctctggaaagaagattaaagctgagccagataaaatagaagccttccgagcatcactttccaagctaggggacgtctatgtcaatgatgcttttggcactgcacaccgcgctcatagttccatggtgggagtgaatctgccccataaagcatccggattcttgatgaagaaggaactagattactttgctaaagccttggaaaacccagtgagaccctttctggctatacttggtggagccaaagtggcagacaagatccaacttatcaaaaatatgctggacaaagtcaatgagatgattattggtggtggaatggcttataccttccttaaggtactcaacaacatggagattggtgcttccctgtttgatgaagagggagccaagatcgttaaagatatcatggccaaagcacaaaagaatggtgtaaggattacttttcctgttgattttgttactggggacaagtttgacgagaacgctcaggttggaaaagccactgtagcatctggcatatctcctggctggatgggtttggactgtggtcctgagagcaacaagaatcatgctcaagttgtggctcaagcaaggctaattgtttggaatgggccgttaggagtatttgaatgggatgcctttgctaagggaaccaaagccctcatggatgaaattgtgaaagccacttccaagggctgcatcactgttatagggggtggagacactgctacttgctgtgccaaatggaacactgaagataaagtcagccatgtcagcactggaggcggtgccagtctagagcttctggaaggtaaaatccttcctggagtagaggccctcagcaacatgtagttaatatagtgttacttccttctgttttctgtccatggcccttaagtcagcttaatgcttttacatctcgatgtgacttttgttaaaatctactcctagatcaagacctatgtaatggacaagcagcaggccatcaggaactcttaatatcagcacagcaattcattttagtttggtcacgcatttgcctgttcaagttctcatttgaacttcaccattgtgctatctagggaggacatattcttaagttgcctattaaagaaagtgagctgaagaaactgaaaaaaaaaaaaaaaaaaaaaaaaaaaaaaaaa

SEQ ID NO: 775 - protein, 417 aa, Homo sapiens
MSLSKKLTLDKLDVRGKRVIMRVDFNVPMKKNQITNNQRIKASIPSIKYCLDNGAKAVVLMSHLGRPDGVPMPDKYSLAPVAVELKSLLGKDVLFLKDCVGAEVEKACANPAPGSVILLENLRFHVEEEGKGQDPSGKKIKAEPDKIEAFRASLSKLGDVYVNDAFGTAHRAHSSMVGVNLPHKASGFLMKKELDYFAKALENPVRPFLAILGGAKVADKIQLIKNMLDKVNEMIIGGGMAYTFLKVLNNMEIGASLFDEEGAKIVKDIMAKAQKNGVRITFPVDFVTGDKFDENAQVGKATVASGISPGWMGLDCGPESNKNHAQVVAQARLIVWNGPLGVFEWDAFAKGTKALMDEIVKATSKGCITVIGGGDTATCCAKWNTEDKVSHVSTGGGASLELLEGKILPGVEALSNM

SEQ ID NO: 776 - DNA, 1892 bp, Homo sapiens
ttaaaagcacaaatacactacatagagaaaggcttggttcttatcaggacacaaatttaaaggctgtgtggacttggggatggaaattaaacacctcttgtttttggttgctgctgcttgcttactgcctatgttgtccatgaaaaagaaatcagctagagaccaatttaataagctcgtcaccgacttgccaaatgtacaagaagagatcgttaatatacacaacgccctcaggagaagagtagttccaccagccagcaacatgctgaagatgagttggagtgaagaggctgcacaaaatgccagaattttttcaaagtattgtgatatgacagagagcaacccccttgagaggagacttccaaataccttttgtggagaaaatatgcatatgacatcttatcctgtatcatggtcaagtgtaattggagtctggtacagtgagtctacaagtttcaaacatggagaatggacaacaacggatgatgacataactactgaccactacactcagattgtttgggccacatcttacctgattggctgtgccattgcatcttgccgccaacaaggatcacctcgatatctctacgtttgtcactattgtcatgagggaaatgatcctgaaacaaagaatgaaccttataagacaggcgtcccatgtgaagcctgcccaagtaactgtgaagacaaactttgcactaacccctgcatctactatgatgaatacttcgactgtgacatacaagtccattatctgggatgcaaccactcaacaactatcctattctgtaaagccacttgtctgtgtgacactgagataaaataggtctttgttattttcaactgttctatgctgtgacgatgaggaggagatgtctgttggattcatgtcttttgctatagttcagtagcttctgctaaatttcactgattttaatcatgctggagaccttaactcccatcctgatacatcctgaagtaacactgttttaaactttcttagtgctggagtaaaaggtcaagtccaacacctgccttaaatttaaatcatgtgatttatagtttttaagttggcataattcaacttatggtataactgggtccctcaacagtaacctgggctaaaataggtcttatgtggttcaactcccacccccgccttccccatattttcaaccactctgattatcttccctgcacaactaacatccagtaataattcttcacttttaaaattttacttctactttaaatcaatcattaaaggaatccacaaagcaaacagagttcagtctcatcttgcaaggtaaatatcatttaattggaagtagtttaaatgtctcattgttttattgacacatctatatatacatttgtgaagcaagaaacaataaaaaagcttcgtatgccattaatttaacaaaatatgtattcagtactgattgcatacaagatgcatgtttatatatatggaaggaatatagtttcatttcattgcaaaggcagtataaaagatatataaaatagcataatatgagaaattaagtccctaaagacatataggtcacatattattattgccagatgagcataaatagcttctgtttggagattcaggaaagccttagggtggaatgaggaacatcttctgagtaaacagggttgcaaaggttatgattatttcaacacaatggaagagcacagttaaggccaactaacgtaaaatgcactgaagccttagggaatattgaagggcctgacatggggaaagggaaggctaaaaatacttggtcaaattttaacattataccaaagttatacccagttctacctacttgtatatttctttactcatttcaataaagtgtttgaaaaaaaaaaaaaaaaaa

SEQ ID NO: 777 - protein, 249 aa, Homo sapiens
MEIKHLLFLVAAACLLPMLSMKKKSARDQFNKLVTDLPNVQEEIVNIHNALRRRVVPPASNMLKMSWSEEAAQNARIFSKYCDMTESNPLERRLPNTFCGENMHMTSYPVSWSSVIGVWYSESTSFKHGEWTTTDDDITTDHYTQIVWATSYLIGCAIASCRQQGSPRYLYVCHYCHEGNDPETKNEPYKTGVPCEACPSNCEDKLCTNPCIYYDEYFDCDIQVHYLGCNHSTTILFCKATCLCDTEIK

SEQ ID NO: 778 - DNA, 1803 bp, Homo sapiens
ttaaaagcacaaatacactacatagagaaaggcttggttcttatcaggacacaaatttaaaggctgtgtggacttggggatggaaattaaacacctcttgtttttggttgctgctgcttgcttactgcctatgttgtccatgaaaaagaaatcagctagagaccaatttaataagctcgtcaccgacttgccaaatgtacaagaagagatcgttaatatacacaacgccctcaggagaagagtagttccaccagccagcaacatgctgaagatgagttggagtgaagaggctgcacaaaatgccagaattttttcaaagtattgtgatatgacagagagcaacccccttgagaggagacttccaaataccttttgtggagaaaatatgcatatgacatcttatcctgtatcatggtcaagtgtaattggagtctggtacagtgagtctacaagtttcaaacatggagaatggacaacaacggatgatgacataactactgaccactacactcagattgtttgggccacatcttacctgattggctgtgccattgcatcttgccgccaacaaggatcacctcgatatctctacgtttgtcactattgtcatgactaacccctgcatctactatgatgaatacttcgactgtgacatacaagtccattatctgggatgcaaccactcaacaactatcctattctgtaaagccacttgtctgtgtgacactgagataaaataggtctttgttattttcaactgttctatgctgtgacgatgaggaggagatgtctgttggattcatgtcttttgctatagttcagtagcttctgctaaatttcactgattttaatcatgctggagaccttaactcccatcctgatacatcctgaagtaacactgttttaaactttcttagtgctggagtaaaaggtcaagtccaacacctgccttaaatttaaatcatgtgatttatagtttttaagttggcataattcaacttatggtataactgggtccctcaacagtaacctgggctaaaataggtcttatgtggttcaactcccacccccgccttccccatattttcaaccactctgattatcttccctgcacaactaacatccagtaataattcttcacttttaaaattttacttctactttaaatcaatcattaaaggaatccacaaagcaaacagagttcagtctcatcttgcaaggtaaatatcatttaattggaagtagtttaaatgtctcattgttttattgacacatctatatatacatttgtgaagcaagaaacaataaaaaagcttcgtatgccattaatttaacaaaatatgtattcagtactgattgcatacaagatgcatgtttatatatatggaaggaatatagtttcatttcattgcaaaggcagtataaaagatatataaaatagcataatatgagaaattaagtccctaaagacatataggtcacatattattattgccagatgagcataaatagcttctgtttggagattcaggaaagccttagggtggaatgaggaacatcttctgagtaaacagggttgcaaaggttatgattatttcaacacaatggaagagcacagttaaggccaactaacgtaaaatgcactgaagccttagggaatattgaagggcctgacatggggaaagggaaggctaaaaatacttggtcaaattttaacattataccaaagttatacccagttctacctacttgtatatttctttactcatttcaataaagtgtttgaaaaaaaaaaaaaaaaaa

SEQ ID NO: 779 - protein, 178 aa, Homo sapiens
MEIKHLLFLVAAACLLPMLSMKKKSARDQFNKLVTDLPNVQEEIVNIHNALRRRVVPPASNMLKMSWSEEAAQNARIFSKYCDMTESNPLERRLPNTFCGENMHMTSYPVSWSSVIGVWYSESTSFKHGEWTTTDDDITTDHYTQIVWATSYLIGCAIASCRQQGSPRYLYVCHYCHD

SEQ ID NO: 780 - DNA, 4438 bp, Homo sapiens
aaagtggctgaatgagaaatgtagattgcagagggcaactggtgtgtttatatgcctgacattatttgggttttcccccctcaggcagaagctgaggaagattgtcattctgatactgtcagagcagatgatgatgaagaaaatgaaagtcctgctgaaacagatctgcaggcacaactccagatgttccgagctcagtggatgtttgaacttgctccaggtgtaagctctagcaatttagaaaatcgaccttgcagagcagcaagaggctctctccagaaaacatcggcagataccaaaggaaaacaagaacaggcaaaagaagaaaaggctcgagaactcttcctaaaagcagtagaagaagaacaaaatggagctctctatgaagccatcaagttttatcgtagggctatgcaacttgtacctgatatagagttcaagattacttatacccggtctccagatggtgatggcgttggaaacagctacattgaagataatgatgatgacagcaaaatggcagatctcttgtcctacttccagcagcaactcacatttcaggagtctgtgcttaaactgtgtcagcctgagcttgagagcagtcagattcacatatcagtgctgccaatggaggtcctgatgtacatcttccgatgggtggtgtctagtgacttggacctcagatcattggagcagttgtcgctggtgtgcagaggattctacatctgtgccagagaccctgaaatatggcgtctggcctgcttgaaagtttggggcagaagctgtattaaacttgttccgtacacgtcctggagagagatgtttttagaacggcctcgtgttcggtttgatggcgtgtatatcagtaaaaccacatatattcgtcaaggggaacagtctcttgatggtttctatagagcctggcaccaagtggaatattacaggtacataagattctttcctgatggccatgtgatgatgttgacaacccctgaagagcctcagtccattgttccacgtttaagaactaggaataccaggactgatgcaattctactgggtcactatcgcttgtcacaagacacagacaatcagaccaaagtatttgctgtaataactaagaaaaaagaagaaaaaccacttgactataaatacagatattttcgtcgtgtccctgtacaagaagcagatcagagttttcatgtggggctacagctatgttccagtggtcaccagaggttcaacaaactcatctggatacatcattcttgtcacattacttacaaatcaactggtgagactgcagtcagtgcttttgagattgacaagatgtacacccccttgttcttcgccagagtaaggagctacacagctttctcagaaaggcctctgtagagcctcaagtccagtcctctatcacttttgcatgaattaaagtatatagcgcaaaagagcacctaagttataaatgtgtgtgtgtgcgtgtgtgtgtatatatatatatatatatatatatatatatatatatatatatatatatggaattggaacttattttaaattgttggagttcttttaagaagaatataaattgattattttttttatttaaagggatagttgattcctggggtgttttgaaattaagttggaattaagttgcttaagcatatttatgttgtgagaaaccttaatatgaggtttatcatgccctttttcaagcagatttatgagcagatttctgtcacataagtcgtcttctgcttgagtatcctaatatttcaatgcatcaggggagcgctccactggataagcattttatttcccgcatggcataatgtttttgcactaaaggctcaaagtgtgagaacctgttctggatttgtttgaaattatttcaccaataaagatcataaataaatgtttctttcaagaaaatatatttggatggcctttttaaagtaacaggatatttaataagagtcctagatagccagcggagactttaagaatcattgcctctagctgggtgtggtggcatgcacctgtagtcccagctatttgggaggctgatgcaggagaatagcttaagcccaggaatttgagtctgggagtttgagtccagcatgggcaacataacaagaccccatcccttattaaaagaaaaaaaaataattcctcatttcatcattggtctttatatgtagccacaaacactgacctcatgtaggcaccttaccaatatatgacattaagtgagagtgaatcccttaggactggaacacttcaagctcaaccaactgactcagttgtcattcttcacaaaagaatagtagaggatcatgtaaacctgagcctaactcttgttccagtatgaaagttgggggagagcaccagccacctaggaaaactgtatgttacctttttactcaaaggagtcccccctgcccagtaacagtcctattagtgtttaatttcagagtttgtgtctggtagacctctacctgattcagatttggttttgttgtttcaaccatagttagagacaaattctcatgtactttcagaaatcaatatctgcagccactgttacttttaattgacattaagagacacttcataggttcccacaattcagtatgggataggctttttaaaaagcacatacagaccaggcgtggtggctcatgcctataatcccagcactttgggaggctaagacaggcagatcacctgagctcaggagtccaagaccagcctgggcaacatggcaaaacaccgtctctacaaaaaaaaaaaaaaaaaaaattagccaagtacagtggggcacacctatagtcgcagctacttgggaggctggggcaggagaattgcctgagcctgggaagtggaagttgcagtgagccaagatcgtgccattccactccagcctgagcaacacagtgagaccctatctcaaaaaaataatgatgatagtacacgttatgttaaaggtgaaatgtgcatacagaaggaagagagttggccaggtgtggtgactcacacctataatcccaatactttgggaggccaaggcaggaggattgcttgaggtcaggagttttagaccagcctggacaacatagcaagacctcatctcttctaaaaattaaaaaaaaaaaaaataggcatggtggtacacacctgtggtcccagctagttgggaggctaaggcaggaggatcacttagccaggaggctgaggctacagtgagccaagattgcaccactgtgctccagcctgggtgagaaagcgagaccctgtctcaaaaaagaaaaaaaagagaggttggccttttgtagcaatctgagaagtgtgtttttcaagttggaaaggaaggagaaaagcaacttgcctaagataaggtagctcttcatgatatgactgttatttctgatatacaaataaatagaacatgattaggacatagtcaaatatagctagaaaaatatattcctaaggaaagtgagatttgaggagtccctgttgttctgcaacatccctagattgaatgatctgttgcagatggtggataccaagttcaaatttaaagatttctttgtaagcagtaaagtgactttcacttatttaacttagaactggaaaaagtaacttttttccagattacattttctgtatatttgtaaaatgcaaaagcaatatatatttgttgtgagaaaattagaatatacagataaaataaaatttaaaaaaacacccaaagataaccagaagaaaatttttgctatgtaacctttttcttctggtctttgcaaatcctgccgtagaaactttttaacttcaggagtgtccttcctttgctctattaggacattacagaaaccaatactatgaaaagctgacagcagtatctggattaactttttaaaaacaatgaaagcattttacagaaattacatttcagatcgtgctggaactgtgttcagaagatatcctcagagggaatctggcctgagcaccatcatgtttaattgcctcctcctgtcttgcattttcctcccagcccccttcctaccccttagcagagggccaggtgagggtgcttggggcccatgggggctgggagtgtagacttcagttacacccccagcccccaggggaaagcattagccttgaatcctcaatcccaggccctctactaaccactctcaacctatggtatttatcttttgattattctgtgcatctataaaaatgggattatattgtacagaatgctttgtaagctttctctccccacataagaatgccctgtaagcattttgttaaatatttttaatgactttagagtccaactttatactcctctttacgcattttggttttctaatttaatggtagtgtaaacgtttttggaataaacattcctgtggctaaa

SEQ ID NO: 781 - protein, 447 aa, Homo sapiens
MPDIIWVFPPQAEAEEDCHSDTVRADDDEENESPAETDLQAQLQMFRAQWMFELAPGVSSSNLENRPCRAARGSLQKTSADTKGKQEQAKEEKARELFLKAVEEEQNGALYEAIKFYRRAMQLVPDIEFKITYTRSPDGDGVGNSYIEDNDDDSKMADLLSYFQQQLTFQESVLKLCQPELESSQIHISVLPMEVLMYIFRWVVSSDLDLRSLEQLSLVCRGFYICARDPEIWRLACLKVWGRSCIKLVPYTSWREMFLERPRVRFDGVYISKTTYIRQGEQSLDGFYRAWHQVEYYRYIRFFPDGHVMMLTTPEEPQSIVPRLRTRNTRTDAILLGHYRLSQDTDNQTKVFAVITKKKEEKPLDYKYRYFRRVPVQEADQSFHVGLQLCSSGHQRFNKLIWIHHSCHITYKSTGETAVSAFEIDKMYTPLFFARVRSYTAFSERPL

SEQ ID NO: 782 - DNA, 4688 bp, Homo sapiens
gtccggggtctccagtagggctgacgctccggtgctcgcacaatcccccgcctcggctggcaacgggcgtccctccactccccgagtccccggcagccgccgccaccccagcgcgccccgatctggccccctgccccgcgaagatggctgccgtacgccgggcccgcagttattgccgctgcctggtgcgcttctccgaccgagaactctgctaagctccgctgcagagacaggcaggagtagacacccggacacccagcacccctcctccggggggcggtgcagagggggcacggagagcccctcgagcgcagcaggccgccccgccagcatggcagaagctgaggaagattgtcattctgatactgtcagagcagatgatgatgaagaaaatgaaagtcctgctgaaacagatctgcaggcacaactccagatgttccgagctcagtggatgtttgaacttgctccaggtgtaagctctagcaatttagaaaatcgaccttgcagagcagcaagaggctctctccagaaaacatcggcagataccaaaggaaaacaagaacaggcaaaagaagaaaaggctcgagaactcttcctaaaagcagtagaagaagaacaaaatggagctctctatgaagccatcaagttttatcgtagggctatgcaacttgtacctgatatagagttcaagattacttatacccggtctccagatggtgatggcgttggaaacagctacattgaagataatgatgatgacagcaaaatggcagatctcttgtcctacttccagcagcaactcacatttcaggagtctgtgcttaaactgtgtcagcctgagcttgagagcagtcagattcacatatcagtgctgccaatggaggtcctgatgtacatcttccgatgggtggtgtctagtgacttggacctcagatcattggagcagttgtcgctggtgtgcagaggattctacatctgtgccagagaccctgaaatatggcgtctggcctgcttgaaagtttggggcagaagctgtattaaacttgttccgtacacgtcctggagagagatgtttttagaacggcctcgtgttcggtttgatggcgtgtatatcagtaaaaccacatatattcgtcaaggggaacagtctcttgatggtttctatagagcctggcaccaagtggaatattacaggtacataagattctttcctgatggccatgtgatgatgttgacaacccctgaagagcctcagtccattgttccacgtttaagaactaggaataccaggactgatgcaattctactgggtcactatcgcttgtcacaagacacagacaatcagaccaaagtatttgctgtaataactaagaaaaaagaagaaaaaccacttgactataaatacagatattttcgtcgtgtccctgtacaagaagcagatcagagttttcatgtggggctacagctatgttccagtggtcaccagaggttcaacaaactcatctggatacatcattcttgtcacattacttacaaatcaactggtgagactgcagtcagtgcttttgagattgacaagatgtacacccccttgttcttcgccagagtaaggagctacacagctttctcagaaaggcctctgtagagcctcaagtccagtcctctatcacttttgcatgaattaaagtatatagcgcaaaagagcacctaagttataaatgtgtgtgtgtgcgtgtgtgtgtatatatatatatatatatatatatatatatatatatatatatatatatggaattggaacttattttaaattgttggagttcttttaagaagaatataaattgattattttttttatttaaagggatagttgattcctggggtgttttgaaattaagttggaattaagttgcttaagcatatttatgttgtgagaaaccttaatatgaggtttatcatgccctttttcaagcagatttatgagcagatttctgtcacataagtcgtcttctgcttgagtatcctaatatttcaatgcatcaggggagcgctccactggataagcattttatttcccgcatggcataatgtttttgcactaaaggctcaaagtgtgagaacctgttctggatttgtttgaaattatttcaccaataaagatcataaataaatgtttctttcaagaaaatatatttggatggcctttttaaagtaacaggatatttaataagagtcctagatagccagcggagactttaagaatcattgcctctagctgggtgtggtggcatgcacctgtagtcccagctatttgggaggctgatgcaggagaatagcttaagcccaggaatttgagtctgggagtttgagtccagcatgggcaacataacaagaccccatcccttattaaaagaaaaaaaaataattcctcatttcatcattggtctttatatgtagccacaaacactgacctcatgtaggcaccttaccaatatatgacattaagtgagagtgaatcccttaggactggaacacttcaagctcaaccaactgactcagttgtcattcttcacaaaagaatagtagaggatcatgtaaacctgagcctaactcttgttccagtatgaaagttgggggagagcaccagccacctaggaaaactgtatgttacctttttactcaaaggagtcccccctgcccagtaacagtcctattagtgtttaatttcagagtttgtgtctggtagacctctacctgattcagatttggttttgttgtttcaaccatagttagagacaaattctcatgtactttcagaaatcaatatctgcagccactgttacttttaattgacattaagagacacttcataggttcccacaattcagtatgggataggctttttaaaaagcacatacagaccaggcgtggtggctcatgcctataatcccagcactttgggaggctaagacaggcagatcacctgagctcaggagtccaagaccagcctgggcaacatggcaaaacaccgtctctacaaaaaaaaaaaaaaaaaaaattagccaagtacagtggggcacacctatagtcgcagctacttgggaggctggggcaggagaattgcctgagcctgggaagtggaagttgcagtgagccaagatcgtgccattccactccagcctgagcaacacagtgagaccctatctcaaaaaaataatgatgatagtacacgttatgttaaaggtgaaatgtgcatacagaaggaagagagttggccaggtgtggtgactcacacctataatcccaatactttgggaggccaaggcaggaggattgcttgaggtcaggagttttagaccagcctggacaacatagcaagacctcatctcttctaaaaattaaaaaaaaaaaaaataggcatggtggtacacacctgtggtcccagctagttgggaggctaaggcaggaggatcacttagccaggaggctgaggctacagtgagccaagattgcaccactgtgctccagcctgggtgagaaagcgagaccctgtctcaaaaaagaaaaaaaagagaggttggccttttgtagcaatctgagaagtgtgtttttcaagttggaaaggaaggagaaaagcaacttgcctaagataaggtagctcttcatgatatgactgttatttctgatatacaaataaatagaacatgattaggacatagtcaaatatagctagaaaaatatattcctaaggaaagtgagatttgaggagtccctgttgttctgcaacatccctagattgaatgatctgttgcagatggtggataccaagttcaaatttaaagatttctttgtaagcagtaaagtgactttcacttatttaacttagaactggaaaaagtaacttttttccagattacattttctgtatatttgtaaaatgcaaaagcaatatatatttgttgtgagaaaattagaatatacagataaaataaaatttaaaaaaacacccaaagataaccagaagaaaatttttgctatgtaacctttttcttctggtctttgcaaatcctgccgtagaaactttttaacttcaggagtgtccttcctttgctctattaggacattacagaaaccaatactatgaaaagctgacagcagtatctggattaactttttaaaaacaatgaaagcattttacagaaattacatttcagatcgtgctggaactgtgttcagaagatatcctcagagggaatctggcctgagcaccatcatgtttaattgcctcctcctgtcttgcattttcctcccagcccccttcctaccccttagcagagggccaggtgagggtgcttggggcccatgggggctgggagtgtagacttcagttacacccccagcccccaggggaaagcattagccttgaatcctcaatcccaggccctctactaaccactctcaacctatggtatttatcttttgattattctgtgcatctataaaaatgggattatattgtacagaatgctttgtaagctttctctccccacataagaatgccctgtaagcattttgttaaatatttttaatgactttagagtccaactttatactcctctttacgcattttggttttctaatttaatggtagtgtaaacgtttttggaataaacattcctgtggctaaa

SEQ ID NO: 783 - protein, 437 aa, Homo sapiens
MAEAEEDCHSDTVRADDDEENESPAETDLQAQLQMFRAQWMFELAPGVSSSNLENRPCRAARGSLQKTSADTKGKQEQAKEEKARELFLKAVEEEQNGALYEAIKFYRRAMQLVPDIEFKITYTRSPDGDGVGNSYIEDNDDDSKMADLLSYFQQQLTFQESVLKLCQPELESSQIHISVLPMEVLMYIFRWVVSSDLDLRSLEQLSLVCRGFYICARDPEIWRLACLKVWGRSCIKLVPYTSWREMFLERPRVRFDGVYISKTTYIRQGEQSLDGFYRAWHQVEYYRYIRFFPDGHVMMLTTPEEPQSIVPRLRTRNTRTDAILLGHYRLSQDTDNQTKVFAVITKKKEEKPLDYKYRYFRRVPVQEADQSFHVGLQLCSSGHQRFNKLIWIHHSCHITYKSTGETAVSAFEIDKMYTPLFFARVRSYTAFSERPL

SEQ ID NO: 784 - DNA, 4565 bp, Homo sapiens
ctccagtctgtctgtgctctcaaaaactttagtcgttataacaactgtgactgttgagaaatttcactgttttcctgcattcctggcgcgggactctagccagaggctccgaggactttgtagcgactgtcccaagcgtccagttcgatgcttctcagggcggcttgctttaagggcccacccctaaatttgggttgtaaaaatttttgaggcagaagctgaggaagattgtcattctgatactgtcagagcagatgatgatgaagaaaatgaaagtcctgctgaaacagatctgcaggcacaactccagatgttccgagctcagtggatgtttgaacttgctccaggtgtaagctctagcaatttagaaaatcgaccttgcagagcagcaagaggctctctccagaaaacatcggcagataccaaaggaaaacaagaacaggcaaaagaagaaaaggctcgagaactcttcctaaaagcagtagaagaagaacaaaatggagctctctatgaagccatcaagttttatcgtagggctatgcaacttgtacctgatatagagttcaagattacttatacccggtctccagatggtgatggcgttggaaacagctacattgaagataatgatgatgacagcaaaatggcagatctcttgtcctacttccagcagcaactcacatttcaggagtctgtgcttaaactgtgtcagcctgagcttgagagcagtcagattcacatatcagtgctgccaatggaggtcctgatgtacatcttccgatgggtggtgtctagtgacttggacctcagatcattggagcagttgtcgctggtgtgcagaggattctacatctgtgccagagaccctgaaatatggcgtctggcctgcttgaaagtttggggcagaagctgtattaaacttgttccgtacacgtcctggagagagatgtttttagaacggcctcgtgttcggtttgatggcgtgtatatcagtaaaaccacatatattcgtcaaggggaacagtctcttgatggtttctatagagcctggcaccaagtggaatattacaggtacataagattctttcctgatggccatgtgatgatgttgacaacccctgaagagcctcagtccattgttccacgtttaagaactaggaataccaggactgatgcaattctactgggtcactatcgcttgtcacaagacacagacaatcagaccaaagtatttgctgtaataactaagaaaaaagaagaaaaaccacttgactataaatacagatattttcgtcgtgtccctgtacaagaagcagatcagagttttcatgtggggctacagctatgttccagtggtcaccagaggttcaacaaactcatctggatacatcattcttgtcacattacttacaaatcaactggtgagactgcagtcagtgcttttgagattgacaagatgtacacccccttgttcttcgccagagtaaggagctacacagctttctcagaaaggcctctgtagagcctcaagtccagtcctctatcacttttgcatgaattaaagtatatagcgcaaaagagcacctaagttataaatgtgtgtgtgtgcgtgtgtgtgtatatatatatatatatatatatatatatatatatatatatatatatatggaattggaacttattttaaattgttggagttcttttaagaagaatataaattgattattttttttatttaaagggatagttgattcctggggtgttttgaaattaagttggaattaagttgcttaagcatatttatgttgtgagaaaccttaatatgaggtttatcatgccctttttcaagcagatttatgagcagatttctgtcacataagtcgtcttctgcttgagtatcctaatatttcaatgcatcaggggagcgctccactggataagcattttatttcccgcatggcataatgtttttgcactaaaggctcaaagtgtgagaacctgttctggatttgtttgaaattatttcaccaataaagatcataaataaatgtttctttcaagaaaatatatttggatggcctttttaaagtaacaggatatttaataagagtcctagatagccagcggagactttaagaatcattgcctctagctgggtgtggtggcatgcacctgtagtcccagctatttgggaggctgatgcaggagaatagcttaagcccaggaatttgagtctgggagtttgagtccagcatgggcaacataacaagaccccatcccttattaaaagaaaaaaaaataattcctcatttcatcattggtctttatatgtagccacaaacactgacctcatgtaggcaccttaccaatatatgacattaagtgagagtgaatcccttaggactggaacacttcaagctcaaccaactgactcagttgtcattcttcacaaaagaatagtagaggatcatgtaaacctgagcctaactcttgttccagtatgaaagttgggggagagcaccagccacctaggaaaactgtatgttacctttttactcaaaggagtcccccctgcccagtaacagtcctattagtgtttaatttcagagtttgtgtctggtagacctctacctgattcagatttggttttgttgtttcaaccatagttagagacaaattctcatgtactttcagaaatcaatatctgcagccactgttacttttaattgacattaagagacacttcataggttcccacaattcagtatgggataggctttttaaaaagcacatacagaccaggcgtggtggctcatgcctataatcccagcactttgggaggctaagacaggcagatcacctgagctcaggagtccaagaccagcctgggcaacatggcaaaacaccgtctctacaaaaaaaaaaaaaaaaaaaattagccaagtacagtggggcacacctatagtcgcagctacttgggaggctggggcaggagaattgcctgagcctgggaagtggaagttgcagtgagccaagatcgtgccattccactccagcctgagcaacacagtgagaccctatctcaaaaaaataatgatgatagtacacgttatgttaaaggtgaaatgtgcatacagaaggaagagagttggccaggtgtggtgactcacacctataatcccaatactttgggaggccaaggcaggaggattgcttgaggtcaggagttttagaccagcctggacaacatagcaagacctcatctcttctaaaaattaaaaaaaaaaaaaataggcatggtggtacacacctgtggtcccagctagttgggaggctaaggcaggaggatcacttagccaggaggctgaggctacagtgagccaagattgcaccactgtgctccagcctgggtgagaaagcgagaccctgtctcaaaaaagaaaaaaaagagaggttggccttttgtagcaatctgagaagtgtgtttttcaagttggaaaggaaggagaaaagcaacttgcctaagataaggtagctcttcatgatatgactgttatttctgatatacaaataaatagaacatgattaggacatagtcaaatatagctagaaaaatatattcctaaggaaagtgagatttgaggagtccctgttgttctgcaacatccctagattgaatgatctgttgcagatggtggataccaagttcaaatttaaagatttctttgtaagcagtaaagtgactttcacttatttaacttagaactggaaaaagtaacttttttccagattacattttctgtatatttgtaaaatgcaaaagcaatatatatttgttgtgagaaaattagaatatacagataaaataaaatttaaaaaaacacccaaagataaccagaagaaaatttttgctatgtaacctttttcttctggtctttgcaaatcctgccgtagaaactttttaacttcaggagtgtccttcctttgctctattaggacattacagaaaccaatactatgaaaagctgacagcagtatctggattaactttttaaaaacaatgaaagcattttacagaaattacatttcagatcgtgctggaactgtgttcagaagatatcctcagagggaatctggcctgagcaccatcatgtttaattgcctcctcctgtcttgcattttcctcccagcccccttcctaccccttagcagagggccaggtgagggtgcttggggcccatgggggctgggagtgtagacttcagttacacccccagcccccaggggaaagcattagccttgaatcctcaatcccaggccctctactaaccactctcaacctatggtatttatcttttgattattctgtgcatctataaaaatgggattatattgtacagaatgctttgtaagctttctctccccacataagaatgccctgtaagcattttgttaaatatttttaatgactttagagtccaactttatactcctctttacgcattttggttttctaatttaatggtagtgtaaacgtttttggaataaacattcctgtggctaaa

SEQ ID NO: 785 - protein, 403 aa, Homo sapiens
MFRAQWMFELAPGVSSSNLENRPCRAARGSLQKTSADTKGKQEQAKEEKARELFLKAVEEEQNGALYEAIKFYRRAMQLVPDIEFKITYTRSPDGDGVGNSYIEDNDDDSKMADLLSYFQQQLTFQESVLKLCQPELESSQIHISVLPMEVLMYIFRWVVSSDLDLRSLEQLSLVCRGFYICARDPEIWRLACLKVWGRSCIKLVPYTSWREMFLERPRVRFDGVYISKTTYIRQGEQSLDGFYRAWHQVEYYRYIRFFPDGHVMMLTTPEEPQSIVPRLRTRNTRTDAILLGHYRLSQDTDNQTKVFAVITKKKEEKPLDYKYRYFRRVPVQEADQSFHVGLQLCSSGHQRFNKLIWIHHSCHITYKSTGETAVSAFEIDKMYTPLFFARVRSYTAFSERPL

SEQ ID NO: 786 - DNA, 1815 bp, Homo sapiens
atggatgattcctacatgatggttcctatgaggagaaaacgatcacagtgtgatttagcccagatggtgcaagcaattgaggaatatgatggaagtacgcaatgtgaaattgatatagatgagtgtgcttcacatccctgcaaaaatggagccacctgcattgaccaacctggtaattacttctgccagtgtgtgcctccatttaaagtgttcaactttgatggtatttcttcaacttcagttcaggaattttatcactgtgaatttggaccttgcaaagctagtgattcttgtgagaatggagctgtgcgtggagagaaaatggatttggaaatgtttccccttgagttccggtgccagtgtgccagcttttcaggtccacgctgtgagatcaatgtcaatgagtgcagttccagcccttgcctgcatggatattgctatgacatggttgatggcttttcctgcttatgcaatccaggctatgttgggataagatgtgaacaggacattgatgactgcatcctgaatgcctgtgagcacaattctacctgcaaagacctgcatctcagctaccagtgtgtgtgcctatctgattgggaaggaaatttttgtgaacaagaatccaatgagtgtaaaatgaatccttgcaagaacaattccacctgtactgacctttacaaaagctatcgatgtgagtgtacatctggatggactggacagaactgtagtgaagaaataaatgaatgcgactctgatccatgcatgaatggaggtctttgtcatgaatctaccatccctggacaatttgtatgtctgtgcccacccctttatactggacaattttgccaccaacgctataacctttgtgacctacttcataacccttgcagaaacaactcaacatgcttagctttggtagacgcaaatcagcattgtatttgtagagaagaatttgaaggtaaaaactgtgaaattgatgtgaaagactgcctcttcctttcctgccaggattatggtgactgtgaagatatggtcaacaatttcagacctgggttttctggatctctgtgtgaaattgaaattaatgaatgttcctctgaaccttgcaaaaataatggaacatgtgtggatctgacaaacagatttttttgtaattgtgaacctgagtaccatgggcccttctgtgaacttgatgtaaataaatgtaaaatctcaccttgtctagatgaagaaaattgtgtctacaggactgatggatacaactgcctctgtgcccctggttatacaggcatcaactgtgaaataaatctagatgaatgcctatcagagccctgtctccatgatggagtttgtatcgatggcatcaatcattatacctgtgactgcaagagtgggttttttggaacacactgtgaaacaaacgccaatgattgcctttcaaatccttgtctacatggaaggtgcacagaacttattaatgaatatccatgttcatgtgatgcagatgggactagcacacaatgtaagatcaaaattaatgactgcacatcaatcccttgtatgaatgaaggcttctgtcagaagtcagcacatggatttacttgcatttgcccacgtggatacactggtgcatactgtgaaaaaagcattgataattgtgctgagcctgaacttaattcagtcatctgtcttaatggagggatctgtgttgatgggcctggacatacttttgactgcaggaaagcctgcttatacaactgtgataatgcaaaaacaagacaggaatctaaagagttaaataagcagcaagactaa

SEQ ID NO: 787 - protein, 604 aa, Homo sapiens
MDDSYMMVPMRRKRSQCDLAQMVQAIEEYDGSTQCEIDIDECASHPCKNGATCIDQPGNYFCQCVPPFKVFNFDGISSTSVQEFYHCEFGPCKASDSCENGAVRGEKMDLEMFPLEFRCQCASFSGPRCEINVNECSSSPCLHGYCYDMVDGFSCLCNPGYVGIRCEQDIDDCILNACEHNSTCKDLHLSYQCVCLSDWEGNFCEQESNECKMNPCKNNSTCTDLYKSYRCECTSGWTGQNCSEEINECDSDPCMNGGLCHESTIPGQFVCLCPPLYTGQFCHQRYNLCDLLHNPCRNNSTCLALVDANQHCICREEFEGKNCEIDVKDCLFLSCQDYGDCEDMVNNFRPGFSGSLCEIEINECSSEPCKNNGTCVDLTNRFFCNCEPEYHGPFCELDVNKCKISPCLDEENCVYRTDGYNCLCAPGYTGINCEINLDECLSEPCLHDGVCIDGINHYTCDCKSGFFGTHCETNANDCLSNPCLHGRCTELINEYPCSCDADGTSTQCKIKINDCTSIPCMNEGFCQKSAHGFTCICPRGYTGAYCEKSIDNCAEPELNSVICLNGGICVDGPGHTFDCRKACLYNCDNAKTRQESKELNKQQD

SEQ ID NO: 788 - DNA, 5218 bp, Homo sapiens
ggataacaacttacagaggccaaatgacataggatgaaggctgttcgtaacctgctgatttatatattttccacctatctcctggttatgtttggatttaatgctgcccaagacttctggtgttcaactttggtgaagggagtcatttatggatcgtattctgtaagtgaaatgtttcctaaaaactttacaaactgcacttggacgctggaaaatccagatccaaccaaatatagcatttacctgaaattttccaaaaaggaccttagctgctctaacttttcactcctggcttatcagtttgatcatttttcccatgaaaaaataaaggatcttttaagaaagaatcattctataatgcaactctgcaattccaagaatgctttcgtttttctacagtatgataaaaattttattcaaatacgtcgagtatttccaactaatttcccaggattacagaaaaaaggggaagaagatcagaaatctttttttgagtttttggtattgaacaaggtcagcccaagccagtttggttgccatgtattatgtacttggttggagagctgcttaaaatcagaaaatgggagaacagaatcatgtgggatcatgtatacaaaatgcacctgccctcagcatttgggagagtgggggatcgacgaccagtcgctgattttgttaaataacgtggtgttacccctgaatgagcagacagagggctgcctgacccaggagctgcaaaccacccaagtctgcaatcttaccagggaggccaagcgaccacccaaagaagaatttggaatgatgggagatcatacaattaaaagtcagcgacctcgatctgttcatgaaaaaagggtccctcaggaacaagctgatgctgctaaatttatggcacaaactggtgaatctggtgtggaagagtggtcccagtggagcacatgttcggttacttgtggtcaagggtcgcaggtgcgaaccagaacttgtgtatcaccttacgggacacactgcagcggcccattaagagaatcaagggtttgcaataacactgccctctgtccagtacacggagtatgggaggaatggtcaccatggagtttatgttcatttacatgtggtcgaggccaaagaacaagaacaaggtcatgcacacctcctcagtatggaggaaggccgtgtgaaggacctgaaacacatcataagccttgtaatattgctctttgcccagttgatggacagtggcaagagtggagttcgtggagccagtgctcagtaacgtgctcgaatgggactcagcagagaagccggcagtgcactgcagctgcccatggaggctccgaatgcagagggccatgggcagaaagcagagagtgctataaccctgaatgtacagccaatggtcaatggaatcagtggggtcattggagtggttgttccaagtcctgtgatggcggctgggaaaggcgaataaggacctgtcagggtgcagtgataacagggcagcaatgtgaaggaacgggcgaagaagtgagaagatgcagtgagcagcgatgccctgcaccttatgaaatatgccctgaggattatctgatgtcgatggtgtggaaaagaactccagcaggcgacttggcattcaatcaatgtcccctgaatgccacaggcaccactagcagacgctgctctctcagtcttcatggagtggccttctgggaacagccgagctttgcaagatgcatatcaaatgagtacagacacttgcagcattcaattaaagagcaccttgctaaggggcagcgaatgctggcaggtgatggaatgtcccaggtgaccaagacactgttggatttaactcagagaaaaaatttctatgcaggcgatcttctgatgtctgtggagatcctgagaaatgtgacagacacatttaaaagggcaagttacatccctgcatctgatggtgtccagaacttctttcaaatagttagcaaccttctagatgaagaaaacaaggaaaaatgggaagatgcacaacagatttatccagggtcaatagagttaatgcaggtgattgaagattttatacacattgttggaatggggatgatggactttcagaattcatacttaatgactggaaatgtagtggctagtattcagaagcttcctgcagcctctgttctaacagacatcaactttccaatgaaaggacggaagggaatggttgactgggcaagaaactcagaagatagggtagtaattccaaaaagcattttcactccggtgtcatcaaaagaattagatgaatcatctgtatttgttcttggcgcagtcctatacaaaaacttagatctaattttgcccactttgagaaattatactgtcattaattccaaaatcatcgtggtcacaataaggcctgaacccaaaacaaccgattcgtttctggagatagaactagctcatttggctaatggtactttgaatccctattgtgtattgtgggatgactccaaaacgaacgagtctttgggaacgtggtccacccagggatgtaaaactgtgcttaccgatgcatcccatacgaaatgcttatgtgatcgtctctctaccttcgccattttggctcagcaacctagagaaataatcatggaatcctctggcacaccttcagttaccctaatagtaggcagtggtctttcttgcttggccttgattaccctagcagttgtctatgcagcattatggaggtacatacgctctgagagatccataatactaattaacttctgcctgtctatcatctcatccaatatcctcatactggttggacagactcagacacataataagagtatctgcacaaccaccactgcatttttgcactttttcttcctggcttcattctgttgggttttgactgaggcgtggcaatcatatatggctgtaactggaaaaattaggacacggcttataagaaaacgctttttgtgccttggatggggtttaccagcattagtagtggccacatcagtaggcttcaccagaacaaaaggatatggcactgatcactactgctggctctctcttgaaggaggactactctatgcttttgtgggacctgcagccgctgttgtcctggtcaacatggtgattggcattttggtatttaataaacttgtttccagagatggaatcctagataaaaagctcaaacacagagccggtcagatgagtgagcctcatagcggtttgacgctcaaatgtgccaagtgtggagtagtttcaacaacagctttgtcagccaccaccgccagtaacgccatggcgtctctttggagctcctgtgtggtgttgccccttctggctttgacgtggatgtctgcggttctggccatgacagataaacgctccatattgtttcaaatactttttgctgtgtttgattcattgcaaggctttgttatagtcatggtccactgcattcttcggagagaggttcaggatgcatttagatgccgattgagaaactgtcaggatcccatcaatgcagattcttcgagttcgtttcctaatgggcatgctcaaatcatgacagactttgaaaaggatgtagacattgcctgtcgatcagttcttcataaggatattggtccttgccgagcagccacaataacaggaacactttctaggatttctctaaatgatgatgaagaagaaaagggaacaaaccctgaagggctaagctattcaacattgcctggaaatgtcatttccaaagtcatcatccagcaacccacaggtttgcacatgcccatgagtatgaatgagcttagcaatccatgtttgaaaaaagaaaatagtgaattgcggagaactgtgtacttatgtacggatgataatttgagaggggctgacatggacatagtccatcctcaagaaagaatgatggaaagtgactatattgtgatgcccagaagttctgtaaataaccagccttcaatgaaagaagaaagcaaaatgaatattggcatggaaaccttgccacatgaaaggctattgcactacaaagtaaaccctgaattcaatatgaatccccctgtaatggaccagttcaatatgaacttagagcaacatctcgcaccccaggaacatatgcagaatttgccctttgaacctcgcacagctgtgaagaatttcatggcctctgagttggatgataatgcaggactatcaagaagtgaaactggatcaacgatatcaatgagttctttagagagaagaaaatcacgatattcagaccttgactttgagaaggtcatgcatacaaggaagaggcatatggaactatttcaagaactaaatcagaaatttcaaactttggacagatttcgggatataccaaatacaagcagtatggaaaaccccgcaccaaacaagaatccatgggacactttcaaaaaccccagtgaatacccgcattacaccacaatcaatgtcttagacacagaggcaaaggatgctttggaactgaggccagcagagtgggagaagtgtctgaatttgcctctggatgtgcaagagggtgactttcaaacagaagtttaaaaaaatcaaaatggactaaggtagagacaaaactttattgcactgacacttaagacttgggaagcctgacatttctatctggacagtgtgactatcttatgtcaggaccttcatgtgccaaacgtcagtggtgttttcatatggtaacttctcactagtcaggctagtggagagatgaccaggtgtacagttctgaccatcctgtgttgtaagtacccgtggaatggatttgtaaggtaatctttatagataaacctcaagcaacgattcatgttgtaaccgcttcatatggtttagttttcaaaaaacttcaccatgaagcacaatgtatatatttatgcagtttttaaagtttataacagtctgtttggccattactacactttttactttataatataaaagcaaagtttttgtcattaaatgaatgtttgttgagctacattcttcattgctttaaatgcaataaagtaataatctcacttttatatgaataatatatttcacatctttattattgcagttttctctagaaagctctgagaagctttctctgctgcagctgtgtataaaatatttaaaatgttgtatggtgtaaataaacttttgtctacat

SEQ ID NO: 789 - protein, 1522 aa, Homo sapiens
MKAVRNLLIYIFSTYLLVMFGFNAAQDFWCSTLVKGVIYGSYSVSEMFPKNFTNCTWTLENPDPTKYSIYLKFSKKDLSCSNFSLLAYQFDHFSHEKIKDLLRKNHSIMQLCNSKNAFVFLQYDKNFIQIRRVFPTNFPGLQKKGEEDQKSFFEFLVLNKVSPSQFGCHVLCTWLESCLKSENGRTESCGIMYTKCTCPQHLGEWGIDDQSLILLNNVVLPLNEQTEGCLTQELQTTQVCNLTREAKRPPKEEFGMMGDHTIKSQRPRSVHEKRVPQEQADAAKFMAQTGESGVEEWSQWSTCSVTCGQGSQVRTRTCVSPYGTHCSGPLRESRVCNNTALCPVHGVWEEWSPWSLCSFTCGRGQRTRTRSCTPPQYGGRPCEGPETHHKPCNIALCPVDGQWQEWSSWSQCSVTCSNGTQQRSRQCTAAAHGGSECRGPWAESRECYNPECTANGQWNQWGHWSGCSKSCDGGWERRIRTCQGAVITGQQCEGTGEEVRRCSEQRCPAPYEICPEDYLMSMVWKRTPAGDLAFNQCPLNATGTTSRRCSLSLHGVAFWEQPSFARCISNEYRHLQHSIKEHLAKGQRMLAGDGMSQVTKTLLDLTQRKNFYAGDLLMSVEILRNVTDTFKRASYIPASDGVQNFFQIVSNLLDEENKEKWEDAQQIYPGSIELMQVIEDFIHIVGMGMMDFQNSYLMTGNVVASIQKLPAASVLTDINFPMKGRKGMVDWARNSEDRVVIPKSIFTPVSSKELDESSVFVLGAVLYKNLDLILPTLRNYTVINSKIIVVTIRPEPKTTDSFLEIELAHLANGTLNPYCVLWDDSKTNESLGTWSTQGCKTVLTDASHTKCLCDRLSTFAILAQQPREIIMESSGTPSVTLIVGSGLSCLALITLAVVYAALWRYIRSERSIILINFCLSIISSNILILVGQTQTHNKSICTTTTAFLHFFFLASFCWVLTEAWQSYMAVTGKIRTRLIRKRFLCLGWGLPALVVATSVGFTRTKGYGTDHYCWLSLEGGLLYAFVGPAAAVVLVNMVIGILVFNKLVSRDGILDKKLKHRAGQMSEPHSGLTLKCAKCGVVSTTALSATTASNAMASLWSSCVVLPLLALTWMSAVLAMTDKRSILFQILFAVFDSLQGFVIVMVHCILRREVQDAFRCRLRNCQDPINADSSSSFPNGHAQIMTDFEKDVDIACRSVLHKDIGPCRAATITGTLSRISLNDDEEEKGTNPEGLSYSTLPGNVISKVIIQQPTGLHMPMSMNELSNPCLKKENSELRRTVYLCTDDNLRGADMDIVHPQERMMESDYIVMPRSSVNNQPSMKEESKMNIGMETLPHERLLHYKVNPEFNMNPPVMDQFNMNLEQHLAPQEHMQNLPFEPRTAVKNFMASELDDNAGLSRSETGSTISMSSLERRKSRYSDLDFEKVMHTRKRHMELFQELNQKFQTLDRFRDIPNTSSMENPAPNKNPWDTFKNPSEYPHYTTINVLDTEAKDALELRPAEWEKCLNLPLDVQEGDFQTEV

SEQ ID NO: 790 - DNA, 1552 bp, Homo sapiens
aggcggcgtgcggctgcatagcctgagaatcccggtggtgagcggggatggcggttgtagcggcggctgccggctggctactcaggctcagggcggcaggggctgaggggcactggcgtcggcttcctggcgcggggctggcgcggggctttttgcaccccgccgcgactgtcgaggatgcggcccagaggcggcaggtggctcattttactttccagccagatccggagccccgggagtacgggcaaactcagaaaatgaatcttttccagtctgtaacaagtgccttggataactcattggccaaagatcctactgcagtaatatttggtgaagatgttgcctttggtggagtctttagatgcactgttggcttgcgagacaaatatggaaaagatagagtttttaataccccattgtgtgaacaaggaattgttggatttggaatcggaattgcggtcactggagctactgccattgcggaaattcagtttgcagattatattttccctgcatttgatcagattgttaatgaagctgccaagtatcgctatcgctctggggatctttttaactgtggaagcctcactatccggtccccttggggctgtgttggtcatggggctctctatcattctcagagtcctgaagcattttttgcccattgcccaggaatcaaggtggttatacccagaagccctttccaggccaaaggacttcttttgtcatgcatagaggataaaaatccttgtatattttttgaacctaaaatactttacagggcagcagcggaagaagtccctatagaaccatacaacatcccactgtcccaggccgaagtcatacaggaagggagtgatgttactctagttgcctggggcactcaggttcatgtgatccgagaggtagcttccatggcaaaagaaaagcttggagtgtcttgtgaagtcattgatctgaggactataataccttgggatgtggacacaatttgtaagtctgtgatcaaaacagggcgactgctaatcagtcacgaggctcccttgacaggcggctttgcatcggaaatcagctctacagttcaggaggaatgtttcttgaacctagaggctcctatatcaagagtatgtggttatgacacaccatttcctcacatttttgaaccattctacatcccagacaaatggaagtgttatgatgcccttcgaaaaatgatcaactattgaccatatagaaaagctggaagattatgactagatatggaaatattttttctgaatttttttttatatttcctccgacttacctctttttgaaaagagagtttttattaaatgaaccatcatgatattggctgaaaagttctacattctattattgtattgtaacacacatgtattgatgattttcattaagagtttcagattaactttgaaaaatattccacatggtaatcttataaattctgtttaattacatctgtaaatattatgtgtgtgatagtattcaataaagtaaaatcaaattgtcaaaaaaaaaaaaaaaaaaaaaa

SEQ ID NO: 791 - protein, 392 aa, Homo sapiens
MAVVAAAAGWLLRLRAAGAEGHWRRLPGAGLARGFLHPAATVEDAAQRRQVAHFTFQPDPEPREYGQTQKMNLFQSVTSALDNSLAKDPTAVIFGEDVAFGGVFRCTVGLRDKYGKDRVFNTPLCEQGIVGFGIGIAVTGATAIAEIQFADYIFPAFDQIVNEAAKYRYRSGDLFNCGSLTIRSPWGCVGHGALYHSQSPEAFFAHCPGIKVVIPRSPFQAKGLLLSCIEDKNPCIFFEPKILYRAAAEEVPIEPYNIPLSQAEVIQEGSDVTLVAWGTQVHVIREVASMAKEKLGVSCEVIDLRTIIPWDVDTICKSVIKTGRLLISHEAPLTGGFASEISSTVQEECFLNLEAPISRVCGYDTPFPHIFEPFYIPDKWKCYDALRKMINY

SEQ ID NO: 792 - DNA, 3703 bp, Homo sapiens
aggcggcgtgcggctgcatagcctgagaatcccggtggtgagcggggatggcggttgtagcggcggctgccggctggctactcaggctcagggcggcaggggctgaggggcactggcgtcggcttcctggcgcggggctggcgcggggctttttgcaccccgccgcgactgtcgaggatgcggcccagaggcggcaggtggctcattttactttccagccagatccggagccccgggagtacgggcaaactcagaaaatgaatcttttccagtctgtaacaagtgccttggataactcattggccaaagatcctactgcagtaatatttggtgaagatgttgcctttggtggagtctttagatgcactgttggcttgcgagacaaatatggaaaagatagagtttttaataccccattgtgtgaacaaggaattgttggatttggaatcggaattgcggtcactggagctactgccattgcggaaattcagtttgcagattatattttccctgcatttgatcagattgttaatgaagctgccaagtatcgctatcgctctggggatctttttaactgtggaagcctcactatccggtccccttggggctgtgttggtcatggggctctctatcattctcagagtcctgaagcattttttgcccattgcccaggaatcaaggtggttatacccagaagccctttccaggccaaaggacttcttttgtcatgcatagaggataaaaatccttgtatattttttgaacctaaaatactttacagggcagcagcggaagaagtccctatagaaccatacaacatcccactgtcccaggccgaagtcatacaggaagggagtgatgttactctagttgcctggggcactcaggttcatgtgatccgagaggtagcttccatggcaaaagaaaagcttggagtgtcttgtgaagtcattgatctgaggactataataccttgggatgtggacacaatttgtaagtctgtgatcaaaacagggcgactgctaatcagtcacgaggctcccttgacaggcggctttgcatcggaaatcagctctacagttcaggaggaatgtttcttgaacctagaggctcctatatcaagagtatgtggttatgacacaccatttcctcacatttttgaaccattctacatcccagacaaatggaagtgttatgatgcccttcgaaaaatgatcaactattgaccatataggtaggtatgcatcttgagaaagctactatgtgcccctgacattaacgtactgttaaccaagacacagcaatcatcagtgttttgatggtaacaaactttgatggtaaagttgataaaaggcaactttcagaagaaaataatgtgctttagaaaaaaaattcaaatttatagtagtatatttacatttttgttgttgttgttctgagatggagtctcactctgtcgcccaggctagactgcagtggtgcaatctcagctcactgcaacctcccccctacccccgagttcaagcaattctcctgcctcagcctgctgagtagttgggattacaggtgcccaccaccatgcccagctaatttttgtgtttttattggaggtggggtttcactatgttggctcagctgatttcaaattcctgacctcaagtgatccacctgccttagcctcccaaagtgctgggattacaggcatgagccactgcacctggctatatttacatttaatagaaacatatctagcatatgtatatgtgattttttttttttttgagaccgagtctcactctgtcaccaggctggagtgcagtggtgcgatcttggctcatggcaacctccgcctcccaggttcaagcgattgtcctgcctcagtctcctgagtagctgggactacaggtgtgcaccaacatgcccagctaattttttatatttttagtagagacggggtttcaccatgttggccaggatggtctcgatctcttgaccttgtgttccacccgtcttggcctcccaaagcgctggaattacaggcatgagccaccgcgcctggcctgtatatgtgatttctaaaaaatagatgcatgcatatgttaacattgaatagtcaatcactagatgaagatgctctctaccatggtttagattgcaagtgtactttataccattgtttcaacttcaacctttatttttgtatatattttttcaactacttaaactgttcatgaataggcgtactttctgtatttaaaaatggcccctcaagcaccgttaatttacattccagttatttacatgataattcatgacattctgaaacttgcctgtatattatctgaaaaatggatttcttgaggaaaagatctgtttattgtatgtaaggaaaaattttacctgaaaacaaacaaacaaaccctaaaactcagcaccactaccatttccagaagcttttttagcaagtgaatattttttacataatggataataaatggtatttattcatcatgattttctaagtaatgcttatcagccccttcagtggtgttattctaacaaaatgaatacattacaaattattaagttagcttttcagagttttaatatagaagttactagcactgacacactgattttgaaatgtttcaaaatgagtagatacgattagatcctttaccttttaatatctagtttttccaaaaatgatagtaatatcttttgaagaactatgctttttcaaaagcaaaatcaactctgtataatagcacattctctactttttaaagatcagaaatgctagaattcttgacttttgtgtatgggtagtaaatctagctcactgaaaatcagagtgaaacgcctttacatttgtgcggatagagaagttaactctccctcatatgtcactgtgctaccataatccctacattttctgtctgttctagtctaagaatattgttatagatggaagttaggaccattagcccacagatgcgtgtattctctcagacataccggtgtagatgccatatttctgatgtcttcttaatgtctgtgaaagcaactggcatctacaataaatcacacttagaactggttagaggactccctcacttttgttgtccatgtggttcccttccgtggaccagccgtaataaagagccaaggtagtgatggtggccacgtgcctcgttgctatttttaaagtaatattcagatgtggttttaaatttagattatgtattccttttgaaacataagaaaaacatttaaacctatgctgaaaatacgataaaagaaaaacaactccaatatgctaaaagttaaatatggtatttaagaaaatagtcatgtatgcaattgagaaagtctataatttattttacagaaaagctggaagattatgactagatatggaaatattttttctgaatttttttttatatttcctccgacttacctctttttgaaaagagagtttttattaaatgaaccatcatgatattggctgaaaagttctacattctattattgtattgtaacacacatgtattgatgattttcattaagagtttcagattaactttgaaaaatattccacatggtaatcttataaattctgtttaattacatctgtaaatattatgtgtgtgatagtattcaataaagtaaaatcaaattgtcaaaaaaaaaaaaaaaa

SEQ ID NO: 793 - protein, 392 aa, Homo sapiens; identical to SEQ ID NO: 791

SEQ ID NO: 794 - DNA, 3322 bp, Homo sapiens
atttttactagggagcagtttccccgcgcgacagttcgggagcgcgcaggcagtcgcgcgcacacacgcacgcaggcacacacacacacacacacacacacactttcgcacacacaaacacgctaggacgctcgtcttcgctactgcatccccgaaccagcagagcgaagctactgcgggttctgttaacctcagcatcgtggggcgaagcagagccattgtgcatcaaggagaggccggtgcctgcgctgccgtctctggcacctaacccagcagaccgctcaccccatcggctggaatgcttgctgattcctctgcacacttctaaggctgagaacctgaggaacccagctggaaaatgccgtctgaacgctgcctcagtattcaagaaatgctgacaggccagaggctctgccactccgaatctcacaatgacagtgtcctggcagcgctgaatcagcagaggagtgatggcatcctctgcgacatcaccctgattgctgaggaacagaaattccatgctcacaaggcagtcctagcagcatgcagtgactatttccgggcaatgttcagtctttgtatggtggaaagtggagctgatgaggttaatttgcacggtgtgaccagccttggcttaaagcaggctctggagtttgcatacacaggacagattttgctggagccaggtgtgatccaggatgtgctagcagcgggcagtcacctacagctgttggagcttctcaatttatgctcccactatctcatccaggaattaaatagctttaattacttggatctgtacagacttgctgacctctttaacctcactttgttggagaaggcagtgatcgatttcttagtgaaacatctctctgaactcctgaagagccgcccagaagaagttctaacgcttccctattgcctgcttcaggaggtgctgaagagcgaccgcctgacctccctgagtgaagagcagatctggcagctagctgtgaggtggttggaacacaactgccactaccagtacatggacgagctcctgcaatacatccgctttggcctaatggatgtggatactctccatacagttgccctgtcccacccccttgtccaagcaagtgagactgcaacagcccttgtcaacgaggccctggaataccaccagagcatctatgcacagcctgtctggcagactcgcaggaccaaaccacgattccagtcagacactctgtatatcattggtgggaaaaagcgcgaggtctgcaaggtcaaggaacttcggtacttcaatcctgttgatcaggagaatgctctcatagctgccattgccaactggagtgagctggcttccatgcctgtgggaaggagccaccattgtgtggcagtcatgggggacttcctgtttgtggcaggaggggaagttgagcatgccagtggccggacgtgtgctgtgaggactgcctgtcgctatgacccccgcagtaattcctgggcagagatagcacccatgaaaaactgccgggagcattttgtgctgggtgccatggaggaatacctctatgcagttgggggcagaaatgaactgcgccaggttctgcctacagttgagcgatattgccccaagaagaacaaatggacttttgttcagtcctttgacagatccctttcatgccatgctggatatgtggctgatggtcttctttggatatcaggtggagtaactaatacggcacaatatcagaacaggctaatggtgtatgaacctaaccagaataagtggataagccgtagccccatgctgcagagaagggtctaccattccatggctgctgtacaaaggaagctttatgttcttggaggcaatgacctagactacaataatgaccggatccttgtgcgccatatagattcttacaacatagacactgaccagtggacacgttgtaatttcaacctgctgactggccaaaatgagtctggagttgctgtccataatgggagaatatatttagttggtggatattcaatttggacaaatgagcctctggcttgtatccaggtactggatgtaagcagagaaggcaaagaagaagtattctatgggcctacactcccttttgcttccaatggaatagcagcatgcttccttccagctccatattttacatgccctaaccttcaaactcttcaagtgcctcatcacaggattggcaccatctgaaaagccaagccatcatgaacaggaggaaaacatagctctgactgttggatactgggcatgaaaagactcagtgctccatgcttccttgtcttgctttataggtcttatattcggataaatttaagcaaaaaatgaacaattttctaaaatacgttattgaaaactcgtcacccttctcagtgtatgtcaacattcaatatgtatgacttttattgtggtatagcttagtgccaatttaaggtatattgtgttccatgggtctttagagcattctttgtacactttttctaatcagcactgtcttaagacaacacaacactgttagtaaggcaatttattggacacaatggcatcgatgatcttaaaaaaatatatattctgtacttaatccctttattatttaaagccgggcttgtaatttttctttttaaaatttaacattatgcagccctgctcagtagagactcactcagcattatgacatcataaatttttaaatgccatattttattcaaggtgatacgaataataatagacatacactggaacagcagttgttgaaatacccagatttttcaccttggttactctgaccttgggtcagaacctaactttacagtgcttcagttttcccaccttttaaggaggataattactgatttccacgttaatttaaaagaacattatgaggattaggcgaacactttgtaatactttgcccaagaaaaagaaaaatgttgttactgaaattataaggtattttattgtctttagaaccttgtaattgaacagggagattatttttgaagtttaaaaattactagatagaatttggaaacatgttgtggaataaatgattctaaaaagcatgtgaaagagacacacaatgaggaaatagggagtttctcaaaatctaaacttgtacaggtatctaaacttgcctcaagtaactctcagatgtcttatttaaaatcatttagtgaaaaatgacatttaaagctaaaaaataatttagttgtactaattatggtaccataaagtgctttgacataaatttgaacctagaattggcagttctaataaaagtttttccactttgtt

SEQ ID NO: 795 - protein, 620 aa, Homo sapiens
MPSERCLSIQEMLTGQRLCHSESHNDSVLAALNQQRSDGILCDITLIAEEQKFHAHKAVLAACSDYFRAMFSLCMVESGADEVNLHGVTSLGLKQALEFAYTGQILLEPGVIQDVLAAGSHLQLLELLNLCSHYLIQELNSFNYLDLYRLADLFNLTLLEKAVIDFLVKHLSELLKSRPEEVLTLPYCLLQEVLKSDRLTSLSEEQIWQLAVRWLEHNCHYQYMDELLQYIRFGLMDVDTLHTVALSHPLVQASETATALVNEALEYHQSIYAQPVWQTRRTKPRFQSDTLYIIGGKKREVCKVKELRYFNPVDQENALIAAIANWSELASMPVGRSHHCVAVMGDFLFVAGGEVEHASGRTCAVRTACRYDPRSNSWAEIAPMKNCREHFVLGAMEEYLYAVGGRNELRQVLPTVERYCPKKNKWTFVQSFDRSLSCHAGYVADGLLWISGGVTNTAQYQNRLMVYEPNQNKWISRSPMLQRRVYHSMAAVQRKLYVLGGNDLDYNNDRILVRHIDSYNIDTDQWTRCNFNLLTGQNESGVAVHNGRIYLVGGYSIWTNEPLACIQVLDVSREGKEEVFYGPTLPFASNGIAACFLPAPYFTCPNLQTLQVPHHRIGTI

SEQ ID NO: 796 - DNA, 8643 bp, Homo sapiens
gtttgcggtttagaccccaaagattcctgttggtggtctgggtcacaggaggcaggtttcgggagctggaaatgtgagcgggtacgacaggcaccgcgggtaaccgacgccccgggtccttgctgcagccgggtacgcgggataccggcaccccgccttctccgcccgagtgctgccaggcgtgggcctggaatctcttcacaccttctctttggagcccttaatgatacgacgaaccccaagtgtttcagaacatgaagtaaacaatggagaactgttctgctgcatcgacgttcctgactgacagcttagagctggagctggggacggaatggtgcaaacctccttacttttcttgtgctgttgacaacagaggaggaggaaaacatttttctggagaatcctacctctgcagcggagcccttaagcgattgattttgaatcttgaccctttaccaactaattttgaagaagataccttggaaatatttggcattcagtgggttactgaaacagcattagtgaattcatctagagaactctttcatttattcaggcaacaactgtacaacttggaaaccttgttacagtccagttgtgattttgggaaggtatcaactctacactgcaaagcagacaatattaggcagcagtgtgtactatttctccattatgttaaagttttcatcttcaggtatctgaaagtacagaatgctgagagtcatgttcctgtccatccttatgaggctttggaggctcagcttccctcagtgttgattgatgagcttcatggattactcttgtatattggacacctatctgaacttcccagtgttaatataggagcatttgtaaatcaaaaccagattaagctttttccaccgtcatggcatttattacatctccacttggatatacattggctggtgctagaaattctttacatgctgggtgaaaaattgaaacaagttgtatatggtcatcagtttatgaatctggcaagtgacaatttaaccaacatcagcctatttgaagaacattgtgaaactctcctttgtgatttaataagcctgtcactcaacaggtacgacaaggttaggtcttctgaatcattaatgagtgaccagtgtccatgtttatgcattaaagaattatgggttctacttattcatcttctagaccacagaagtaaatggtttgtctcggaatcattttggaactggttgaataaactacttaaaacactgcttgaaaaatcaagtgaccgaagaagatcctctatgcctgtaatccagtccagggatccattaggttttagttggtggattattactcatgtagcatcattttacaagtttgatcgccatggagtaccagatgaaatgagaaaagtggaatcaaattggaactttgtagaagaactgctgaaaaagtccatcagtgttcagggtgtcattctagaagaacaattacgaatgtatcttcactgttgtttgacactttgtgatttctgggagccaaacattgcaattgttaccattttatgggaatattatagtaagaacctgaatagttccttcagtatttcttggcttccttttaaaggccttgctaataccatgaagtcacccttgtctatgcttgaaatggtgaagacttgctgttgcgataaacaagatcaggaactatataaatccagcagtagttatactatttttctttgtattctggcaaaagttgttaaaaaagcaatgaagagcaatggccctcatccttggaaacaagtcaaaggaagaatatattcaaaattccatcaaaaaagaatggaagaactaactgaagttggtctacagaacttttttagcctttttctactgttagcagctgttgcagaggtagaagatgttgcaagtcatgttttagacctcctgaatttcctcaagcctgcttttgtaacgtctcagagagccctcatttggaagggtcacatggccttcctcttgatgtatgcccagaaaaatctggacattggtgttttggctgagaaattttcatgtgctttccgggagaaagcaaaggaattcttggtgtctaagaatgaggaaatggtacagagacagactatctggacccttctttccatatacattgatggtgttcaagaagtgtttgagaccagctattgcttgtatccttcccatgaaaaactgcttaatgatggatttagtatgcttctgcgagcatgtcgagaatctgaacttaggacagtattgagcttcctacaagctgttctggccagaatcaggagtatgcatcaacaattgtgtcaggaacttcaaagggacaatgtggacctatttgtacagtcttcattatcggctaaagagcgccaccttgctgcagttgccagtgcactgtggagacatttcttttcatttttgaagagtcagagaatgtcacaggtagtgcctttctcacaacttgcggatgcagctgcagactttactttgctagcaatggacatgccaagcacagctccatcagattttcagcctcagccagttatatcaattattcaactttttggttgggatgatatcatctgccctcaagttgtagcaagatatttaagtcatgtcctacaaaatagcacattatgtgaagcactttctcattcaggctatgtatcttttcaagccttaaccgtaagatcatggattcgttgtgttttgcaaatgtatattaaaaacctctctgggcctgatgatttgctcatagataaaaatctggaagaggcagttgaaaaagagtacatgaaacagttggtcaaactgacaagattactatttaatctctcagaagtaaagagtattttctcaaaggcccaagttgaatatttatccatctcagaagaccctaaaaaagcacttgttcgattctttgaggctgttggtgtaacttacgggaacgtccagacactttctgataaatctgccatggtcacaaagtccttggaataccttggtgaagtattaaaatatattaagccttatttgggaaaaaaagttttcagtgcagggctgcagctgacttatggaatgatgggaattcttgtgaaatcatgggcacaaatctttgccacttctaaagcccaaaaattactattccggatcatagattgtttactgctgccacatgcagtattacagcaagagaaggaactgcctgcacctatgttgtcagcaattcagaaaagtcttcctttgtatctccagggcatgtgtatcgtgtgttgtcaatctcaaaatccgaatgcctatttgaatcaattgctagggaatgttattgagcagtatattgggcgatttcttccagcttcaccatatgtttcagatcttggacaacatcctgttttgctggcattgagaaacacagccactattccaccaatatcatctctaaagaaatgcattgtgcaagtcataaggaaatcctaccttgagtataaggggtcctcacctcctcctcgcttagcatccattctggccttcatcctccaactcttcaaggaaactaacacagacatttatgaagttgaactactcctccctggcattttaaaatgcttggtgttagtcagtgaaccacaagttaaaaggctggccacagagaacctgcaatacatggtaaaagcctgccaagtggggtcagaagaagaaccttcctcccagctgacttctgtgtttaggcagtttatccaggattatggtatgaggtactattaccaggtttacagcattttagaaacagtagcaacattggaccagcaggttgtcatccacttgatttctacccttactcagtctctgaaggattcagagcagaaatggggccttggcaggaatatagcacaaagggaagcctatagcaaacttttgtctcaccttggacagatgggacaagatgagatgcagagactggaaaatgataatacttaatatattttgtgattcatcctgtctattaattatcagtatctaaagccacattgttccactctaattcctacttttaattaattgtataatgttctgtttaaaataatttctaggattttttttccttttatatctgtaagtaaaaaatgtataaataaggaactgaaggttaattagcaactgtgtaataggatccttggaactttttacaaaactgcattctaccttgatgaaattttagttaaactaaattaaagaaacattttctgagagtgttttctgtgtgtgagtattaagcagatacttcatccatagactttttgttgtagtatgacttcctgcctccctgccttgtgactgatttgtcatgtttattttttatttttacaataatagttatgttttaaaatgatactttttcaaagtacctggctaccctatactgtgtttttggtgggggaaaggtgttgggaaatgtgactgtgtatttgtttttcttttttatatgtgtgaggcaagttaacaaagaaaacccttacaaagcacacttaactgtgttaggaatgagactgaatctggctaaaggattatacagctgatatccaaaaagaagtgtaaacatgccaacagggtttatatttaggttccaagagttgccaaattttttttttattcatcctttcttttggagttgtcattaaaaaaaaaatcatatcaggaggaggaaataaaggagactttaagaggagagtaaataaaaatattctagaaaagtaacaatagtagtggtctgagaagtcagctgatccatcttcttgctctttagccagagcttcttataacttagcattttatccaagaaacctgtttagtttcctttaacaacattgtttctcaacttttgaactcttaactcatccagattgttttaccagttggagcttgtccttgactccttttcctattgagcattatttggttgaaagagctccagtcctagttttgggaacccacctgggtctcaaactcagctttgctttatgatcttgagctagttacgtaacctttctcagtctagtttcttcatggagaagaaaagaagaatccctttactatttgacagtgttgttgtgagaatcaatgggataatgtacgtgaaaatatttggtggcccaaattctgttgggaaatgtacagacacgattagtttattactcgtgcacaattaaggcaaagaacacctctcaattttatctttctctaatgatatgtcccagatgaatgatcccactttccaatgttttcttacatcatgttttctaactttgaagtactttgtttccttcttgggattatagtctttatcatggttctactcttccttcaagaaaacatttcaacccttctctggctcaaggagtatctttaaaaatgaaatactttgcaatcagtattctgtagttaatagcgttctcttaattataatctgtgaaatccaaaggagtgtctgttattttcataacatataaatggtccttctctcaaatcagcttcatcaaagggaataaatgaaagcttaaggctgtttaatagacttcataacactgaatttcttttcatcatgatagtgacttactaaacaaataatgtatggcttggaaagttccagcagtcactaaggagttttatctatttaaggtgatgcctttaaagaggttatttatgtgtatatgtgtttttgtgtgtgtgtgtgtgtgtgtgtgtgtgtgtgtgtgtgtgtgggttttttttttccaaaggagattgataaagatacctttgagaatcttgctccttagagtatgaaaacgtttaaaggataggaaaagctgctactgaatcatgctttaggacatatatctatagatactaagaataactaaaatttgtacttaagaatggtaacaacaaagtgtgtaacaatatgtgtgtgtattatatgttttgtatttatgtataagtaactttttttaaagcttttttttaaattgaaaaaagaagaaaatttatggctcagttccttttttttaaaatcttcactgatccttcacttattactacaatcttgccctctttcattcccagacttggagtcccttatacctgcttctttaatagccactttccctaaataccctgtaatttctgaggctgctgcttctaccagtgtaatacaagccattgtcttttggtcaaatctgagtttgttctcctttctcatgttctttgtcctctctgtgacaattgtattttcttttatcttcccatcatttccacaatggtactgctccttcctacatatacagttgacccttgagcaacacaagtttgaactgtgcaggtccacttatatgtggatctaaaatacagtatttgtgggatgcaaaatctgagtatatggaggaccaactttttgtagaggcaggttcctcagggttaactgcaggacttgagtaagtgcagattatggtatgcacaggggatcctggaaccagtccccagaccaaaaatgaccactgtatcttgagagcaccttcatggtcttctttcctgtccccagtcgtaagatacgacccttcatctgctttgtctcaacattctgttagtggtgaactgataactccagcttttctctctctttttttttttttttttttttttgttgttgttgttgttgttgttttgaggcagagtcttgctctgtcgcccaggctggagtgcagtggcacgatctcggctcactgcaagctctgcctcccgggttcacgccattctcctgcctcagcctcccaagtagctgggactacaggtgcccgccaccacgcccggctaattttttttgtatttttagtagagacggggtttcaccatgttgggctcgatctcctgacctcatgatccgcccgcctcggcctcccaaagtgctgggattacaggcgtgatgagccacctagtgctaattcatctctaaacctctgtagttggagtctcctgaaatctcagactacctcctgctttcattttctacccagggaatacactattgtcctaagttatttagccttgaaatgtcagaggcattttaggttcttcatgtttctcccactttcagttgattaccattacaggatcttaggcttctttttatctttttgcagtgccttgcatccactggttgtttgttttttctgttgggcactacttatttccttacctctggtttcttctcctacagcttatgttctgaaatgtgtattcctaaaatactgttttcctcttgttacttttctgctcgaggacttccagtaacttaccattgtttataaggtgatgttcaaacccttcagtctggagactttctgccacctatctgactgtacctttatcttcaagcttatctctttccaaacaagaggctcatttagcagctttctctgattgccatgttcatcctacactcagcctcattcagtttacagcatggaaactgtataggacctctttcctatagaaattgaagacacttaaataggaagaaaattaaaatatacatttggatacatgagtattccagtcaaataatatctataaaataccagatagagtataaaagacaactgaaggacaacagagtgatgaaaggactttattaggcatttggatttggttatgatttaaatttcaatttaattagaacgtttccatggcaaggaaggaagcatggaggactgtggaaaagtcattcagtattgagttcatttgcattagaggaatttcatagtttaaaacttgtatatctttacctatccttcgtatgttttcttcttaagcatatttgactttttctacctcagcatctgtataagaaaatatttgtgagtcagatgtttgtgggttttccttacctattattattttcttccatgctttacaacacattttttaaactaccttgttcttaaataattacacggacctgcttctgtgtactttcacagaatctttgacagttaaaaattgtatgttatataaaaatttgacaagcttctacagttaggaaaagcctttagaaatctgccttccccaaaccgtatgttatcatagcactcatgtctccccatgtctaaaaggtaaatagatacagaaacctcaccaaaagttgaatcatctgtactaaaccactgcttttttatccagactttttatataaatcttttattttccaaaaaactgatcttttacctacccctcttagagttaaaaatattgcctgtcaggcaagagtatagtatgccaatataaataatatgctttatttggttagaaacagttggtttgggaagctagcaacatagcatattctttacaaatttaataaggtgtattttgatactgtgataacctgcattgtaaattaccaaatggttggaattgaccagtttatacttattaaaatttttgatgtgccaatggctatccaattcattgcatttgtgaattgtgcttttagaaaaattgtggacattttagttttatatacatatttatgagttatttgtgcatatgataaaattatatataataataaaagtatatatgtaactta

SEQ ID NO: 797 - protein, 1243 aa, Homo sapiens
MENCSAASTFLTDSLELELGTEWCKPPYFSCAVDNRGGGKHFSGESYLCSGALKRLILNLDPLPTNFEEDTLEIFGIQWVTETALVNSSRELFHLFRQQLYNLETLLQSSCDFGKVSTLHCKADNIRQQCVLFLHYVKVFIFRYLKVQNAESHVPVHPYEALEAQLPSVLIDELHGLLLYIGHLSELPSVNIGAFVNQNQIKLFPPSWHLLHLHLDIHWLVLEILYMLGEKLKQVVYGHQFMNLASDNLTNISLFEEHCETLLCDLISLSLNRYDKVRSSESLMSDQCPCLCIKELWVLLIHLLDHRSKWFVSESFWNWLNKLLKTLLEKSSDRRRSSMPVIQSRDPLGFSWWIITHVASFYKFDRHGVPDEMRKVESNWNFVEELLKKSISVQGVILEEQLRMYLHCCLTLCDFWEPNIAIVTILWEYYSKNLNSSFSISWLPFKGLANTMKSPLSMLEMVKTCCCDKQDQELYKSSSSYTIFLCILAKVVKKAMKSNGPHPWKQVKGRIYSKFHQKRMEELTEVGLQNFFSLFLLLAAVAEVEDVASHVLDLLNFLKPAFVTSQRALIWKGHMAFLLMYAQKNLDIGVLAEKFSCAFREKAKEFLVSKNEEMVQRQTIWTLLSIYIDGVQEVFETSYCLYPSHEKLLNDGFSMLLRACRESELRTVLSFLQAVLARIRSMHQQLCQELQRDNVDLFVQSSLSAKERHLAAVASALWRHFFSFLKSQRMSQVVPFSQLADAAADFTLLAMDMPSTAPSDFQPQPVISIIQLFGWDDIICPQVVARYLSHVLQNSTLCEALSHSGYVSFQALTVRSWIRCVLQMYIKNLSGPDDLLIDKNLEEAVEKEYMKQLVKLTRLLFNLSEVKSIFSKAQVEYLSISEDPKKALVRFFEAVGVTYGNVQTLSDKSAMVTKSLEYLGEVLKYIKPYLGKKVFSAGLQLTYGMMGILVKSWAQIFATSKAQKLLFRIIDCLLLPHAVLQQEKELPAPMLSAIQKSLPLYLQGMCIVCCQSQNPNAYLNQLLGNVIEQYIGRFLPASPYVSDLGQHPVLLALRNTATIPPISSLKKCIVQVIRKSYLEYKGSSPPPRLASILAFILQLFKETNTDIYEVELLLPGILKCLVLVSEPQVKRLATENLQYMVKACQVGSEEEPSSQLTSVFRQFIQDYGMRYYYQVYSILETVATLDQQVVIHLISTLTQSLKDSEQKWGLGRNIAQREAYSKLLSHLGQMGQDEMQRLENDNT

SEQ ID NO: 798 - DNA, 797 bp, Homo sapiens
atgactcagaaagacagggtcaatggatgtgaccaaggagacaaactttttgagattcccaaagcttcctgtactggggaacgggaaaaaagaaaaacatccattcatgagagttcagggatacgtgaaaatgaagcaaatgaggaaagacccattcacattcctccaaaagtttggacaaccaacctttattcctccacctcagacaatattcaacatcctgtaatcatcatagcgttctggaggtcagtaagtccaatatcaaggtgccagcatcaggcattatggccagcacacttcctgcgaatttgtaccaccaccccttatctcatctatgcttctgctcacagcactgcactggagccaggggatggatacctggcacttgtatgtcctatgaagaaagagaggaggatacattgcttccctatgtatccttaagggatagaccagaggaaaagttaagtaatagataaacaatcaataatacctaattggtttcccaatcaattagcacttactgtgttggatttgttcactttcagccatagttacaccttgaatttctgtatttccaaagtgggctcttttttttctaaggaatttcctcaattttttcgtgtaagtaggcttctgaggagtctatttcactgatttttgtgatatatttaatcattccagggctacaaaatttaagctgaatttaaattattcataatataacaatctctcttcctctgtctctctttctttctatatctttcattacatatatgtaataaaatattttcattata

SEQ ID NO: 799 - protein, 146 aa, Homo sapiens
MTQKDRVNGCDQGDKLFEIPKASCTGEREKRKTSIHESSGIRENEANEERPIHIPPKVWTTNLYSSTSDNIQHPVIIIAFWRSVSPISRCQHQALWPAHFLRICTTTPYLIYASAHSTALEPGDGYLALVCPMKKERRIHCFPMYP

SEQ ID NO: 800 - DNA, 4475 bp, Homo sapiens
acttttacttttgacgaccaccatgactgagatcactgctgaaggaaatgcatctacaaccacaactgtgatagacagcaaaaatggatctgtgcccaaatcccccggaaaagtgctgaagaggacagtcacagaagacatagtgacgacgttcagctcccctgcagcctggcttctggtcattgccctgataatcacgtggtcagctgttgccatcgttatgtttgatttagtggattacaaaaacttttcagcaagctctattgccaagattggctcagatcctttaaaactggtacgtgatgctatggaggaaaccacggactggatctatggcttcttttctttgttatctgacatcatctcatctgaagatgaagaagatgatgatggtgacgaagatactgataaaggagaaatagatgagcctcccttgagaaaaaaagaaatacacaaagataagactgaaaaacaagagaaacctgaaaggaaaatacaaactaaagttacacacaaagaaaaagaaaaaggaaaagaaaaagtaagagaaaaagaaaaacctgaaaagaaagcaactcacaaggaaaaaattgagaaaaaagaaaaaccagaaacaaagacactggcgaaagaacagaagaaagctaagactgcagaaaagagtgaagaaaagactaaaaaggaagtgaaaggtggaaaacaggagaaagtgaagcaaacagctgcaaaagtaaaagaagtacagaaaacaccatcaaaacccaaagaaaaggaggacaaagagaaagcagctgtgtcaaagcatgaacagaaagatcagtatgcattctgtcgatatatgattgacatatttgtccatggggatttaaaaccaggacaaagcccagccattccacctcccttaccgacagaacaagcttccagacccactccggcatcacctgcccttgaagaaaaagaaggggaaaagaagaaggctgagaagaaagttacttctgaaacaaaaaagaaagaaaaagaagatatcaaaaagaaaagtgagaaggaaactgccattgatgtggaaaaaaaagagccgggaaaagcttctgaaaccaaacaagggactgtaaaaattgcagcacaagcagcagctaagaaggatgaaaagaaggaagattccaagaaaacaaaaaaacctgcagaagtagaacaacccaagggaaaaaaacaggaaaagaaagaaaaacatgtggaaccagcaaagtcaccaaagaaagaacactcagttccaagtgacaaacaagtaaaagcaaaaactgaacgagccaaagaggagattggtgcggtttcaattaaaaaagctgtacctggaaagaaggaagagaaaacaaccaagacagtggagcaagaaattagaaaagaaaaatctgggaagacttcttcaattctgaaagataaagaacctattaaagggaaagaagagaaagttccagcttccctaaaggaaaaagaacctgaaactaaaaaagatgaaaagatgtccaaagcaggcaaagaagtcaagcctaaacctccacaactacaaggaaaaaaggaagagaagccagagccccaaattaaaaaagaagcaaaaccagctatatctgaaaaagtgcaaatacacaaacaagacatagtgaaaccagaaaagactgtttctcatggtaaaccagaagaaaaagttctcaagcaggtaaaagctgtcacaatagaaaaaacagccaagcccaaaccaacaaaaaaagctgaacatcgagaaagagaacctccatctataaaaacagacaaaccaaaaccaactccaaaaggaacatcagaagtcacagaatcaggaaagaagaaaactgaaatatctgaaaaagaaagtaaagaaaaagcagacatgaagcatcttagagaagaaaaagtctcaacaagaaaagaaagtcttcaattacacaatgtgacaaaagcagaaaaacctgcaagagtatcaaaagatgttgaagatgtaccagcttcaaagaaagctaaagaaggaactgaagatgtgtctcccacaaagcagaaaagtcccatcagtttcttccagtgtgtctacttggatgggtacaatggctatggatttcagtttcctttcactcctgcagaccgccctggagagagctctggtcaagcaaattctccaggacagaagcaacaaggacagtaaacacacatgtatgacccttacaagtgctttaagattttaaaaatgtgatgttttgtccacagtagttcaggcaattaagaatatgcaacccagagaatttctgtgaaaacattttgctctttggcctggtgtggacggaaagggtggccaaatggattgagtgatgagcagacatgtttaagggtctaagtctcaagaatctgttatgtgtgtttgctgcggtgggagggggtgcttgtatttatcttatttccagtcactataaggttgtacacaaactaatttaaagtttacttaataatggtatctttaaaataattgacacaattgcaaaatgaattcctggcttcagttagctattatttttttaatgacaacatagactgtgctctaagtttaaaagatggggaagcttatataaaagtgacccttttgcatcatatgggtatctaaacttaatttacccaataagttgatgcttaatgattttattttatttttgtctatttctattttagttgtggctttgctctaagaatgggtaatagttgtactacagactgctataaatttcttgtgatactcttttagagctcaaaatatctctgagctttagacatggtaaggtggagagtaaatgcttgataaatctttaagatatgtcttgaatgataattaggacattcagtccagtggaaatacaccattcaattagtcaggtctggtgaatcgtttgtttaaaatattagcaaatgagatgtggaattctgaaatttctccagactgtgtcttaataaaaatgtcacctgggtgaaattttagatcaatcactaaatttgggtgacaaatataaaaatattttcatttcactttaatacattctttctgtgaagtaaaatgtttttctttctcataatggcaaaatatgaatgccatcaaagtttaaggaattcattttagccttaaatgccttcgtgagatgtcttacttgtattttaggtaactggtcatcagtgccaatgacatggataacaatttttaatctactcgacagtgcatccctgggaatgactgttatgtttttgtcatattcctggtaatataaatactcgtgttctttactacattgtttttatcaactctaaaagtcatgcctctgtgacctttatcatgtttacaattgcaactgaacttatgacaaattaactcaggaaataaattgagttatcctttctagcattgtaattaccatcagcaaggcctgagatagccagagccaatactagccaagtgatttattttcaaggattgccactaactacggttctttaggaccaagatataaaacagtcactaaaaatcattaggctaggtatcagtaatacattcattactaataatgcatttttggagacttttgtgaaagaagttggtctctgccaaaagctggtggaccacattcacaccacgaaagccagtgtcacatgaaccagattaatgactctctttatggggtatgtgggacatcctggaagtgtataatttcaggaatgaccagacaataccatcttgcaaagccccttcaggtgacaatctaaacttgtgggtaggagagtgcataaagtttattgctcaactgctcctccagcctgctgaatttactgagtaaagaaatagcaaatatgatagatgttttagatttcatagaacagaatggtttgtccattaattctttcattcaatgactgtttattgaatacctactcttttagggcgctgtgttaggtgctgtattgtacaagaaaaatataataaattagattcccagcgctattctgacatagtgaatgaccttgaaaaatttactaaacatactatgtttgtttctccatgagtaaaatagggatatagggacaaacagtctaatatctcatagaaataccatggagacaaataaaatattttaatataaatatgatattaaagtaaatttctgaagtaatacttttgggtatggcactagtttttcctctgactattttactgtttctttcactctcaatataaaaactatttgataagataaaacgatatattttattgtaattagaatttagacaaatcagctataatgtaaaaatgttaataataattacgttttatctgattaaagttacaatgatcatagcactttaaaaatattatctgaactgtcatttgtttatatattaccgtctaataaaatagttatagatcttccaag

SEQ ID NO: 801 - protein, 729 aa, Homo sapiens
MTEITAEGNASTTTTVIDSKNGSVPKSPGKVLKRTVTEDIVTTFSSPAAWLLVIALIITWSAVAIVMFDLVDYKNFSASSIAKIGSDPLKLVRDAMEETTDWIYGFFSLLSDIISSEDEEDDDGDEDTDKGEIDEPPLRKKEIHKDKTEKQEKPERKIQTKVTHKEKEKGKEKVREKEKPEKKATHKEKIEKKEKPETKTLAKEQKKAKTAEKSEEKTKKEVKGGKQEKVKQTAAKVKEVQKTPSKPKEKEDKEKAAVSKHEQKDQYAFCRYMIDIFVHGDLKPGQSPAIPPPLPTEQASRPTPASPALEEKEGEKKKAEKKVTSETKKKEKEDIKKKSEKETAIDVEKKEPGKASETKQGTVKIAAQAAAKKDEKKEDSKKTKKPAEVEQPKGKKQEKKEKHVEPAKSPKKEHSVPSDKQVKAKTERAKEEIGAVSIKKAVPGKKEEKTTKTVEQEIRKEKSGKTSSILKDKEPIKGKEEKVPASLKEKEPETKKDEKMSKAGKEVKPKPPQLQGKKEEKPEPQIKKEAKPAISEKVQIHKQDIVKPEKTVSHGKPEEKVLKQVKAVTIEKTAKPKPTKKAEHREREPPSIKTDKPKPTPKGTSEVTESGKKKTEISEKESKEKADMKHLREEKVSTRKESLQLHNVTKAEKPARVSKDVEDVPASKKAKEGTEDVSPTKQKSPISFFQCVYLDGYNGYGFQFPFTPADRPGESSGQANSPGQKQQGQ

SEQ ID NO: 802 - DNA, 5982 bp, Homo sapiens
cgagcatggagagctgccgccgcggccggccggcgacgctggcgacgctttcgcccctgaggtagtttggcgaccgcgaagaaggaaaaagggcgggcgggcggctgtcctctcaccgtcctcaccccgcgaggcccggcccgctcctccgtcgtggatttcgcggcgatccccccggcagctctttgcaaagctgcttgaaacttctcccaaactcggcatggatacgactgcggcggcggcgctgcctgcttttgtggcgctcttgctcctctctccttggcctctcctgggatcggcccaaggccagttctccgcaggtggctgtacttttgatgatggtccaggggcctgtgattaccaccaggatctgtatgatgactttgaatgggtgcatgttagtgctcaagagcctcattatctaccacccgagatgccccaaggttcctatatgatagtggactcttcagatcacgaccctggagaaaaagccagacttcagctgcctacaatgaaggagaacgacactcactgcattgatttcagttacctattatatagccagaaaggactgaatcctggcactttgaacatattagttagggtgaataaaggacctcttgccaatccaatttggaatgtgactggattcacgggtagagattggcttcgggctgagctagcagtgagcaccttttggcccaatgaatatcaggtaatatttgaagctgaagtctcaggagggagaagtggttatattgccattgatgacatccaagtactgagttatccttgtgataaatctcctcatttcctccgtctaggggatgtagaggtgaatgcagggcaaaacgctacatttcagtgcattgccacagggagagatgctgtgcataacaagttatggctccagagacgaaatggagaagatataccagtagcccagactaagaacatcaatcatagaaggtttgccgcttccttcagattgcaagaagtgacaaaaactgaccaggatttgtatcgctgtgtaactcagtcagaacgaggttccggtgtgtccaattttgctcaacttattgtgagagaaccgccaagacccattgctcctcctcagcttcttggtgttgggcctacatatttgctgatccaactaaatgccaactcgatcattggcgatggtcctatcatcctgaaagaagtagagtaccgaatgacatcaggatcctggacagaaacccatgcagtcaatgctccaacttacaaattatggcatttagatccagataccgaatatgagatccgagttctacttacaagacctggtgaaggtggaacggggctcccaggacctccactaatcaccagaacaaaatgtgcagaacctatgagaaccccaaagacattaaagattgctgaaatacaggcaagacggattgctgtggactgggaatccttgggttacaacattacgcgttgccacacttttaatgtcactatctgctaccattacttccgtggtcacaacgagagcaaggcagactgtttggacatggaccccaaagcccctcagcatgttgtgaaccatctgccaccttatacaaatgtcagcctcaagatgatcctaaccaatccagagggaaggaaggagagtgaagagacaattattcaaactgatgaagatgtgcctggtcccgtaccagtaaaatctcttcaaggaacatcctttgaaaataagatcttcttgaactggaaagaacctttggatccaaatggaatcatcactcaatatgagatcagctatagcagtataagatcatttgatcctgcagttccagtggctggacctccccagactgtatcaaatttatggaacagtacacaccatgtctttatgcatctccaccctggaaccacgtaccagtttttcataagagccagcacggtcaaaggctttggtccagccacagccatcaatgtcaccaccaatatctcagctccaactttacctgactatgaaggagttgatgcctctctcaatgaaactgccaccacaataactgtattgttgagaccagcacaagccaaaggtgctcctatcagtgcttatcagattgttgtggaagaactgcacccacaccgaaccaagagagaagccggagccatggaatgctaccaggttcctgtcacataccaaaatgccatgagtgggggtgcaccgtattactttgctgcagaactccccccgggaaacctacctgagcctgccccgttcactgtgggtgacaatcggacctaccaaggcttttggaaccctcctttggctccgcgcaaaggatacaacatctatttccaggcgatgagcagtgtggagaaggaaactaaaacccagtgcgtacgcattgctacaaaagcagcagcaacagaagaaccagaagtgatcccagatcccgccaagcagacagacagagtggtgaaaatagcaggaattagtgctggaattttggtgttcatcctccttctcctagttgtcatattaattgtaaaaaagagcaaacttgctaaaaaacgcaaagatgccatggggaatacccggcaggagatgactcacatggtgaatgcaatggatcgaagttatgctgatcagagcactctgcatgcagaagatcctctttccatcaccttcatggaccaacataactttagtccaagatatgagaaccacagtgctacagcagagtccagtcgccttctagacgtacctcgctacctctgtgaggggacggaatccccttaccagacaggacagctgcatccagccatcagggtagctgatttactgcagcacattaatctcatgaagacatcagacagctatgggttcaaagaggaatatgagagcttttttgaaggacagtcagcatcttgggatgtagctaaaaaagatcaaaatagagcaaaaaaccgatatggaaacattatagcatatgatcactccagagtgattttgcaacccgtagaggatgatccttcctcagattatattaatgccaactatattgatggctaccagagaccaagtcattacattgcaacccaaggtcccgttcatgaaacagtgtatgatttctggaggatgatttggcaagaacaatctgcttgcattgtgatggttacaaatttagttgaggttggccgggttaaatgctataaatattggcctgatgatactgaagtttatggtgacttcaaagtaacgtgtgtagaaatggaaccacttgctgaatatgtagttaggacattcaccctggaaaggagggggtacaatgaaatccgtgaagttaaacagttccatttcacgggctggcctgaccatggagtgccctaccatgctacagggctgctttcctttatccggcgagtcaagttatcaaaccctcccagtgctggccccatcgttgtacattgcagtgctggtgctggacgaactggctgctacattgtgattgacatcatgctagacatggctgaaagagagggtgttgttgatatttacaattgtgtcaaagccttaagatctcggcgtattaatatggtccagacagaggaacagtacatttttattcatgatgccattttagaagcctgcttatgtggagaaactgccatacctgtctgtgaatttaaagctgcatattttgatatgattagaatagactcccagactaactcttcacatctcaaggatgaatttcagactctgaattcagtcacccctcgactacaagctgaagactgcagtatagcgtgcctgccaaggaaccatgacaagaaccgtttcatggacatgctgccacctgacagatgtctgccttttttaattacaattgatggggagagcagtaactacatcaatgctgctcttatggacagctacaggcaaccagctgctttcatcgtcacacaataccctctgccaaacactgtaaaagacttctggagattagtgtatgattatggctgtacctccattgtgatgttaaacgaagtcgacttgtcccagggctgccctcagtactggccagaggaagggatgctacgatatggccccatccaagtggaatgtatgtcttgttcaatggactgtgatgtgatcaaccggatttttaggatatgcaatctaacaagaccacaggaaggttatctgatggtgcaacagtttcagtacctaggatgggcttctcatcgagaagtgcctggatccaaaaggtcattcttgaaactgatacttcaggtggaaaagtggcaggaggaatgcgaggaaggggaaggccggacgattatccactgcctaaatggtggcgggcgaagtggcatgttctgtgctataggcatcgttgttgaaatggtgaaacggcaaaatgttgtcgatgttttccatgcagtaaagacactgaggaacagcaagccaaacatggtggaagccccggagcaataccgtttctgctatgatgtagctttggagtacctggaatcatcttagttgggtgagactctttaaagtgcatccatgaagaaacctgtccatctattgagccagcagctgttgtacctgttacacttgtgcagaaagattttaatgtggggggtgggagacttttacatttgagaggtaaaagtattttttttatgaagttgtgtatcttaataaaaaggactgaattagtttttattactatattaaagcatcaacatttcatgccacataaattatatttaataagaaccagattgaaatgagaacgtattggtgtttgtacagtgaacatgccaccttttttctcatggtttcagtagagcagctaccacatgttgcatgagttcatactttctacgtggcatttttctccctttctaaaatgaaagctgatgaatcttaaaaggaagaagaaaagaaaagctgtgcaaattcatagtaaagttcgttttttatatgtttccagtgtagcagatctctatataaatatataaatatatataactggcttattttcttttaatgtgcaatgatggctggatcatttaaagttctttttagaaaataacataagccaaagactcaagtgtaaatatgtctatatggagaaagcacattatatttattggttacttacattccttttttgatggctaaaatactaccaccacacaatcatctttttttcctgaagaaagctttttctttagctaaaatcaattgtaaacgatttttgtagattattttttgtatgttttagtgtaagtagaagataaactttttattcataaaccaggaagcaatgttctttatagtgattctcttgtgtacatgcttgtgaattaaatttgtgtaaaatcccttggcaattgggtcttttaatataggaccaaattaaaacattttgctgaatatgtatagtttttcacaatttcattaggtaaataatggtttggtgatcatacatgagaaatgtacacattaaaaggccttgctgacaacttgcacaatgttgaacatagcctttaagcatcatttaaattttaaaggaatggagtttttcagcctgtggcccagcactggtcaagaaaacaagatggcaacatatatgctttcagggtcaaatttgagcaaactgtaaactgtcagggtgataaaatgtttctcttgatgtttacatgcacaagctttgcgttctgactataaaaagtgtgaacaaatcaatgccagattcctgttttgcgcattgtcatgggattcttaagtgaacctttctaaatgtggtcttgttcacatgctccacgtagctgtaacttcacatcatcagcttgcagtttgtaattgactaaagcattccagtgtcctctttctagattgccagctcatgacatggtgcttataaagatttaattaaagtaagaatgaaataaagtttttataattat

SEQ ID NO: 803 - protein, 1440 aa, Homo sapiens
MDTTAAAALPAFVALLLLSPWPLLGSAQGQFSAGGCTFDDGPGACDYHQDLYDDFEWVHVSAQEPHYLPPEMPQGSYMIVDSSDHDPGEKARLQLPTMKENDTHCIDFSYLLYSQKGLNPGTLNILVRVNKGPLANPIWNVTGFTGRDWLRAELAVSTFWPNEYQVIFEAEVSGGRSGYIAIDDIQVLSYPCDKSPHFLRLGDVEVNAGQNATFQCIATGRDAVHNKLWLQRRNGEDIPVAQTKNINHRRFAASFRLQEVTKTDQDLYRCVTQSERGSGVSNFAQLIVREPPRPIAPPQLLGVGPTYLLIQLNANSIIGDGPIILKEVEYRMTSGSWTETHAVNAPTYKLWHLDPDTEYEIRVLLTRPGEGGTGLPGPPLITRTKCAEPMRTPKTLKIAEIQARRIAVDWESLGYNITRCHTFNVTICYHYFRGHNESKADCLDMDPKAPQHVVNHLPPYTNVSLKMILTNPEGRKESEETIIQTDEDVPGPVPVKSLQGTSFENKIFLNWKEPLDPNGIITQYEISYSSIRSFDPAVPVAGPPQTVSNLWNSTHHVFMHLHPGTTYQFFIRASTVKGFGPATAINVTTNISAPTLPDYEGVDASLNETATTITVLLRPAQAKGAPISAYQIVVEELHPHRTKREAGAMECYQVPVTYQNAMSGGAPYYFAAELPPGNLPEPAPFTVGDNRTYQGFWNPPLAPRKGYNIYFQAMSSVEKETKTQCVRIATKAAATEEPEVIPDPAKQTDRVVKIAGISAGILVFILLLLVVILIVKKSKLAKKRKDAMGNTRQEMTHMVNAMDRSYADQSTLHAEDPLSITFMDQHNFSPRYENHSATAESSRLLDVPRYLCEGTESPYQTGQLHPAIRVADLLQHINLMKTSDSYGFKEEYESFFEGQSASWDVAKKDQNRAKNRYGNIIAYDHSRVILQPVEDDPSSDYINANYIDGYQRPSHYIATQGPVHETVYDFWRMIWQEQSACIVMVTNLVEVGRVKCYKYWPDDTEVYGDFKVTCVEMEPLAEYVVRTFTLERRGYNEIREVKQFHFTGWPDHGVPYHATGLLSFIRRVKLSNPPSAGPIVVHCSAGAGRTGCYIVIDIMLDMAEREGVVDIYNCVKALRSRRINMVQTEEQYIFIHDAILEACLCGETAIPVCEFKAAYFDMIRIDSQTNSSHLKDEFQTLNSVTPRLQAEDCSIACLPRNHDKNRFMDMLPPDRCLPFLITIDGESSNYINAALMDSYRQPAAFIVTQYPLPNTVKDFWRLVYDYGCTSIVMLNEVDLSQGCPQYWPEEGMLRYGPIQVECMSCSMDCDVINRIFRICNLTRPQEGYLMVQQFQYLGWASHREVPGSKRSFLKLILQVEKWQEECEEGEGRTIIHCLNGGGRSGMFCAIGIVVEMVKRQNVVDVFHAVKTLRNSKPNMVEAPEQYRFCYDVALEYLESS

SEQ ID NO: 804 - DNA, 471 bp, Homo sapiens
atggcgccaaaagtgaagaaggaagctcctgcctctgcaaagcagaagccaaagcgaaggctttaagggccaagaaggcagtgttgaaaggtgtccacagccacatacacacaaaaaaagatcgcacgtcacccacattctggcggcccaagacactgcgactccagaggcagcaaaaatatcctcagaaaagcattcccaggagaaacaagcttgatcactatgctatcatcaagtttctgctgaccactgagtctgccacggagaagacagacgacaacaacacacttgtgttcactgtggatgctaaagccaacaagcaccagatcaaacaggctgtgaagaagctctatgacattgatgtggccgaggtcaacaccctgtcagcctgatggagagaagaaggcatacgttcaactgcctcctgattacaatgctttggatgttgccaacaaaattgggatcatctaa

SEQ ID NO: 805 - DNA, 6619 bp, Homo sapiens
gaattcccttacaaacgcctccagcttgtagaggcggtcgtggaggacccagaggaggagacgaaggggaaggaggcggtggtggaggaggcaaaggccttggacgaccattgttggcgaggggcaccactccgggagaggcggcgctgggcgtcttgggggtgcgcgccgggagcctgcagcgggaccagcgtgggaacgcggctggcaggctgtggacctcgtcctcaccaccatggtcgggctccttttgttttttttcccagcgatctttttggaggtgtcccttctccccagaagccccggcaggaaagtgttgctggcaggagcgtcgtctcagcgctcggtggccagaatggacggagatgtcatcattggagccctcttctcagtccatcaccagcctccggccgagaaagtgcccgagaggaagtgtggggagatcagggagcagtatggcatccagagggtggaggccatgttccacacgttggataagatcaacgcggacccggtcctcctgcccaacatcaccctgggcagtgagatccgggactcctgctggcactcttccgtggctctggaacagagcattgagttcattagggactctctgatttccattcgagatgagaaggatgggatcaaccggtgtctgcctgacggccagtccctccccccaggcaggactaagaagcccattgcgggagtgatcggtcccggctccagctctgtagccattcaagtgcagaacctgctccagctcttcgacatcccccagatcgcttattcagccacaagcatcgacctgagtgacaaaactttgtacaaatacttcctgagggttgtcccttctgacactttgcaggcaagggccatgcttgacatagtcaaacgttacaattggacctatgtctctgcagtccacacggaagggaattatggggagagcggaatggacgctttcaaagagctggctgcccaggaaggcctctgtatcgcccattctgacaaaatctacagcaacgctggggagaagagctttgaccgactcttgcgcaaactccgagagaggcttcccaaggctagagtggtggtctgcttctgtgaaggcatgacagtgcgaggactcctgagcgccatgcggcgccttggcgtcgtgggcgagttctcactcattggaagtgatggatgggcagacagagatgaagtcattgaaggttatgaggtggaagccaacgggggaatcacgataaagctgcagtctccagaggtcaggtcatttgatgattatttcctgaaactgaggctggacactaacacgaggaatccctggttccctgagttctggcaacatcggttccagtgccgccttccaggacaccttctggaaaatcccaactttaaacgaatctgcacaggcaatgaaagcttagaagaaaactatgtccaggacagtaagatggggtttgtcatcaatgccatctatgccatggcacatgggctgcagaacatgcaccatgccctctgccctggccacgtgggcctctgcgatgccatgaagcccatcgacggcagcaagctgctggacttcctcatcaagtcctcattcattggagtatctggagaggaggtgtggtttgatgagaaaggagacgctcctggaaggtatgatatcatgaatctgcagtacactgaagctaatcgctatgactatgtgcacgttggaacctggcatgaaggagtgctgaacattgatgattacaaaatccagatgaacaagagtggagtggtgcggtctgtgtgcagtgagccttgcttaaagggccagattaaggttatacggaaaggagaagtgagctgctgctggatttgcacggcctgcaaagagaatgaatatgtgcaagatgagttcacctgcaaagcttgtgacttgggatggtggcccaatgcagatctaacaggctgtgagcccattcctgtgcgctatcttgagtggagcaacatcgaatccattatagccatcgccttttcatgcctgggaatccttgttaccttgtttgtcaccctaatctttgtactgtaccgggacacaccagtggtcaaatcctccagtcgggagctctgctacatcatcctagctggcatcttccttggttatgtgtgcccattcactctcattgccaaacctactaccacctcctgctacctccagcgcctcttggttggcctctcctctgcgatgtgctactctgctttagtgactaaaaccaatcgtattgcacgcatcctggctggcagcaagaagaagatctgcacccggaagcccaggttcatgagtgcctgggctcaggtgatcattgcctcaattctgattagtgtgcaactaaccctggtggtaaccctgatcatcatggaaccccctatgcccattctgtcctacccaagtatcaaggaagtctaccttatctgcaataccagcaacctgggtgtggtggcccctttgggctacaatggactcctcatcatgagctgtacctactatgccttcaagacccgcaacgtgcccgccaacttcaacgaggccaaatatatcgcgttcaccatgtacaccacctgtatcatctggctagcttttgtgcccatttactttgggagcaactacaagatcatcacaacttgctttgcagtgagtctcagtgtaacagtggctctggggtgcatgttcactcccaagatgtacatcattattgccaagcctgagaggaatgtccgcagtgccttcaccacctctgatgttgtccgcatgcatgttggcgatggcaagctgccctgccgctccaacactttcctcaacatcttccgaagaaagaaggcaggggcagggaatgccaattctaatggcaagtctgtgtcatggtctgaaccaggtggaggacaggtgcccaagggacagcatatgtggcaccgcctctctgtgcacgtgaagaccaatgagacggcctgcaaccaaacagccgtcatcaaacccctcactaaaagttaccaaggctctggcaagagcctgaccttttcagataccagcaccaagaccctttacaacgtagaggaggaggaggatgcccagccgattcgctttagcccgcctggtagcccttccatggtggtgcacaggcgcgtgccaagcgcggcgaccactccgcctctgccgccccacctgaccgcagaggagacccccctcttcctggccgaaccagccctccccaagggcttgccccctcctctccagcagcagcagcaaccccctccacagcagaaatcgctgatggaccagctccagggagtggtcagcaacttcagtaccgcgatcccggattttcacgcggtgctggcaggccccgggggtcccgggaacgggctgcggtccctgtacccgcccccgccaccgccgcagcacctgcagatgctgccgctgcagctgagcacctttggggaggagctggtctccccgcccgcggacgacgacgacgacagcgagaggtttaagctcctccaggagtacgtgtatgagcacgagcgggaagggaacacggaagaagacgaactggaagaggaggaggaggacctgcaggcggccagcaaactgaccccggatgattcgcctgcgctgacgcctccgtcgcctttccgcgactcggtggcctcgggcagctcggtgcccagctccccagtgtccgagtcggtgctctgcacccctcccaacgtatcctacgcctctgtcattctgcgggactacaagcaaagctcttccaccctgtaagggggaagggtccacatagaaaagcaagacaagccagagatctcccacacctccagagatgtgcaaacagctgggaggaaaagcctgggagtggggggcctcgtcgggaggacaggagaccgctgctgctgctgccgctactgctgctgctgccttaagtaggaagagagggaaggacaccaagcaaaaaatgttcaggccaggattcggattcttgaattactcgaagccttctctgggaagaaagggaattctgacaaagcacaattccatatggtatgtaacttttatcacaaatcaaatagtgacatcacaaacataatgtcctcttttgcacaattgtgcatagatatatatatgcccacacacactgggccatgcttggcaaggaacagaccacgtggcatccagtcggatcatgagttcacctgatgcattcggagtgagctggtggagccagacagagcaggtgcggggaagggaagggccaggccagacccatcccaaacggatgatgggatgatgggacagcagttccttgctcagaagcccttctccccgctgggctgacagactcctcatcttcaggagactcaggaatggagcggtacaggggtctctcttcatccaccgcaacccatccagtgccagctttgagattgcacttgaagaaaggtgcatggaccccctgctgctctgcagattccctttatttaggaaaacaggaataagagcaaaattatcaccaaaaagtgcttcatcaggcgtgctacaggaggaaggagctagaaatagaacaatccatcagcatgagactttgaaaaaaaaaacacatgatcagcttctcatgttccatattcacttattggcgatttggggaaaaggccggaacaagagattgttacgagagtggcagaaacccttttgtagattgacttgtgtttgtgccaagcgggctttccattgaccttcagttaaagaacaaaccatgtgacaaaattgttaccttccacttactgtagcaaataatacctacaagttgaacttctaagatgcgtatatgtacaatttggtgccattatttctcctacgtattagagaaacaaatccatctttgaatctaatggtgtactcatagcaactattactggtttaaatgacaaataattctatcctattgtcactgaagtccttgtaactagcgagtgaatgtgttcctgtgtccttgtatatgtgcgatcgtaaaatttgtgcaatgtaatgtcaaattgacctgtcaatgtcaacctagtagtcaatctaactgcaattagaaattgtcttttgaatatactatatatattttttatgttccaataatgttttatacatcattgtcatcaatatctacagaagctctttgacggtttgaatactatggctcaaggttttcatatgcagctcggatggacatttttcttctaagatggaacttatttttcagatattttctgatgtggagatatgttattaatgaagtggtttgaaaatttgttatattaaaagtgcacaaaaactgagagtgaaaataaaaggtacattttataagcttgcacacattattaacacataagattgaacaaagcatttagattattccaggttatatcatttttttaaagattttccacagctacttgagtgtctaacatacagtaacatctaactcagctaataatttgtaaaatctttatcaatcacattgtggcctcttttaatttttatgttcatggacttttattcctgtgtcttggctgtcataactttttatttctgctatttgctgttgtgtaatatccatggacatgtaatccacttactccatctttacaatccctttttaccaccaataaaaggattttttcttgctgttttgatttcttctattatttgtggaatgaattataccccccttaaatatctttgtttatgccttatgttcagtcatattttaatatgcttccttcatattgaagctgctgatttctcagccaaaaatcatcttagaatctttaaatatccattgcatcatttgttcagaatttaacatccattccaatgttggaggcttgtattacttatatttcatcatattctattgccaagtttagtcagttccacaccaagaatgaactgcatttcctttaaaaattattttaaaacacctttattgaaaagatctcatgactgagatgtggactttggttccatgttttcattgtaagaaagcagagagcggaaaatcaatggctccagtgattaatagatgggtttttagtaattgacaaattcatgagggaaagcatatgatctctttattagtgaatcatgcttattttttactcttaacgccactaatatacatccctaatatcacagggcttgtgcattcagatttttaaaaaattaggatagataaggaaacaacttatattcaagtgtaagatgatatcaggttggtctaagacttttggtgaacacgttcattcaactgtgatcactttattactctgaatgcctactattatcctgattatggggtctcctgaataaatagagtattagtctttatgtcatcattgttcaaaattggagatgtacacatacataccctataccaagagggccgaaactcttcaccttgatgtatgttctgatacaagttgttcagcttcttgtaaatgtgttttccttcggcttgttactgccttttgtcaaataatcttgacaatgctgtataataaatattttctatttatt

SEQ ID NO: 806 - protein, 1194 aa, Homo sapiens
MVGLLLFFFPAIFLEVSLLPRSPGRKVLLAGASSQRSVARMDGDVIIGALFSVHHQPPAEKVPERKCGEIREQYGIQRVEAMFHTLDKINADPVLLPNITLGSEIRDSCWHSSVALEQSIEFIRDSLISIRDEKDGINRCLPDGQSLPPGRTKKPIAGVIGPGSSSVAIQVQNLLQLFDIPQIAYSATSIDLSDKTLYKYFLRVVPSDTLQARAMLDIVKRYNWTYVSAVHTEGNYGESGMDAFKELAAQEGLCIAHSDKIYSNAGEKSFDRLLRKLRERLPKARVVVCFCEGMTVRGLLSAMRRLGVVGEFSLIGSDGWADRDEVIEGYEVEANGGITIKLQSPEVRSFDDYFLKLRLDTNTRNPWFPEFWQHRFQCRLPGHLLENPNFKRICTGNESLEENYVQDSKMGFVINAIYAMAHGLQNMHHALCPGHVGLCDAMKPIDGSKLLDFLIKSSFIGVSGEEVWFDEKGDAPGRYDIMNLQYTEANRYDYVHVGTWHEGVLNIDDYKIQMNKSGVVRSVCSEPCLKGQIKVIRKGEVSCCWICTACKENEYVQDEFTCKACDLGWWPNADLTGCEPIPVRYLEWSNIESIIAIAFSCLGILVTLFVTLIFVLYRDTPVVKSSSRELCYIILAGIFLGYVCPFTLIAKPTTTSCYLQRLLVGLSSAMCYSALVTKTNRIARILAGSKKKICTRKPRFMSAWAQVIIASILISVQLTLVVTLIIMEPPMPILSYPSIKEVYLICNTSNLGVVAPLGYNGLLIMSCTYYAFKTRNVPANFNEAKYIAFTMYTTCIIWLAFVPIYFGSNYKIITTCFAVSLSVTVALGCMFTPKMYIIIAKPERNVRSAFTTSDVVRMHVGDGKLPCRSNTFLNIFRRKKAGAGNANSNGKSVSWSEPGGGQVPKGQHMWHRLSVHVKTNETACNQTAVIKPLTKSYQGSGKSLTFSDTSTKTLYNVEEEEDAQPIRFSPPGSPSMVVHRRVPSAATTPPLPPHLTAEETPLFLAEPALPKGLPPPLQQQQQPPPQQKSLMDQLQGVVSNFSTAIPDFHAVLAGPGGPGNGLRSLYPPPPPPQHLQMLPLQLSTFGEELVSPPADDDDDSERFKLLQEYVYEHEREGNTEEDELEEEEEDLQAASKLTPDDSPALTPPSPFRDSVASGSSVPSSPVSESVLCTPPNVSYASVILRDYKQSSSTL

SEQ ID NO: 807 - DNA, 6089 bp, Homo sapiens
ccatgtgcaccaacatagtttacgagtggctcaaagcgctgcagcttccgcagtacgcggagtccttcgtggataacggctacgatgacctggaggtgtgcaagcagatcggggacccggacctggatgccatcggggtgctggcgcccgcgcaccgccgccgtatcctggaggccgtgcgccggctgcgggagcaggacgccaacgccgccggcctctacttcacgcttgagccgcagccggcgccccccgggccgcccgccgacgccgtccccaccggccgccggggggagccgtgcggcggcccggcccagggcacccgcggggactctcgcggccacacgaccgccccccgcagcagggagctggtgagctaccccaaactgaagctgaagatcatgatcagggataagctcgtccgtgacggcatccacctgagcaagcccccgtactcccgcaaggtcccaatggctggcatcctagagtacttaatgaattggccgaagtcatcacagagccgctagatatcatttttgagacctcgtggaggactgatgaggtgcctgaagactggaaaagggcatatttagaaccttctttcaaaaagggaaatggatgatgaccctggaaatactcatcagcttaactttttgcttggacaaattctggaataatcaacttagtaaactgggtaactggcttataacagctagaaataaggcagtgaactatcacgcataaagaagtattgagttcatttttttaagaagatatcatgatgagatacagtcttatgcatttcttggcattctcccttccattcttaatgaaaacagatgaggttggctaaggcatttgagtcataacttagtttaagtacaatataacaaaaaggtagatttctgacagtaagtagtaattatattatttccaaatttgcttttaacttgagaacagtagctttaatttttatattcaagcatacattctacttcatttcatataggaccatgtttttataagataagatacataattctatgtagaatagtttggtgaaggaattcttattttaaggtgcttttatatagttattttgtatattggtacaatgttaaaggtgatgaattaaggaacatcaccaagagaggacaatttcttctaacttctctttttaaatttaatctggctgaggtttagtattaggactaatacaagtgtcttgctctgacatgcatcaagcaagagctagctattttacttcatagctagtttcttgcactctgtggagactgccagggccgcagctcacagcctgttctgagctgcagtgctttatcccaccttgctctccaggcttctgacttcaggcctgtgggggccgggaggtgggcagcggcagtggcctgaggagccctgtagaactacggctgaaaaagaaagtagattgaggtggggggaggaaattaacaggaatctagagtttttctaattcttatcgtcttatcgttcttgtgtttggatgctggtagtttttttttttttagacagagtctcgctctgtcacccaggctggagtgtagtggcacaatcttggctcacagtgactttcgcctcccaggttcaaggaattctcctgcctcggcctcttggtagctgggattacaggcacgcatcaccacacccagctaatttttttgtatttttagtagagatggggttttaccatgttggccaggctgttcttgaactcctggcctcaaatgatccactcgccgtggcctccagtagcgctgggattacaggcgtgagccatcacacccggcctggatgctggtagttttattttctgcttagaaaacgcaaccatgttgatgggaccaaaaacttagttgaaagaagccatggcaaaagatgttgacgtacaactggctcctgaggctgtcaattgtttagagctcccaagtagtactgcattacggaatctactacttagaagaatgtacaagatgtaagttcccatcggcaccgtcatggtaagaagaataagaaactctcaaaggaaaagaaacttacattcactttttcctggtccattttggttcctaagaatagataggccattaagaaggatattaggtttctaaggacaattttaacacaatactgctttaaaaatctgaagtttaaatagtttagctatttctgtaggttaattcaggcactgactaaaatcagtctcattatcatatacaaatgtaaggaagttaaattttaaaagcatgtataggttgtccttaaattatacaaaagcttttagtttcatcaggattatattccagttaacctttcatcttttttttttttccaaatgaactagggtctttaaaattcctaagtagattcttttgagtggtaggggagtctgtatagattacagatataatttattgtgataacaaatggcttcctgtttgacctcatttccaggtgtcgcatccgtggctgatttatttcacagatgtacatttgcatgtacttgttgaactttgctaggaaggactcaatttttgaaaaatctgttattttcactgtgggccttatgaggcaatctactgcaatggaaaaagggttccttggtcatttcaagttttattttctattagagtaatatctaacttcaattattttgccaggtttaaaccttctctctgtgtctgtggttagaatttgaaaataacaatgctctgcttaaagtaagagtcacagtcagcaaaaaaagccaatggattttaaaaagacatcttagttaaagctagaggaagaaaacttcaaataagcaaagaagtattgaaggatgcccacgaattcctttgcattaaaatcaagatgaggtaagaggtagaatataagagaaagggattatttttaccatgaattgtatctggggacagttagtcttagaaggagtaattttttcagcgtttttcctctgtatctaaacaccaataatatacttaatttttgaatataaaagaagtagcaattgactaagaataaatatgttataaaaactaggggattatcttgatttacatttcctagagtattaaaagagattaattacagactttcacttgataatattgaggagtctggagggtcatagcaaaattttctttagttcatcttaaaatttagggaggtaaaaaaagattttattcacataaaagatttcttggcatagggaaggcgtaatgttaagggcttcttccttacccaagtgggagctgaaccagtaattgtggggaaaactgaatttatagcaacaaaggatagtagtttctcaactgggagcatacgagcaatttctcagttcagagatatttatagcatcttggtgttatgcaataaacaatgacaacaacaagcattgagctttcactttggagttactcagatctgagtttaaattctaaaattattctagtagtattttcctgcggtgaatctgttaaggatgtaagctatagtgtagcttggggaatcatcttgaacagttatgaaactcattaaagcttcttttcccttgtctgtaaaatgggaaaaataaatacctctatagctcttaagaggcttaagagttctatggcttacacccacatacagtccttggctcagtgctaggcatgtagcaggtgctgactgcctctctcccttcccttctttactctcagttgtcttatttcttcttatgcagaagagattaccttaaagctgactagaaaactcagacataaattgacatttccttatcattgcctgaaacccactgaataagtcccctttgatttctctcaggaaggataaaaaaggctacagtacctgctcataggagttcagtaaatgtttattgattgaatgaaaagaatttgatttaaggaaacaataacactccatcctgggcaacagagcaagatcccgtctcaaaacaaaacaaaacaaaacaaaacagcaaattcataaaggccagcagttttcaagtctggggaaataggcacatggacagattatatgaaggtatttcattagctttcttctctttatggcagcttcagattgatgaatttgaggtacaaatgagtgagtgacatatgtatattttcctctgattttatgactgatttacaaattaggagtgcaaatgggctgttccccgatagcatcttctgggaagaatccaaccaagatacaaagcagatgatggtggatcggcaaactcttttctatgaaaagaaaaaccagatataccagggactggaaagcacctgcttgaaaattgatatgagcatgtctgaatttttcccttataagagcctgagtattgtaacaggtctcttgcacagggggttgaaaaataaaaaaagaagttaacataattaaaatgcttggacaaaacatttgctttatatagattcttacaagtaatatttgattaggtatcaaaataggtttaggcaggtggaagttctgaatttcaaggcaaataaggcatgaagggtggaacattgcatctagggaaaataagagaaataagtgaaagtctgaccctacattgccaattctcagaccaagtacaaagtattaggaattttttatatcagctgacatcttgtgcttacagtaaagccatatagatgcacacatagtgactttattaaatcaaatgagttgtgcagagcagagcaaatctattaggctttctcttttagagttttctaattttactcttattagctccctcagttgtcatcaattacatattcctacatcagatattttacactatcagattctttgattaaaaaatcatcttcagctttacattattaatctctgaggacataaaatcaaataactttctagtccatgatcattaatccctactattttagatatttccataaaaggcttaaagggaaaaaaaaatggtaggtagttcagaaaaaaatggctgggcacggtggctcacgcctgtaatcccagcactttgggaggccggggtgggcagatcatttgaggtcaggagtttgagaccagcctggccaacatggtgaaaccctgtgtctactaaaaatacaaaaaaaattagctgagtgtggtggtgtgcgcctgtaatcccagctactaaggcaggagaatggcttgaacccaggaggtggaggtcgcagtgagctgagatcgcgccagtgcgctccagcctgggcaacagagtgagactctgtctaaaaaaaaaaaaaaaagaaaagaaaaaagaaaaattgaagaacataacttttctacttatgaaatagataattttttaaaattgtttaaactcctggaaattaagtgttattttttattactgcagttgagagataccttttcagaggaaaacaagaggctaaattccatgttaagagctaagtagtatttttttcttaacaattttgccaaaatttcttctactggaccaaaaggaaataaatctacaataaatctactttctaaatattatttaagatgggaaatgtcttttataggtatattctgtataatacccttaattagatgaattatcccttatcattccaaaaatgaaatgctgtgttaaatatctccagggcaaagtggtatgttgactgggacaaacgttagaaattgtattgttcattgcacttgttgccctgttccccaagcttgtcaatgtttagagatactattcgggttgctaaagccattattcatagaaaatttctgcccctacagaagtgtgtgcatgggccttggaaaatctacatgtgtatatctgagtagcgaagcacagattcactctaattgaaagcagcagtttggttttgtaaatgtaattgcaattgacactttcttttccctttcagttattattttttttaaaggacgttatgagaaggcactatgaaaagcctaattggaatagcattatgaaccatgtaatgcatgcccatgcacactgtgatttgcaaacatatgtccgctcttcaataaatgttacggctttcacagcg

SEQ ID NO: 808 - protein, 173 aa, Homo sapiens
MCTNIVYEWLKALQLPQYAESFVDNGYDDLEVCKQIGDPDLDAIGVLAPAHRRRILEAVRRLREQDANAAGLYFTLEPQPAPPGPPADAVPTGRRGEPCGGPAQGTRGDSRGHTTAPRSRELVSYPKLKLKIMIRDKLVRDGIHLSKPPYSRKVPMAGILEYLMNWPKSSQSR

SEQ ID NO: 809 - DNA, 810 bp, Homo sapiens
ctctttccttgcctaacgcagccatggctcgtggtcccaagaagcatctgaagctggtagcagctccaaagcactggatgctggataaattgactggtgtgtttgctcctcatccattcactggtccccacaagttgagagagtctctccccatcatcattttcctaaggatcagacttaaatatgccctgacaggagatgaagtaaagaagatttgcatgcagcagttcattaagatcgatggcaaggtttgaactgatacaacctaccctgctggattcatggatgtcatcagcattgacaagagagaatttccgtctgatctatgacaccaaggatcgctttgctgtacattgtattacacctgaggaggccaagtacaagttgtgcaaactgagaaaaatctttgtgggcacaaaaggaatccctcacctggtgactcatgatgcttgcaccgtccgctaccctgacccctcatcgaggtgaatgataccattcagattgatttggagactggcaagagtattgatttcatcgagttcgacactggtgactagaggtactaacctgggaagaattggtgtgatcatcaactgagagaagcaccctggatcttttgacgtagtttatgttaaagatgccaatggcaacagctttgccactcgacttttcaacatttttgttattggcaagagcaataaaccatggatttctctttcccaaggacaggatatccgcctcaccatcgctgaagagagagacaaagactggcggccaaaccaagcagtgggtgaagtggtccctgggtga

SEQ ID NO: 810 - DNA, 437 bp, Homo sapiens
atggagacgcagactaacaatagaaagaaagtgaagcaaatcaacaaatgtgcctttggccaggcttttaagctgattttaaggccaccacctccattctgggaagcccgttgaactttagcttgtactaaggagaaagacctgtccctgaaggagatccagaagaaactggaggctgcagaggaaagaaggaagtctgaggaggtccaggtgctgaagccattggcagagaggagggaatacaagcaagaagtctttgagaaggctttggaaaacgacaccttcagcagaatcgtggaggaaaagctgatcctgaaagtggaaaaaattaaggaaaatgaggaggctaatctagctgctactatgtctgaaggaaaaggaggcacgccgcggaggtgcgcaggaacaaggacgcgcagactcaacagtctggctga

SEQ ID NO: 811 - DNA, 5018 bp, Homo sapiens
gcggatccccgaactgcgcggcccgactcgagtccgccatattggatgccgcagccgctgctgccagcgcttcctcctctgtcttcgccgagcggggctggttcctgcggcccgagcggcggggaggtgaaacaggagcccgtcggaggaaggggcagaagggagtggagagtgtaggggaaggggctagagggagggggaccgaaacggagcggggcagagaagagaaggcgccgcggcccagcccctcccccgcccgccgccgacccgccccggcagcgcctctgttccctagaacggcgctccccccgccctagcggccatgccggtgccgctctgccgctgagggagcccttccccgccagcgcgtgcccttccactccgccccgaggtcgcagcggcccgctctcccgccagcgccccctcctcgcggccacgcagcagcccgcgtctcgctctccccacccagtgcagtggccgccgcctcttccgccgccgggctcggggcctccgcagcgacaacatggaggccgtgaagaccttcaatagcgagttgtattccctgaatgactataaaccacccatttcgaaagcgaaaatgacccaaattactaaggcagccatcaaagctattaagttctataaacatgtggtacagagtgttgagaagtttattcagaaatgtaaaccagaatacaaagtacctggactttatgttattgactccattgtgcgacaatcccgacatcagtttggtcaagaaaaggatgtgtttgcacccagatttagtaataacatcattagcactttccagaatttatatcgttgccctggggatgacaagagtaaaatagtgagagtactaaacttatggcagaagaataatgtatttaagagtgagattattcagccccttttggatatggcagccgggattccgcctccagttgtcacacctgttttggccagcactaccactgctatgagcaatactccaggaactcctgtgacacctgttactccggccaatgtggtccaaggcttacctgatccgtgggtatctcagataacaaatacagatacacttgcggctgtagctcagatcttgcaaagtcctcaaggccagcagcttcaacaattaatacaaaccttacagatacaacaacagaagccccagccttccattctgcaggccctagatgctggtcttgttgttcagttgcaagctcttacggcacaacttacagctgcagctgcagctgccaacactcttactcccttagaacagggagtctcctttaacaagaagttgatggataggtttgattttggggaagactctgagcatagtgaagaacccaaaaaggaaattccagcttcacaactttctcacgtttcagaatctgtgaacaattccatttttcatcagatagcagaacaactacaacagcaaaacctagaacatctcagacagcagctcttggagcagcaacagcctcaaaaggccactcctcaggatagtcaggaaggaacctttgggtcagagcattcagcgtcaccatcacaagggagtagtcagcagcattttcttgaacctgaagtcaatttggatgattccatagatattcagcaacaggatatggatatagatgaagggcaagatggagtggaagaggaggtctttgaacaagaagctaagaaagtggcggttcgctcaagatcaagaacacattcacgatctcgttcaagatcaccaagaaaacgaaggtctaggtcacggtctggctctagaaagcgtaaacacagaaagcgatcacgctcccgctcaagagaaagaaagaggaaatcatcacggtcgtattcaagtgaaaggagagccagagaaagggagaaagaacgacagaaaaagggattacctccaattagatctaaaacactaagtgtatgtagtactactctctgggttgggcaagtggacaagaaggcaacacagcaagacttaaccaacctgtttgaagagtttggacagattgaatccattaatatgattcctccccggggctgtgcttatgtctgcatggttcatcgacaagatgcatttcgagctcttcagaaactcagttctggatcatataaaattgggtccaaggtcattaagatcgcttgggctttaaacaaaggtgtaaaaacagaatacaaacaattctgggatgtggatcttggagttacatatataccatgggaaaaagttaaagtggatgacttggaaggttttgcagaaggaggcatgattgatcaggagactgtaaatactgagtgggaaactgtgaaaagctcagaacctgttaaagagacggtccagacaactcagagcccaactccagttgaaaaggagacagtggtcacaacccaggcagaggttttccctcctcctgttgctatgttgcagattccagtggcgccagccgtgcctacagttagtttagtcccaccagcatttcctgtgtcgatgccggttcctcctcctggattcagtccaatccctccacctccttttttaagagcaagttttaacccttcacaaccaccacctggtttcatgccgcctccagttcccccacctgttgtgccaccccctacgattccaccagtagtaccaacatctttagtgcagccgtcattatccatgacaccggaaactgtgaaagatgttggatttggtagccttgttataccaggcggttctgttgccagcaatcttgctacttccgctctgccagctggaaatgtttttaatgctccaactaaacaggcagagcctgaagaaaaagtacctcatcttatagaccaccagatttcttctggtgaaaacaccagatcagtgattccaaatgatatttcaagtaatgctgcaattttaggaggacagccgccaaatgtgacaagcaattctggaattctgggagtccaaagaccaaatgtatcaagtaattctgaaattcttggggtccggccatctaatgtttccagtagttctgggattattgcagcccaaccaccaaatattctaaataactctggaatattgggaatacagccacccagtgtgtcaaatagttctggacttttgggagtgctacccccaaatatacctaacaattctggacttgtaggagtacagccaccaaatgttccaaatactcctggacttctgggaacacagccaccagctggacctcaaaacttaccccctttaagtatccctaatcaaaggatgcccacaatgccaatgttagacattcgtccgggactaataccacaggcacctgggccaagattccctttaatacagcctggaattccaccccaacggggaatcccacccccatcggtacttgattcagctcttcatccaccaccccgtggaccttttcctccaggagatatttttagtcaaccagaaagaccttttttagctcctggaagacaaagcgtagacaatgttactaacccagaaaaaaggataccacttgggaatgataacattcaacaggaaggagatagagattaccggtttcctcctatagaaaccagggaaagcattagtagacctccccctgtggatgttagagatgtggttgggcggcctatagatccaagagaaggtcctggacggcctccactagatggtagggatcattttggaagacctcctgtagatataagagagaatcttgtgaggccaggtatagatcatcttggtcgaagagaccactttggctttaatccagagaagccctgggggcatagaggagattttgatgagagagagcatcgggttctaccggtctatggtggtccaaaaggcttacatgaagaaagaggtagatttcggtctggaaactatcgatttgatcctagaagtggtccttggaaccgaggatttggacaagaagttcacagagattttgatgaccgcagaagaccctgggagaggcaaagggatagggatgacagagattttgatttctgcagagaaatgaatggaaatcgtcttggacgagacagaattcaaaacacttgggttccccctcctcatgctcgggtttttgattattttgaaggggccacttctcaacgaaaaggtgataatgtgcctcaggttaatggtgaaaatacagagagacatgctcagccaccacctataccagtacagaatgatcctgaactttatgaaaaactgacatcttcaaatgaaataaacaaggagaagagtgacacagttgctgatatagaaagtgaaccagtggtagaaagcacagaaactgaggggacataatcatcactcagtaggtaaaagataccttttgtaaagttgtcatctctctgtaatagataatggctgactggaccatagttgttcacttttgtctgccagaattaagttaatctgatgttcatgttcacctttctcttaaaataattgtacaactgacttgtatagacattgttcttaatatgaacatggtaggtaaactttttttttatttttttctgataaaatacaaatgttggccccagattcttttaacgtcaaggaaatgaataacagcttgtcagagacttcctatggaagaaagaattttttagatactatcattaggttggatatggtaatagatatatttcagaatagcaagtggtggtatatcttatccatatctttaggctgctgcagaattttaaggttatagataaagctgtgatattttatgcaaagactggctctaggtatttgaggagcacaatacagagattttaaaaagtgattttgtaaaatctacactacggtctctgtttctccaaagtaagtgtttgtgatttgttcctcatactgcagtgagtaaaaaagaaacaagaaaacaacaacataaatattaaagtacgtttcaatgttgggtgaattttgtttttagatgccaataaaacttatttgtttgataaaaaaaaaaaaaaaa

SEQ ID NO: 812 - protein, 1271 aa, Homo sapiens
MEAVKTFNSELYSLNDYKPPISKAKMTQITKAAIKAIKFYKHVVQSVEKFIQKCKPEYKVPGLYVIDSIVRQSRHQFGQEKDVFAPRFSNNIISTFQNLYRCPGDDKSKIVRVLNLWQKNNVFKSEIIQPLLDMAAGIPPPVVTPVLASTTTAMSNTPGTPVTPVTPANVVQGLPDPWVSQITNTDTLAAVAQILQSPQGQQLQQLIQTLQIQQQKPQPSILQALDAGLVVQLQALTAQLTAAAAAANTLTPLEQGVSFNKKLMDRFDFGEDSEHSEEPKKEIPASQLSHVSESVNNSIFHQIAEQLQQQNLEHLRQQLLEQQQPQKATPQDSQEGTFGSEHSASPSQGSSQQHFLEPEVNLDDSIDIQQQDMDIDEGQDGVEEEVFEQEAKKVAVRSRSRTHSRSRSRSPRKRRSRSRSGSRKRKHRKRSRSRSRERKRKSSRSYSSERRAREREKERQKKGLPPIRSKTLSVCSTTLWVGQVDKKATQQDLTNLFEEFGQIESINMIPPRGCAYVCMVHRQDAFRALQKLSSGSYKIGSKVIKIAWALNKGVKTEYKQFWDVDLGVTYIPWEKVKVDDLEGFAEGGMIDQETVNTEWETVKSSEPVKETVQTTQSPTPVEKETVVTTQAEVFPPPVAMLQIPVAPAVPTVSLVPPAFPVSMPVPPPGFSPIPPPPFLRASFNPSQPPPGFMPPPVPPPVVPPPTIPPVVPTSLVQPSLSMTPETVKDVGFGSLVIPGGSVASNLATSALPAGNVFNAPTKQAEPEEKVPHLIDHQISSGENTRSVIPNDISSNAAILGGQPPNVTSNSGILGVQRPNVSSNSEILGVRPSNVSSSSGIIAAQPPNILNNSGILGIQPPSVSNSSGLLGVLPPNIPNNSGLVGVQPPNVPNTPGLLGTQPPAGPQNLPPLSIPNQRMPTMPMLDIRPGLIPQAPGPRFPLIQPGIPPQRGIPPPSVLDSALHPPPRGPFPPGDIFSQPERPFLAPGRQSVDNVTNPEKRIPLGNDNIQQEGDRDYRFPPIETRESISRPPPVDVRDVVGRPIDPREGPGRPPLDGRDHFGRPPVDIRENLVRPGIDHLGRRDHFGFNPEKPWGHRGDFDEREHRVLPVYGGPKGLHEERGRFRSGNYRFDPRSGPWNRGFGQEVHRDFDDRRRPWERQRDRDDRDFDFCREMNGNRLGRDRIQNTWVPPPHARVFDYFEGATSQRKGDNVPQVNGENTERHAQPPPIPVQNDPELYEKLTSSNEINKEKSDTVADIESEPVVESTETEGT

SEQ ID NO: 813 - DNA, 7889 bp, Homo sapiens
atgggtggagtctcgctttttctttccagtgttggctgacttacagctcttataaactagtggcaatttctgaacccagccggctccatctcagcttctggtttctaagtccatgtgccaaaggctgccaggaaggagacgccttcctgagtcctggatctttcttccttctggaaatctttgactgtgggtagttatttatttctgaataagagcgtccacgcatcatggacctcgcgggactgctgaagtctcagttcctgtgccacctggtcttctgctacgtctttattgcctcagggctaatcatcaacaccattcagctcttcactctcctcctctggcccattaacaagcagctcttccggaagatcaactgcagactgtcctattgcatctcaagccagctggtgatgctgctggagtggtggtcgggcacggaatgcaccatcttcacggacccgcgcgcctacctcaagtatgggaaggaaaatgccatcgtggttctcaaccacaagtttgaaattgactttctgtgtggctggagcctgtccgaacgctttgggctgttagggggctccaaggtcctggccaagaaagagctggcctatgtcccaattatcggctggatgtggtacttcaccgagatggtcttctgttcgcgcaagtgggagcaggatcgcaagacggttgccaccagtttgcagcacctccgggactaccccgagaagtattttttcctgattcactgtgagggcacacggttcacggagaagaagcatgagatcagcatgcaggtggcccgggccaaggggctgcctcgcctcaagcatcacctgttgccacgaaccaagggcttcgccatcaccgtgaggagcttgagaaatgtagtttcagctgtatatgactgtacactcaatttcagaaataatgaaaatccaacactgctgggagtcctaaacggaaagaaataccatgcagatttgtatgttaggaggatcccactggaagacatccctgaagacgatgacgagtgctcggcctggctgcacaagctctaccaggagaaggatgcctttcaggaggagtactacaggacgggcaccttcccagagacgcccatggtgcccccccggcggccctggaccctcgtgaactggctgttttgggcctcgctggtgctctaccctttcttccagttcctggtcagcatgatcaggagcgggtcttccctgacgctggccagcttcatcctcgtcttctttgtggcctccgtgggagttcgatggatgattggtgtgacggaaattgacaagggctctgcctacggcaactctgacagcaagcagaaactgaatgactgactcagggaggtgtcaccatccgaagggaaccttggggaactggtggcctctgcatatcctccttagtgggacacggtgacaaaggctgggtgagcccctgctgggcacggcggaagtcacgacctctccagccagggagtctggtctcaaggccggatggggaggaagatgttttgtaatctttttttccccatgtgctttagtgggctttggttttctttttgtgcgagtgtgtgtgagaatggctgtgtggtgagtgtgaactttgttctgtgatcatagaaagggtattttaggctgcaggggagggcagggctggggaccgaaggggacaagttcccctttcatcctttggtgctgagttttctgtaacccttggttgccagagataaagtgaaaagtgctttaggtgagatgactaaattatgcctccaagaaaaaaaaattaaagtgcttttctgggtcatctgtggtgtatgttgacatggaccgctgcccctccatcctgcccttgcccgtggctttggtgtttcagatcctactcacgggaggcagctgccgcggaggtgtgggcagctgagaggggtgggcaggccagcacagctcctggcaggagacacaggtccaggagcccgtgagcatttgtgagagcagagatggcaagcacgtgcgtggagaccaacgaagcgtgtccctggcacacagcaagggagagtttcgctcggtctctgcagtgcagtctcctggcgtaagtcttgaagatggacccaactccctgaagaaatggatcttgaaattgaacacaaacatcatgaacgtacagcctgggcattctgcagtgatttgtgagatgagcttgcatcgactgttcctctcagcagtgacagccaaagtcacccctgataaaatgcagtttcactttataaaatgcctcgccccttcccagcatgtagagcttgtctgcagccctaaaggagccaggtcctgctctgatgagggtcaaatcagagccgacatcccatgtacaaaaaacccccaggcttctgccttccttccgggctcctgtctgctcccattttactccacggaatagttctgccctgtagcatctccagcggcctttgcagactgctgtcagccaacaggtgccaaaaatgcaaaagaagaagaaactaaaagcagtgctatttttgcagaacaaatgctagctattaaatcatcttaggccaagacaccaatggcacttggaccgataggtatttggagcatgagttaggaaggatatgtctttctccaggtgcgcagctgaaagttgctgagaaaagctgcctgtgttgctgtggtaacatgagaaggaatgaacagctctatacaaaaactggccacacattataaggcctattctatgcagttatgtttttggctatttgctcatttagtcattgtttatcaaccaaactaggtaagccaaggagttacaagacagctctagagaagctccctctgcttacaggacaataatgcattgtttgtttgttgatacaaatgaattatttgaatccacagaagtgaaaaagggaaaaaatcctggctgacttgtgggaagagcgtactgcagagcctagggcctgagttaactcgctggcggccctgcaggcaggcttgatgggagcgcccagcacatctgcccaccctgcacagggcatgaagcaccgtgtgcagagatctgtgggcaaaagcccaggacgtgaccttaggcaagaggggtccttggagaagtggaggtgtgcatggtgtgtagccttgcgtgtctgtgagcacgccctagtggacctgcgcctggattatcgggccagtctctcggaggggtccgtgatgctgagttacgccattcacctgaactctgcagctcatcggctgtaggatttgggtgagacacttttccttgctgactcatttccccatctgcaaaatgggggtgacgatatctacctcttggggtgtgtcaagggtaaaagagcacactttaagaatcctaaagcactaagccaaggatgaaagactagaaagctgcctctatgttgctactctcaaaaatgctcagaaattttcttgtcgtactaaaaatgtgttatttttctcattttcattcttccattcaacacagaagtaatctaagtaagttctaaaaacatagatccgggggcccacagacattcaattttcttctgaattggctctggtatcacacaacacacaagcaagcaaacagcctgcctgctagggccttgggttccaggctggaggaatgcaggcagaaatctcttaggaaataactaagtgagcgccaagttttgaattgccttagagccgaaagagaatgtggcgtgctggggagagatctggacctctttctcatcagtcatttgacctgtccacgaagaacaattttgttatgcagcctgggaacctggtttccttacaccctgcgcccttaatgacacagacaaccacgggtactcctggacggaagctcatcacgcctcctcaaataccttcacccatgttcaggtcacacggaggtcaccatctcctcagcacacaacaactgctttggttcccagggttattttttctacgagttgaaaacccacggagcctaagccatctttttgtcccctaaggagagccccatagactaagagctacacttcctgtctgtctttcccacctttccatctcattctagcttaaagcttatcacgctactgagagcctgttctgtagttcaaggtggcagagaaaaatacgaaccttgagtgaaatctggagagcagtgcagggtcatccccagacgtgacgggccatatcctaggcgactcctgcagcttatagaagcagggaatttaatggacttcttccaggaaagccagcccacggggactcttaaaaagacaccaaccatttggaagatgcagcttgaggtctgggggactggactgattctgccaccatatagtgaacacgattaatcgggaggaagaagtaaggcactctgtgagttagtctaccaccctattgactttgacagagagaaaaccaacttttttcatatgatcacacagtagtactggaatatctcgactgcaatatcctctaaacaaatgcatgcaaagctttgtaaaagcagctgatgattaaaaaaattttaaaacattagggtttttctaatatatccatatgtgggacagtgatttaaatgtcattaattgtccagccacaacttgtaacagtgatgtgaaagacacaaaaaaggccccactggagtggaggagtggtctggctggtccccaagcaaaacagaatgggcttcgcataggctttagaacttattcataaatattgaccaaagtgtgaagcaaggtatccagtgaagattctctagggtctctacttctgctcaagagatttaatccagctttctctaaagcagtggtccagacttgccacatactaggttaaagataaagtgagaaaaacaaatactttggtttgcacgtctcttgaggggccctaggctgtatggaggaatatttagaggaatatttgtgagctgccatttgtgtttaaaagaacatgaaagcaagacgggccctaacccgcctgtgtctgtagctgaccaggaggccactgcttccttcccccagagcttctaggagagccccccaaaatgcaactctccaaggtcctgtggagtagtcccctcataatgcctccaccacacctgtgtctcacgatgccttaactgacgtagctcctaagtgatgttcacagagaaggaaatacttaggcaagcccatgtgtaacatgctcacagatgtgctggctttgccaatgctttcggactccaccatgctttctgattcttctggtcctagtcacgccttggcacggggcagaagcggccgagctatgctgacaggtgctgctgagagccaacagccattcagccgagaaggcgtttctaggtgagggcatgagagctggcattccaggctgctgagtgcggcatctgcaggtgcaccacattgctccacggtgtgttcagaagagaccagcatcttgaatctcaggctctgggctcattctttgcctctgccaagggaccattcaggggcttcaagccagctgctgaaaatcccccttttctggatttttccccatctatataaggatatggtggctgtgtggacaagaaattggtttcatctcagaagggtgcttccctacaaagatcttcagaaatttaattgaaaacaattttttgaactttttttgtttggccaggatgaatgaagctgaagtcacatcctgaatgtgcatgccagacaaagggtaagcaagcagtctttacaaatgccaatccctctgcactccaaaaccggagcccgtaatgaaggcccaggttccagtcatcacaggatcccccaagccagcacagtgcctgatgcctccctaggcattagcacatcccagcactctaattcacatcctcagcatccctgcctcctgcatccagggcttaggttgagtgtttccagagtgtcaagtacatttaaacacaaaccaaatactccagggttttgacctgtcacaatggcttttgaaaacaacagacgtacaatttgagagaaggactcgatggacttcttaggctgaggactaaggacatgttgctgttcctcttggtccaggacattcaataccattcacagcattcatcaccaactgacatagtatcgatcacgacattcaactgtttgaaattactgctattttggtcaaaaactaagaaatcagaaattgcacctacatagtgtgtctcctcattggagtcccatctctctgagcacagggatgggctcctgagctcacagccctgccctgcccccccagcagggcctcaccctcatggccctcagtgaatagtgactacatgaagggggcacttactagaggcctgagtaatggaatttcaattagcttctgcttcccttttctaaaaaagaaccacctttcttaagaataattaggccaaaataaacttgagtaatttgtacagtcaatattttgaagtttcggagttaccagtgaaatagcaaagctgttctccaggaaaggacatccaggttcccacccaggccttccttcctcagctcctgcagcctcatcctagtttaatatgaaggttgtgaatgggttaaaaagcagttcttaagcacctacttagatcttttcagtatctggaaatagcacccagggctgtgttagtaaagcttttcactgggtaagagtcatacaatttttacatttaatttgtttttttaaaacaaggcagtcttgttttacatattggaatgactagatattttttgacatttctggcacctctggttctgctgaattttaagggaggtgagtggtatgtacacaaagttaagattgctgcataataattcctttgcatttccaaaataaattacacaaatgtcacttttccttttctattccatagtactagttttagccagatctttgccaaacattctaggacattcagaaaagtcatccatggaattttggaatgccattctctctgtatctttgcagatcatgaggaaggaaagttgatgaactagtacgggatggctcagacttgtaaagtgtctaagtcacaacgctgcagagccagcttccgggtagcaatggcatggcctcagctgtgccaaggctacaactggagcttccttactcgcatctgaggcaaacacagcaaggctggcccaggccgcccacagtcaacagatgttcacgggagatggatcagcccctcttttgcttgttctatcaaggaaagagatctaaccatgggcaagggtggaacacacccggttcaggtcagggaatgagttgctctaagtgaacagtgaattcttacttctcagcctgtatcaattgtacccagggttcatgattactgtgacccactaagggatgatctttgaggaaacagacctggagggaggtaatttaaggagggaaagcgagtgggttttacagactgctttgtggcgacattcaggaacagaccattcaatggatgacttttcagtacataaaagcaagcagtaatggccaggagagagcaaagatgccctaagaatgacatcagactgaccaaatgtgccttttcaaataagttatgagaacgaatgaattggaattagagcaaggtattggacagaaccatgctagtctttgagagaacgtgtggattgggtggatgtttggaccgaatgaatggtaactttttaatgtgaaacagagaactgatatatgggctgtcatgtcaccctagggtactgtcgctctgtcatgtgtagcaatctttccaaatttttgttggtgggctgaacaaagataaaactaataaagtatgtgtggataccactagaaaaaaaaaaa

SEQ ID NO: 814 - protein, 378 aa, Homo sapiens
MDLAGLLKSQFLCHLVFCYVFIASGLIINTIQLFTLLLWPINKQLFRKINCRLSYCISSQLVMLLEWWSGTECTIFTDPRAYLKYGKENAIVVLNHKFEIDFLCGWSLSERFGLLGGSKVLAKKELAYVPIIGWMWYFTEMVFCSRKWEQDRKTVATSLQHLRDYPEKYFFLIHCEGTRFTEKKHEISMQVARAKGLPRLKHHLLPRTKGFAITVRSLRNVVSAVYDCTLNFRNNENPTLLGVLNGKKYHADLYVRRIPLEDIPEDDDECSAWLHKLYQEKDAFQEEYYRTGTFPETPMVPPRRPWTLVNWLFWASLVLYPFFQFLVSMIRSGSSLTLASFILVFFVASVGVRWMIGVTEIDKGSAYGNSDSKQKLND

SEQ ID NO: 815 - DNA, 2960 bp, Homo sapiens
tccgggaggattacccaggagaccgctggtgggaggcgcggctggcgccgctgcgcgcatgggcctgttcctggcccgcagccgccacctacccagtgaccatgatagtgtttgtcaggttcaactccagccatggtttcccagtggaggtcgattctgacaccagcatcttccagctcaaggaggtggttgctaagcgacagggggttccggctgaccagttgcgtgtgattttcgcagggaaggagctgaggaatgactggactgtgcagaattgtgacctggatcagcagagcattgttcacattgtgcagagaccgtggagaaaaggtcaagaaatgaatgcaactggaggcgacgaccccagaaacgcggcgggaggctgtgagcgggagccccagagcttgactcgggtggacctcagcagctcagtcctcccaggagactctgtggggctggctgtcattctgcacactgacagcaggaaggactcaccaccagctggaagtccagcaggtagatcaatctacaacagcttttatgtgtattgcaaaggcccctgtcaaagagtgcagccgggaaaactcagggtacagtgcagcacctgcaggcaggcaacgctcaccttgacccagggtccatcttgctgggatgatgttttaattccaaaccggatgagtggtgaatgccaatccccacactgccctgggactagtgcagaatttttctttaaatgtggagcacaccccacctctgacaaggaaacaccagtagctttgcacctgatcgcaacaaatagtcggaacatcacttgcattacgtgcacagacgtcaggagccccgtcctggttttccagtgcaactcccgccacgtgatttgcttagactgtttccacttatactgtgtgacaagactcaatgatcggcagtttgttcacgaccctcaacttggctactccctgccttgtgtggctggctgtcccaactccttgattaaagagctccatcacttcaggattctgggagaagagcagtacaaccggtaccagcagtatggtgcagaggagtgtgtcctgcagatggggggcgtgttatgcccccgccctggctgtggagcggggctgctgccggagcctgaccagaggaaagtcacctgcgaagggggcaatggcctgggctgtgggtttgccttctgccgggaatgtaaagaagcgtaccatgaaggggagtgcagtgccgtatttgaagcctcaggaacaactactcaggcctacagagtcgatgaaagagccgccgagcaggctcgttgggaagcagcctccaaagaaaccatcaagaaaaccaccaagccctgtccccgctgccatgtaccagtggaaaaaaatggaggctgcatgcacatgaagtgtccgcagccccagtgcaggctcgagtggtgctggaactgtggctgcgagtggaaccgcgtctgcatgggggaccactggttcgacgtgtagccagggcggccgggcgccccatcgccacatcctgggggagcatacccagtgtctaccttcattttctaattctcttttcaaacacacacacacacgcgcgcgcgcgcacacacactcttcaagtttttttcaaagtccaactacagccaaattgcagaagaaactcctggatccctttcactatgtccatgaaaaacagcagagtaaaattacagaagaagctcctgaatccctttcagtttgtccacacaagacagcagagccatctgcgacaccaccaacaggcgttctcagcctccggatgacacaaataccagagcacagattcaagtgcaatccatgtatctgtatgggtcattctcacctgaattcgagacaggcagaatcagtagctggagagagagttctcacatttaatatcctgccttttaccttcagtaaacaccatgaagatgccattgacaaggtgtttctctgtaaaatgaactgcagtgggttctccaaactagattcatggctttaacagtaatgttcttatttaaattttcagaaagcatctattcccaaagaaccccaggcaatagtcaaaaacatttgtttatccttaagaattccatctatataaatcgcattaatcgaaataccaactatgtgtaaatcaacttgtcacaaagtgagaaattatgaaagttaatttgaatgttgaatgtttgaattacagggaagaaatcaagttaatgtactttcattccctttcatgatttgcaactttagaaagaaattgtttttctgaaagtatcaccaaaaaatctatagtttgattctgagtattcattttgcaacttggagattttgctaatacatttggctccactgtaaatttaatagataaagtgcctataaaggaaacacgtttagaaatgatttcaaaatgatattcaatcttaacaaaagtgaacattattaaatcagaatctttaaagaggagcctttccagaactaccaaaatgaagacacgcccgactctctccatcagaagggtttatacccctttggcacaccctctctgtccaatctgcaagtcccagggagctctgcataccaggggttccccaggagagaccttctcttaggacagtaaactcactagaatattccttatgttgacatggattggatttcagttcaatcaaactttcagcttttttttcagccattcacaacacaatcaaaagattaacaacactgcatgcggcaaaccgcatgctcttacccacactacgcagaagagaaagtacaaccactatcttttgttctacctgtattgtctgacttctcaggaagatcgtgaacataactgagggcatgagtctcactagcacatggaggcccttttggatttagagactgtaaattattaaatcggcaacagggcttctctttttagatgtagcactgaaa

SEQ ID NO: 816 - protein, 465 aa, Homo sapiens
MIVFVRFNSSHGFPVEVDSDTSIFQLKEVVAKRQGVPADQLRVIFAGKELRNDWTVQNCDLDQQSIVHIVQRPWRKGQEMNATGGDDPRNAAGGCEREPQSLTRVDLSSSVLPGDSVGLAVILHTDSRKDSPPAGSPAGRSIYNSFYVYCKGPCQRVQPGKLRVQCSTCRQATLTLTQGPSCWDDVLIPNRMSGECQSPHCPGTSAEFFFKCGAHPTSDKETPVALHLIATNSRNITCITCTDVRSPVLVFQCNSRHVICLDCFHLYCVTRLNDRQFVHDPQLGYSLPCVAGCPNSLIKELHHFRILGEEQYNRYQQYGAEECVLQMGGVLCPRPGCGAGLLPEPDQRKVTCEGGNGLGCGFAFCRECKEAYHEGECSAVFEASGTTTQAYRVDERAAEQARWEAASKETIKKTTKPCPRCHVPVEKNGGCMHMKCPQPQCRLEWCWNCGCEWNRVCMGDHWFDV

SEQ ID NO: 817 - DNA, 2876 bp, Homo sapiens
tccgggaggattacccaggagaccgctggtgggaggcgcggctggcgccgctgcgcgcatgggcctgttcctggcccgcagccgccacctacccagtgaccatgatagtgtttgtcaggttcaactccagccatggtttcccagtggaggtcgattctgacaccagcatcttccagctcaaggaggtggttgctaagcgacagggggttccggctgaccagttgcgtgtgattttcgcagggaaggagctgaggaatgactggactgtgcagaattgtgacctggatcagcagagcattgttcacattgtgcagagaccgtggagaaaaggtcaagaaatgaatgcaactggaggcgacgaccccagaaacgcggcgggaggctgtgagcgggagccccagagcttgactcgggtggacctcagcagctcagtcctcccaggagactctgtggggctggctgtcattctgcacactgacagcaggaaggactcaccaccagctggaagtccagcaggtagatcaatctacaacagcttttatgtgtattgcaaaggcccctgtcaaagagtgcagccgggaaaactcagggtacagtgcagcacctgcaggcaggcaacgctcaccttgacccaggaatttttctttaaatgtggagcacaccccacctctgacaaggaaacaccagtagctttgcacctgatcgcaacaaatagtcggaacatcacttgcattacgtgcacagacgtcaggagccccgtcctggttttccagtgcaactcccgccacgtgatttgcttagactgtttccacttatactgtgtgacaagactcaatgatcggcagtttgttcacgaccctcaacttggctactccctgccttgtgtggctggctgtcccaactccttgattaaagagctccatcacttcaggattctgggagaagagcagtacaaccggtaccagcagtatggtgcagaggagtgtgtcctgcagatggggggcgtgttatgcccccgccctggctgtggagcggggctgctgccggagcctgaccagaggaaagtcacctgcgaagggggcaatggcctgggctgtgggtttgccttctgccgggaatgtaaagaagcgtaccatgaaggggagtgcagtgccgtatttgaagcctcaggaacaactactcaggcctacagagtcgatgaaagagccgccgagcaggctcgttgggaagcagcctccaaagaaaccatcaagaaaaccaccaagccctgtccccgctgccatgtaccagtggaaaaaaatggaggctgcatgcacatgaagtgtccgcagccccagtgcaggctcgagtggtgctggaactgtggctgcgagtggaaccgcgtctgcatgggggaccactggttcgacgtgtagccagggcggccgggcgccccatcgccacatcctgggggagcatacccagtgtctaccttcattttctaattctcttttcaaacacacacacacacgcgcgcgcgcgcacacacactcttcaagtttttttcaaagtccaactacagccaaattgcagaagaaactcctggatccctttcactatgtccatgaaaaacagcagagtaaaattacagaagaagctcctgaatccctttcagtttgtccacacaagacagcagagccatctgcgacaccaccaacaggcgttctcagcctccggatgacacaaataccagagcacagattcaagtgcaatccatgtatctgtatgggtcattctcacctgaattcgagacaggcagaatcagtagctggagagagagttctcacatttaatatcctgccttttaccttcagtaaacaccatgaagatgccattgacaaggtgtttctctgtaaaatgaactgcagtgggttctccaaactagattcatggctttaacagtaatgttcttatttaaattttcagaaagcatctattcccaaagaaccccaggcaatagtcaaaaacatttgtttatccttaagaattccatctatataaatcgcattaatcgaaataccaactatgtgtaaatcaacttgtcacaaagtgagaaattatgaaagttaatttgaatgttgaatgtttgaattacagggaagaaatcaagttaatgtactttcattccctttcatgatttgcaactttagaaagaaattgtttttctgaaagtatcaccaaaaaatctatagtttgattctgagtattcattttgcaacttggagattttgctaatacatttggctccactgtaaatttaatagataaagtgcctataaaggaaacacgtttagaaatgatttcaaaatgatattcaatcttaacaaaagtgaacattattaaatcagaatctttaaagaggagcctttccagaactaccaaaatgaagacacgcccgactctctccatcagaagggtttatacccctttggcacaccctctctgtccaatctgcaagtcccagggagctctgcataccaggggttccccaggagagaccttctcttaggacagtaaactcactagaatattccttatgttgacatggattggatttcagttcaatcaaactttcagcttttttttcagccattcacaacacaatcaaaagattaacaacactgcatgcggcaaaccgcatgctcttacccacactacgcagaagagaaagtacaaccactatcttttgttctacctgtattgtctgacttctcaggaagatcgtgaacataactgagggcatgagtctcactagcacatggaggcccttttggatttagagactgtaaattattaaatcggcaacagggcttctctttttagatgtagcactgaaa

SEQ ID NO: 818 - protein, 437 aa, Homo sapiens
MIVFVRFNSSHGFPVEVDSDTSIFQLKEVVAKRQGVPADQLRVIFAGKELRNDWTVQNCDLDQQSIVHIVQRPWRKGQEMNATGGDDPRNAAGGCEREPQSLTRVDLSSSVLPGDSVGLAVILHTDSRKDSPPAGSPAGRSIYNSFYVYCKGPCQRVQPGKLRVQCSTCRQATLTLTQEFFFKCGAHPTSDKETPVALHLIATNSRNITCITCTDVRSPVLVFQCNSRHVICLDCFHLYCVTRLNDRQFVHDPQLGYSLPCVAGCPNSLIKELHHFRILGEEQYNRYQQYGAEECVLQMGGVLCPRPGCGAGLLPEPDQRKVTCEGGNGLGCGFAFCRECKEAYHEGECSAVFEASGTTTQAYRVDERAAEQARWEAASKETIKKTTKPCPRCHVPVEKNGGCMHMKCPQPQCRLEWCWNCGCEWNRVCMGDHWFDV

SEQ ID NO: 819 - DNA, 2513 bp, Homo sapiens
tccgggaggattacccaggagaccgctggtgggaggcgcggctggcgccgctgcgcgcatgggcctgttcctggcccgcagccgccacctacccagtgaccatgatagtgtttgtcaggttcaactccagccatggtttcccagtggaggtcgattctgacaccagcatcttccagctcaaggaggtggttgctaagcgacagggggttccggctgaccagttgcgtgtgattttcgcagggaaggagctgaggaatgactggactgtgcaggaatttttctttaaatgtggagcacaccccacctctgacaaggaaacaccagtagctttgcacctgatcgcaacaaatagtcggaacatcacttgcattacgtgcacagacgtcaggagccccgtcctggttttccagtgcaactcccgccacgtgatttgcttagactgtttccacttatactgtgtgacaagactcaatgatcggcagtttgttcacgaccctcaacttggctactccctgccttgtgtggctggctgtcccaactccttgattaaagagctccatcacttcaggattctgggagaagagcagtacaaccggtaccagcagtatggtgcagaggagtgtgtcctgcagatggggggcgtgttatgcccccgccctggctgtggagcggggctgctgccggagcctgaccagaggaaagtcacctgcgaagggggcaatggcctgggctgtgggtttgccttctgccgggaatgtaaagaagcgtaccatgaaggggagtgcagtgccgtatttgaagcctcaggaacaactactcaggcctacagagtcgatgaaagagccgccgagcaggctcgttgggaagcagcctccaaagaaaccatcaagaaaaccaccaagccctgtccccgctgccatgtaccagtggaaaaaaatggaggctgcatgcacatgaagtgtccgcagccccagtgcaggctcgagtggtgctggaactgtggctgcgagtggaaccgcgtctgcatgggggaccactggttcgacgtgtagccagggcggccgggcgccccatcgccacatcctgggggagcatacccagtgtctaccttcattttctaattctcttttcaaacacacacacacacgcgcgcgcgcgcacacacactcttcaagtttttttcaaagtccaactacagccaaattgcagaagaaactcctggatccctttcactatgtccatgaaaaacagcagagtaaaattacagaagaagctcctgaatccctttcagtttgtccacacaagacagcagagccatctgcgacaccaccaacaggcgttctcagcctccggatgacacaaataccagagcacagattcaagtgcaatccatgtatctgtatgggtcattctcacctgaattcgagacaggcagaatcagtagctggagagagagttctcacatttaatatcctgccttttaccttcagtaaacaccatgaagatgccattgacaaggtgtttctctgtaaaatgaactgcagtgggttctccaaactagattcatggctttaacagtaatgttcttatttaaattttcagaaagcatctattcccaaagaaccccaggcaatagtcaaaaacatttgtttatccttaagaattccatctatataaatcgcattaatcgaaataccaactatgtgtaaatcaacttgtcacaaagtgagaaattatgaaagttaatttgaatgttgaatgtttgaattacagggaagaaatcaagttaatgtactttcattccctttcatgatttgcaactttagaaagaaattgtttttctgaaagtatcaccaaaaaatctatagtttgattctgagtattcattttgcaacttggagattttgctaatacatttggctccactgtaaatttaatagataaagtgcctataaaggaaacacgtttagaaatgatttcaaaatgatattcaatcttaacaaaagtgaacattattaaatcagaatctttaaagaggagcctttccagaactaccaaaatgaagacacgcccgactctctccatcagaagggtttatacccctttggcacaccctctctgtccaatctgcaagtcccagggagctctgcataccaggggttccccaggagagaccttctcttaggacagtaaactcactagaatattccttatgttgacatggattggatttcagttcaatcaaactttcagcttttttttcagccattcacaacacaatcaaaagattaacaacactgcatgcggcaaaccgcatgctcttacccacactacgcagaagagaaagtacaaccactatcttttgttctacctgtattgtctgacttctcaggaagatcgtgaacataactgagggcatgagtctcactagcacatggaggcccttttggatttagagactgtaaattattaaatcggcaacagggcttctctttttagatgtagcactgaaa

SEQ ID NO: 820 - protein, 316 aa, Homo sapiens
MIVFVRFNSSHGFPVEVDSDTSIFQLKEVVAKRQGVPADQLRVIFAGKELRNDWTVQEFFFKCGAHPTSDKETPVALHLIATNSRNITCITCTDVRSPVLVFQCNSRHVICLDCFHLYCVTRLNDRQFVHDPQLGYSLPCVAGCPNSLIKELHHFRILGEEQYNRYQQYGAEECVLQMGGVLCPRPGCGAGLLPEPDQRKVTCEGGNGLGCGFAFCRECKEAYHEGECSAVFEASGTTTQAYRVDERAAEQARWEAASKETIKKTTKPCPRCHVPVEKNGGCMHMKCPQPQCRLEWCWNCGCEWNRVCMGDHWFDV

SEQ ID NO: 821 - DNA, 3366 bp, Homo sapiens
cgtgggatttccagaccgcggctttctaatcggctcgggaggaagctctgcagctctcttgggaattaagctcaatctctggactctctctctttctctttctccccctccctctcctgcgaagaagctcaagacaaaaccaggaagccggcgaccctcacctcctcgggggctgggaggaaggaggaaaacgaaagtcgccgccgccgcgctgtcccccgagagctgcctttcctcgggcatccctggggctgccgcgggacctcgcagggcggatataaagaaccgcggccttgggaagaggcggagaccggcttttaaagaaagaagtcctgggtcctgcggtctggggcgaggcaagggcgcttttctgcccacgctccccgtggcccatcgatcccccgcgcgtccgccgctgttctaaggagagaagtgggggccccccaggctcgcgcgtggagcgaagcagcatgggcagtcggtgcgcgctggccctggcggtgctctcggccttgctgtgtcaggtctggagctctggggtgttcgaactgaagctgcaggagttcgtcaacaagaaggggctgctggggaaccgcaactgctgccgcgggggcgcggggccaccgccgtgcgcctgccggaccttcttccgcgtgtgcctcaagcactaccaggccagcgtgtcccccgagccgccctgcacctacggcagcgccgtcacccccgtgctgggcgtcgactccttcagtctgcccgacggcgggggcgccgactccgcgttcagcaaccccatccgcttccccttcggcttcacctggccgggcaccttctctctgattattgaagctctccacacagattctcctgatgacctcgcaacagaaaacccagaaagactcatcagccgcctggccacccagaggcacctgacggtgggcgaggagtggtcccaggacctgcacagcagcggccgcacggacctcaagtactcctaccgcttcgtgtgtgacgaacactactacggagagggctgctccgttttctgccgtccccgggacgatgccttcggccacttcacctgtggggagcgtggggagaaagtgtgcaaccctggctggaaagggccctactgcacagagccgatctgcctgcctggatgtgatgagcagcatggattttgtgacaaaccaggggaatgcaagtgcagagtgggctggcagggccggtactgtgacgagtgtatccgctatccaggctgtctccatggcacctgccagcagccctggcagtgcaactgccaggaaggctgggggggccttttctgcaaccaggacctgaactactgcacacaccataagccctgcaagaatggagccacctgcaccaacacgggccaggggagctacacttgctcttgccggcctgggtacacaggtgccacctgcgagctggggattgacgagtgtgaccccagcccttgtaagaacggagggagctgcacggatctcgagaacagctactcctgtacctgcccacccggcttctacggcaaaatctgtgaattgagtgccatgacctgtgcggacggcccttgctttaacgggggtcggtgctcagacagccccgatggagggtacagctgccgctgccccgtgggctactccggcttcaactgtgagaagaaaattgactactgcagctcttcaccctgttctaatggtgccaagtgtgtggacctcggtgatgcctacctgtgccgctgccaggccggcttctcggggaggcactgtgacgacaacgtggacgactgcgcctcctccccgtgcgccaacgggggcacctgccgggatggcgtgaacgacttctcctgcacctgcccgcctggctacacgggcaggaactgcagtgcccccgtcagcaggtgcgagcacgcaccctgccacaatggggccacctgccacgagaggggccaccgctatgtgtgcgagtgtgcccgaggctacgggggtcccaactgccagttcctgctccccgagctgcccccgggcccagcggtggtggacctcactgagaagctagagggccagggcgggccattcccctgggtggccgtgtgcgccggggtcatccttgtcctcatgctgctgctgggctgtgccgctgtggtggtctgcgtccggctgaggctgcagaagcaccggcccccagccgacccctgccggggggagacggagaccatgaacaacctggccaactgccagcgtgagaaggacatctcagtcagcatcatcggggccacgcagatcaagaacaccaacaagaaggcggacttccacggggaccacagcgccgacaagaatggcttcaaggcccgctacccagcggtggactataacctcgtgcaggacctcaagggtgacgacaccgccgtcagggacgcgcacagcaagcgtgacaccaagtgccagccccagggctcctcaggggaggagaaggggaccccgaccacactcaggggtggagaagcatctgaaagaaaaaggccggactcgggctgttcaacttcaaaagacaccaagtaccagtcggtgtacgtcatatccgaggagaaggatgagtgcgtcatagcaactgaggtgtaaaatggaagtgagatggcaagactcccgtttctcttaaaataagtaaaattccaaggatatatgccccaacgaatgctgctgaagaggagggaggcctcgtggactgctgctgagaaaccgagttcagaccgagcaggttctcctcctgaggtcctcgacgcctgccgacagcctgtcgcggcccggccgcctgcggcactgccttccgtgacgtcgccgttgcactatggacagttgctcttaagagaatatatatttaaatgggtgaactgaattacgcataagaagcatgcactgcctgagtgtatattttggattcttatgagccagtcttttcttgaattagaaacacaaacactgcctttattgtcctttttgatacgaagatgtgctttttctagatggaaaagatgtgtgttattttttggatttgtaaaaatatttttcatgatatctgtaaagcttgagtattttgtgatgttcgttttttataatttaaattttggtaaatatgtacaaaggcacttcgggtctatgtgactatatttttttgtatataaatgtatttatggaatattgtgcaaatgttatttgagttttttactgttttgttaatgaagaaattcctttttaaaatatttttccaaaataaattttatgaatgacaaaaaaaaaaaaaaaaaaaaaaaaaaaaaaaaaaaaaaaaaaaaaaaaaaaaaaaaaa

SEQ ID NO: 822 - protein, 723 aa, Homo sapiens
MGSRCALALAVLSALLCQVWSSGVFELKLQEFVNKKGLLGNRNCCRGGAGPPPCACRTFFRVCLKHYQASVSPEPPCTYGSAVTPVLGVDSFSLPDGGGADSAFSNPIRFPFGFTWPGTFSLIIEALHTDSPDDLATENPERLISRLATQRHLTVGEEWSQDLHSSGRTDLKYSYRFVCDEHYYGEGCSVFCRPRDDAFGHFTCGERGEKVCNPGWKGPYCTEPICLPGCDEQHGFCDKPGECKCRVGWQGRYCDECIRYPGCLHGTCQQPWQCNCQEGWGGLFCNQDLNYCTHHKPCKNGATCTNTGQGSYTCSCRPGYTGATCELGIDECDPSPCKNGGSCTDLENSYSCTCPPGFYGKICELSAMTCADGPCFNGGRCSDSPDGGYSCRCPVGYSGFNCEKKIDYCSSSPCSNGAKCVDLGDAYLCRCQAGFSGRHCDDNVDDCASSPCANGGTCRDGVNDFSCTCPPGYTGRNCSAPVSRCEHAPCHNGATCHERGHRYVCECARGYGGPNCQFLLPELPPGPAVVDLTEKLEGQGGPFPWVAVCAGVILVLMLLLGCAAVVVCVRLRLQKHRPPADPCRGETETMNNLANCQREKDISVSIIGATQIKNTNKKADFHGDHSADKNGFKARYPAVDYNLVQDLKGDDTAVRDAHSKRDTKCQPQGSSGEEKGTPTTLRGGEASERKRPDSGCSTSKDTKYQSVYVISEEKDECVIATEV

SEQ ID NO: 823 - DNA, 3261 bp, Homo sapiens
gtgaacgaggcggctgtggcggtggctgaggcggctgggcctagggtgcagcgggcgcgtctgcggctggtgttggcgcatctctagatcctttcccggagttcagttatgggtgtgagaggtttgcaaggatttgtgggaagtacctgcccacatatatgtacagtagtaaatttcaaagaactggcagagcaccaccgaagcaagtatcctggatgtacccctaccattgtggttgatgccatgtgttgtctcagatattggtatactccagaatcttggatctgcggtggccagtggcgagaatacttttctgctttgcgagattttgttaaaacttttacggcagctgggatcaagttgatattcttctttgatggcatggtggagcaggataagagagatgaatgggtgaaacgaaggctcaagaacaacagggagatatccaggatttttcattacatcaagtcacacaaggagcagccaggcagaaatatgttcttcatcccctcagggctagctgtgtttacacgatttgctctaaagacactgggccaggaaactttgtgttctttgcaggaagcagattatgaggtagcttcctatggcctccagcataactgtcttgggattctgggggaagacactgattacctaatctatgacacttgtccctacttttcaattagcgagctctgcctagagagcctggacaccgtcatgctctgcagagagaagctctgtgagagtctgggcctctgtgtggccgaccttcctcttctggcctgcctccttggcaacgacataatcccagagggcatgtttgaaagctttaggtacaaatgcttatcgtcctacacctctgtaaaagagaactttgacaaaaaaggtaacatcatattagctgtgtcagaccatatatcgaaagttctttacttgtatcaaggtgagaaaaaattagaagagatattacctctgggaccaaacaaagctcttttttataaaggaatggcatcatatcttttaccaggacaaaaatctccatggtttttccaaaaacccaaaggtgtaataactttggacaaacaagtaatatccacgagttcagacgccgaatccagggaagaagttcccatgtgttcagatgctgaatccaggcaagaagttcccatgtgtacaggccctgaatccaggcgagaagttcccgtgtatacagattctgaacccaggcaagaagttcccatgtgttcagaccctgaacccaggcaagaagttcccacatgtacaggccctgaatccaggcgagaagttcccatgtgttcagaccctgaacccaggcaagaagttcccatgtgtacaggccctgaagccaggcaagaagttcccatgtatacagactctgaacccaggcaagaagttcccatgtatacagactctgaacccaggcaagaagttcccatgtatacaggctctgaacccaggcaagaagttcccatgtatacaggccctgaatccaggcaagaagttcccatgtatacaggccctgaatccaggcaagaagttttaatacggacagaccctgaatctaggcaagaaattatgtgtacaggccatgaatccaaacaggaagttcccatatgtacagatcctatatccaagcaagaagactccatgtgtacacacgctgaaatcaatcaaaaattacctgtagcaacagattttgaatttaagctagaagctctcatgtgtacaaaccctgaaattaaacaagaagaccccacaaatgtggggcctgaagtaaagcaacaagtaaccatggtttcagacactgaaatcttaaaggttgctagaacacatcacgtccaagcagaaagctacctggtgtacaacatcatgagcagtggagagattgaatgcagcaacaccctagaagatgagcttgaccaggccttacccagccaggccttcatttaccgtcccattcgacagcgggtctactcactcttactggaggactgtcaagatgtcaccagcacctgcctagctgtcaaggagtggtttgtgtatcctgggaacccactgaggcacccggacctcgtcaggccgctgcagatgaccattccagggggaacgcctagtttgaaaatattatggctgaaccaagagccagaaatacaggttcggcgcttggacacactcctagcctgtttcaatctttcctcctcaagagaagagctgcaggctgtcgaaagcccatttcaagctttgtgctgcctcttgatctacctctttgtccaggtggacacgctttgcctggaggatttgcatgcgtttattgcgcaggccttgtgcctccaaggaaaatccacctcgcagcttgtaaatctacagcctgattacatcaaccccagagccgtgcagctgggctcccttctcgtccgcggcctcaccactctggttttagtcaacagcgcatgtggcttcccctggaagacgagtgatttcatgccctggaatgtatttgacgggaagctttttcatcagaagtacttgcaatctgaaaagggttatgctgtggaggttcttttagaacaaaatagatctcggctcaccaaattccacaacctgaaggcagtcgtctgcaaggcctgcatgaaggagaacagacgcatcactggccgagcccactggggctcacaccacgcagggaggtggggaagacagggctccagctaccacaggacgggctctgggtatagccgttccagtcagggacagccgtggagagaccagggaccaggaagcagacagtatgagcatgaccagtggagaaggtactagtcaacctccagaaagagtatggagagaaaaagaggcacacctggacgcagagccctgccagcgccctcctctgctgttgcagctgcaaggagaccatgcctgtgggagccaggcctcgcttgcatgaagaaggaacgatgcctttttcaatggtgtctccctcccattgtgcagaagagcttttgttggcttctctcccgagcttgtgcctgattctgtggcccaaaacaatcattgttaacatcttcatgtgtttcattctgatctttcattcatatatatgatgcctagctaatttcattttaaaataaatgggaatctgttgtattctgattttttattagcaacactagattatgaggggttatctcctgttattaaaaagtcagaaaacactaaaaaaaaaaaaaaaaaaaaaaa

SEQ ID NO: 824 - protein, 910 aa, Homo sapiens
MGVRGLQGFVGSTCPHICTVVNFKELAEHHRSKYPGCTPTIVVDAMCCLRYWYTPESWICGGQWREYFSALRDFVKTFTAAGIKLIFFFDGMVEQDKRDEWVKRRLKNNREISRIFHYIKSHKEQPGRNMFFIPSGLAVFTRFALKTLGQETLCSLQEADYEVASYGLQHNCLGILGEDTDYLIYDTCPYFSISELCLESLDTVMLCREKLCESLGLCVADLPLLACLLGNDIIPEGMFESFRYKCLSSYTSVKENFDKKGNIILAVSDHISKVLYLYQGEKKLEEILPLGPNKALFYKGMASYLLPGQKSPWFFQKPKGVITLDKQVISTSSDAESREEVPMCSDAESRQEVPMCTGPESRREVPVYTDSEPRQEVPMCSDPEPRQEVPTCTGPESRREVPMCSDPEPRQEVPMCTGPEARQEVPMYTDSEPRQEVPMYTDSEPRQEVPMYTGSEPRQEVPMYTGPESRQEVPMYTGPESRQEVLIRTDPESRQEIMCTGHESKQEVPICTDPISKQEDSMCTHAEINQKLPVATDFEFKLEALMCTNPEIKQEDPTNVGPEVKQQVTMVSDTEILKVARTHHVQAESYLVYNIMSSGEIECSNTLEDELDQALPSQAFIYRPIRQRVYSLLLEDCQDVTSTCLAVKEWFVYPGNPLRHPDLVRPLQMTIPGGTPSLKILWLNQEPEIQVRRLDTLLACFNLSSSREELQAVESPFQALCCLLIYLFVQVDTLCLEDLHAFIAQALCLQGKSTSQLVNLQPDYINPRAVQLGSLLVRGLTTLVLVNSACGFPWKTSDFMPWNVFDGKLFHQKYLQSEKGYAVEVLLEQNRSRLTKFHNLKAVVCKACMKENRRITGRAHWGSHHAGRWGRQGSSYHRTGSGYSRSSQGQPWRDQGPGSRQYEHDQWRRY

SEQ ID NO: 825 - DNA, 1153 bp, Homo sapiens
gccgccgccgccatgaacattttccggctgactggggacctgtcccacctggcggccatcgtcatcctgctgctgaagatctggaagacgcgctcctgcgccggtatttctgggaaaagccagcttctgtttgcactggtcttcacaactcgttacctggatctttttacttcatttatttcattgtataacacatctatgaaggttatctaccttgcctgctcctatgccacagtgtacctgatctacctgaaatttaaggcaacctacgatggaaatcatgataccttccgagtggagtttctggtggtccctgtgggaggcctctcatttttagttaatcacgatttctctcctcttgagatcctctggaccttctccatctacctggagtccgtggctatccttccgcagctgtttatgatcagcaagactggggaggccgagaccatcaccacccactacctgttcttcctgggcctctatcgtgctttgtatcttgtcaactggatctggcgcttctactttgagggcttctttgacctcattgctgtggtggccggcgtagtccagaccatcctatactgtgacttcttctacttgtacattacaaaagtactcaagggaaagaagctcagtttgccagcataagtgccaaagaccatcaccagcatctgtccttcagggtgctcggacagaattcttaccacagcaaaggcataagatgcttgatacggaaaatcagaaacttaactcttttgttgcagatagtcatcagtggctctgtaaaaacgcagaggaaaagagccagaaggtttctgtttaatgcatcttgccttatctttttttattactgtgtacaaagatttttttacacaaagaaacttaatgctgtattaataaattcagtgtgtagcttcaattgggatagttccaaaagtgaagattttgtgaggaataagtgcaaattttttttttattttaaaaaattctttgaaactcttaagtctttgtgtctgcaatgaaattgtactccttgacagttgatagattatgtattcttccatccctcaaacttgcattccactatatttattttttggcaaaagatgagctgtatttgtttgaaatctgagacactatgttcaattgg

SEQ ID NO: 826 - protein, 212 aa, Homo sapiens
MNIFRLTGDLSHLAAIVILLLKIWKTRSCAGISGKSQLLFALVFTTRYLDLFTSFISLYNTSMKVIYLACSYATVYLIYLKFKATYDGNHDTFRVEFLVVPVGGLSFLVNHDFSPLEILWTFSIYLESVAILPQLFMISKTGEAETITTHYLFFLGLYRALYLVNWIWRFYFEGFFDLIAVVAGVVQTILYCDFFYLYITKVLKGKKLSLPA

SEQ ID NO: 827 - DNA, 3976 bp, Homo sapiens
atggccaccactgccacgccggccacgaaccagggctggccagaggactttggcttccggctaggtggctctggcccctgcttcgtcctggaggtggccaaggggagcagcgcgcatgccggaggactgcggccaggagaccagatcctggaggtggaggggctggcggtgggcggtctgagccgcgagcgcctcgtgcgcctggcacggcgctgcccacgtgtgccgcccagtctgggcgtgctcccggctcccgacggtggccccggcccaggatccggccccgcggccccgaccacagtcttgcgggccccgcggtgcggccgcggcctagctctgggccgtgagctgcttcgcctggccggccgcaagcgcccggacgcggtgcaccgagagcgcaggcgcaaggcccaagagttcagccgcaaggactcctccttgcaggtggatgaaatcttgggggaccagccaactgccaaggagcaggtgttcgctgcactgaagcagtttgcagctgagcagcgggtggatgatctggtgtggactctcaccctggcgctgccccgagaggcctgcgggccactcctggacaacctcaggatcttcatccccaagaagcaccgggcgcgcttcgacgaggtggtgtctcagggcctcctgggcaagctgtgccgcgcacgccgggcccagggcgcgcagcgactgcgccggagccgcagcgaggagcggccggagcgcctcctggtgtccacgcgcgccagcgccccgccgcgccgccccgatgagccgcccccgcgcagggcctccttgctggactgtccgagtctacaaaggcaacaagagcttcggcttcacacttcgcggccacgggcctgtctggatcgagtctgtcctgcctgggagcccagctgacaatgctgccctcaagtcaggtgaccggatcctcttcctcaatggactggacatgaggtcagaggctattggggacaccaggggttggaactgctcccacgacaaggtggtgtccatgctgcagggcagtggtgccatgcccacgctggtggtggaggaagggctcgtcccatttgccagtgactccgattctctggactcacccaacccgtcgtcggcgctcacctccctgcagtgggtggcggagatcctgccgtccagcatccgggtccaagggaggaccttcagccagcagctggagcacctactcacacctcctgagcgctatggggtctgccgggccctcgagagcttcttccagcacaggaacatcgacaccctcatcgttgacgtctaccctgtgctggacacccctgccaagcaggtcctgtggcagttcatctaccagctgctgacctatgaggagcaggagctctgtcaggagaaaatcgcatgcttcctgggctacacggccatgacagcagagccggagcctgagctggacctggagtccgagcccacgcctgagccccagccgcggagctccctgcgggcttcctccatgtgccgccgcagcctccggtcccagggcctggaggccggcctcagctgcggtcccagcgagtgccctgagatgcctcttcccctgatcccaggcgagcgccaggcaggcgacggcacgtccctccctgagacccccaaccccaagatgatgtcagccgtctatgcagagcttgagtctcgactgaacagcagcttcaaagggaagatggggaccgtgtccaaatcccgggcttcccctccaggccccagcccagcagtcaccacaggctcagccctggagctgcttctctgctccatcaggcttgcacctggaacctcggtgctggctgaagaggaatcctcatactccatccctcctccagggcccaggaccctgtccggcgtctcatggcccagcgagcgactcttgccctccccctgctaccacccgctgtgttcggggggtctggcctcccccagcagctctgagtcccacccctacgccagcctggacagcagcagggcaccctccccacagccaggccccgggcccatctgccccgacagccccccaagcccggaccccacccgcccgcccagccgcaggaagctcttcaccttctcccaccctgtgcgaagccgcgatactgaccgcttcctggacgtgctgagcgagcagctgggcccccgggtcaccatcgtggatgatttcctgaccccggagaacgactacgaggagatgagcttccatgatgaccagggcagcttcgtaaccaatgagcggagcagcgccagcgactgcatcagcagcagtgaagaaggcagctccctgacctactcctccatctctgaccacatccccccacccccgctcagccccccaccaccgccacccctgcctttccatgacgctaagcccagctcccgcagctctgatggttcccggggccctgctcaggcgctggccaagcccctcacccaactcagccacccagtccctccaccacccccaccgcccctgcccccacccgtgccctgtgcaccccccatgctgtcccggggcctgggccaccggcgcagtgagaccagccacatgagcgtcaagcgcttgcggtgggaacaggtggagaactcagaaggcaccatctggggtcagctcggggaagactctgactacgataagctgagtgacatggtgaaatacctcgacctggagctccacttcggcacccagaaacctgctaaaccggtgccggggccggagcccttccggaagaaggaggtggtggagatcctgtcccataagaaggcctacaacacctccatcctcttggcacacctgaagctgagccccgcggagctgcgccaggtgctgatgagcatggagccccggcgcctggagcccgcacatctcgcgcagctgctgctcttcgcgcccgacgccgacgaggagcagcgctaccaggccttccgcgaggcgcccggccgcctcagcgagccggaccagttcgtcctgcaggtgccgcgaccacaaccccgccccgaggcctcggccggctccacaggggctgtcgctgtggccagggctgctggggtcccgcgcgccttcgggggccgccattgcgcccaagcctctgagtcccagtttaacacctttaatggccgggtcctatcaggggtccaagttcccgaatacaagacacgcctgcgcagcctccacttccaggccaccctccaggagaagacagaggagatccgaggcagccttgaatgcttgcgccaggcctccctggagctcaaaaacagtcggaagctcgccaagatcctggagtttgtgttggccatgggcaactatctcaacgatggacagcccaaaaccaacaagactacgggcttcaagatcaactttctgacagagctgaactccaccaagacagtggatgggaagtccaccttcctgcacatccttgccaaatcgctgagccagcacttccctgaactcctgggctttgctcaggacctgcccaccgtgcccctggctgccaaagtgaaccaacgggccctgaccagtgacctggctgacctccatggcactatcagcgagatacaggatgcctgccagagcatttccccctctagcgaggacaagtttgcaatggtcatgtcggcatcctctgagcagcctgttcctgcaccaggctggatcctgggcgggctggctgtttccttaactgaggcctgtcagtccttcctggagacggcccagccagcacttcgggcgctcgacgggctgcagcgcgaggccatggaggagctgggcaaggcgctggccttctttggggaggattccaaggccaccacctctgaggctttcttcggcatctttgcagagttcatgagcaaattcgagcgagcgctgagtgacctgcaggccggggagggcctgcgcagctccgggatggtttcacccctggcctggtga

SEQ ID NO: 828 - DNA, 1704 bp, Homo sapiens
gcatttgactgcaactcttgtcgtcttatgtgggtgttgaattgatctgtctctgcaggccagatccaggctcctggaagaaccatgtccggcagctactggtcatgccaggcacacactgctgcccaagaggagctgctgtttgaattatctgtgaatgttgggaagaggaatgccagagctgccggctgaaaattacccaaccaagagaaatctgcaggatggactttctggtcctcttcttgttctacctggcttcggtgctgatgggtcttgttcttatctgcgtctgctcgaaaacccatagcttgaaaggcctggcaaggggaggagcacagatattttcctgtataattccagaatgtcttcagagagccgtgcatggattgcttcattaccttttccatacgagaaaccacaccttcattgtcctgcacctggtcttgcaagggatggtttatactgagtacacctgggaagtatttggctactgtcaggagctggagttgtccttgcattaccttcttctgccctatctgctgctaggtgtaaacctgttttttttcaccctgacttgtggaaccaatcctggcattataacaaaagcaaatgaattattatttcttcatgtttatgaatttgatgaagtgatgtttccaaagaacgtgaggtgctctacttgtgatttaaggaaaccagctcgatccaagcactgcagtgtgtgtaactggtgtgtgcaccgtttcgaccatcactgtgtttgggtgaacaactgcatcggggcctggaacatcaggtacttcctcatctacgtcttgaccttgacggcctcggctgccaccgtcgccattgtgagcaccacttttctggtccacttggtggtgatgtcagatttataccaggagacttacatcgatgaccttggacacctccatgttatggacacggtctttcttattcagtacctgttcctgacttttccacggattgtcttcatgctgggctttgtcgtggttctgagcttcctcctgggtggctacctgttgtttgtcctgtatctggcggccaccaaccagactactaacgagtggtacagaggtgactgggcctggtgccagcgttgtccccttgtggcctggcctccgtcagcagagccccaagtccaccggaacattcactcccatgggcttcggagcaaccttcaagagatctttctacctgcctttccatgtcatgagaggaagaaacaagaatgacaagtgtatgactgcctttgagctgtagttcccgtttatttacacatgtggatcctcgttttccaagcaaaaaaaaatggcttgtttgttttgatttctgctgtgcttataaatcactttcggtgggcaagggagagaggggaaaatgggtgttgactgaggaatcccccttgcttgtcttcttttgaaaccgggcatctctgaagtcctggtgtcaaggggatcaagagatgacttctcagaggttctaggtgatgctgagaccttggtgtctctaaactctgggcatgtggacaggaggggcttgcggccgtgtctctgacctgtgtgatgtgcaggagggtctcattgactcagcgcctgcgcgttagtgcctggctgtgctctcttttatgccccctctattctcctctctcccccaggggattttcatctcaacaacagagtg

SEQ ID NO: 829 - protein, 344 aa, Homo sapiens
MDFLVLFLFYLASVLMGLVLICVCSKTHSLKGLARGGAQIFSCIIPECLQRAVHGLLHYLFHTRNHTFIVLHLVLQGMVYTEYTWEVFGYCQELELSLHYLLLPYLLLGVNLFFFTLTCGTNPGIITKANELLFLHVYEFDEVMFPKNVRCSTCDLRKPARSKHCSVCNWCVHRFDHHCVWVNNCIGAWNIRYFLIYVLTLTASAATVAIVSTTFLVHLVVMSDLYQETYIDDLGHLHVMDTVFLIQYLFLTFPRIVFMLGFVVVLSFLLGGYLLFVLYLAATNQTTNEWYRGDWAWCQRCPLVAWPPSAEPQVHRNIHSHGLRSNLQEIFLPAFPCHERKKQE

SEQ ID NO: 830 - DNA, 1913 bp, Homo sapiens
atgagcgacatccgccactcgctgctgcgccgcgatgcgctgagcgccgccaaggaggtgttgtaccacctggacatctacttcagcagccagctgcagagcgcgccgctgcccatcgtggacaagggccccgtggagctgctggaggagttcgtgttccaggtgcccaaggagcgcagcgcgcagcccaagagactgaattcccttcaggagcttcaacttcttgaaatcatgtgcaattatttccaggagcaaaccaaggactctgttcggcagattattttttcatcccttttcagccctcaagggaacaaagccgatgacagccggatgagcttgttgggaaaactggtctccatggcggtggctgtgtgtcgaatcccggtgttggagtgtgctgcctcctggcttcagcggacgcccgtggtttactgtgtgaggttagccaaggcccttgtagatgactactgctgtttggtgccgggatccattcagacgctgaagcagatattcagtgccagcccgagattctgctgccagttcatcacctccgttaccgcgctctatgacctgtcatcagatgacctcattccacctatggacttgcttgaaatgattgtcacctggatttttgaggacccaaggttgattctcatcacttttttaaatactccgattgcggccaatctgccaataggattcttagagctcaccccgctcgttggattgatccgctggtgcgtgaaggcacccctggcttataaaaggaaaaagaagccccccttatccaatggccatgtcagcaacaaggtcacaaaggacccgggcgtggggatggacagagactcccacctcttgtactcaaaactccacctcagcgtcctgcaagtgctcatgacgctgcagctgcacctgaccgagaagaatctgtatgggcgcctggggctgatcctcttcgaccacatggtcccgctggtagaggagatcaacaggttggcggatgaactgaaccccctcaacgcctcccaggagattgagctctcgctggaccggctggcgcaggctctgcaggtggccatggcctcaggagctctgctgtgcacgagagatgacctgagaaccttgtgctccaggctgccccataataacctcctccagctggtgatctcgggtcccgtgcagcagtcgcctcacgccgcgctccccccggggttctacccccacatccacacgcccccgctgggctacggggctgtcccggcccaccccgccgcccaccccgccctgcccacgcaccccggccacaccttcatctccggcgtgacctttcccttcaggcccatccgctaggctggcccgtgtgtgccttctgcgctctcgctggacgaagcctttcgagatggaaggggtggccggactcccagaagagaacctcggggaaggggtcgggcagcccctccccgccggcagaaccgtcttggtgtcacggagtccaggtgcttcccacccggtcgcattctttgacatgcagattggatggtggagggaagagtccagcctctgccgagagcctgctgcgtgcatttttaaaagatgccgatcctgggagcctctgttctctgcgcatttcagacacagcctgtgtggcgaggagtgtgacggcaggagccacgggtgcaagcccgtgtgtctggcctctttcctcgtgaagacgatgtgtccccgccagaaaaagtgggcaccttctgcagccccgtgagctgagcccaggctgcgtagtgaccacaagcttatgtgcagcactgctcagggaggctgtcaggaattcccctcacctcggaaaggaacttctcagttttattgggggtgtctaaatttcctttcatatgttcaaataaatttttctaaacagt

SEQ ID NO: 831 - protein, 449 aa, Homo sapiens
MSDIRHSLLRRDALSAAKEVLYHLDIYFSSQLQSAPLPIVDKGPVELLEEFVFQVPKERSAQPKRLNSLQELQLLEIMCNYFQEQTKDSVRQIIFSSLFSPQGNKADDSRMSLLGKLVSMAVAVCRIPVLECAASWLQRTPVVYCVRLAKALVDDYCCLVPGSIQTLKQIFSASPRFCCQFITSVTALYDLSSDDLIPPMDLLEMIVTWIFEDPRLILITFLNTPIAANLPIGFLELTPLVGLIRWCVKAPLAYKRKKKPPLSNGHVSNKVTKDPGVGMDRDSHLLYSKLHLSVLQVLMTLQLHLTEKNLYGRLGLILFDHMVPLVEEINRLADELNPLNASQEIELSLDRLAQALQVAMASGALLCTRDDLRTLCSRLPHNNLLQLVISGPVQQSPHAALPPGFYPHIHTPPLGYGAVPAHPAAHPALPTHPGHTFISGVTFPFRPIR

SEQ ID NO: 832 - DNA, 5074 bp, Homo sapiens
tcctgtgcgtccccaggtcaccgctcgccctagttcccaggctttggcctccggtgggcgagaatcgcggagcctgcggggctgggcgccgaagagccgggccggcacccaagcgggcgcggggctgtgcgggccaggcggaggctcaagcggggatccccgagcacgacccccggagccgacggcgctggggcccaaggggccggccgggcggtgacgacggcggaggcgaaggggcggcgggacccgggcccggcccgtgtgcgtcctcgacggcccggccccggctccgcaggacggtgagccccagggagacggatctgggctccgggagggacgccccgcctggatttgtcccgtaggcccggcccgggcccctctggagcagaacggccttggtgaggtggacaggaagggacctcgcgagcagacgcgcgcccgcgacagcaatcccgccccggcctgtcgggagcggtggggcagaggctgcggagccccaggaggatctgcctccgctttcacagtcctccagatttttccaagagcagcagaaaatgaataaatccctggggccagtgtcattcaaggacgtggctgtggacttcacccaggaggaatggcagcagctggatcctgagcagaagataacttacagggatgtgatgctggagaactacagcaatctagtttctgtggggtatcacattatcaaaccggatgttatcagcaagttggagcaaggagaagagccatggatagtagaaggagaattcctacttcagagctatccagatgaagtctggcaaactgatgacctaatagagagaatccaggaagaggaaaataaaccttcaaggcaaactgtgttcattgagaccctgattgaagagagaggtaatgttcctggtaaaacttttgatgtagaaacgaaccctgttccttcaagaaaaatagcctataaaaatagcctctgtgactcatgtgaaaagtgtttaacgtctgtttcagaatatattagtagtgatggaagctatgcaagaatgaaagctgatgaatgtagtggatgtgggaaatcactcctccatattaagcttgagaaaactcatccaggagatcaagcttatgaatttaatcaaaatggggaaccttatactctaaatgaagaaagtctttatcagaaaattcgtattttggagaaaccttttgaatatattgaatgccagaaagccttccaaaaggacactgtttttgttaatcacatggaagaaaagccctataagtggaatggatctgaaatagcctttctccagatgtcggacctcactgtacatcagacatctcatatggaaatgaagccctatgaatgcagtgaatgtgggaaatccttctgtaaaaagtcaaaatttattatacatcagaggactcacacaggagagaaaccttacgaatgtaatcagtgtgggaaatccttctgccagaagggaacccttactgtgcatcagagaacacacacaggggagaagccctatgaatgtaatgaatgtgggaagaacttttaccagaagttacacctcattcagcatcagagaactcactcaggagagaagccctatgaatgtagttattgtggaaaatccttttgccagaagacacacctcacacaacatcagagaacacattcaggagagagaccttatgtttgtcatgactgtgggaaaaccttctcgcagaagtcagcacttaatgaccatcagaaaattcacacaggtgtgaaactctacaagtgtagtgaatgtgggaaatgcttctgccgcaagtctactctcacgacccacctgaggacccacacaggagagaaaccgtatgaatgtaatgagtgtggaaaattcttctctcggttgtcatatctcactgtacattatagaactcattcaggagagaaaccctatgaatgtaatgaatgtggaaaaaccttctacctgaattcagccctcatgagacatcagagagtgcacacaggagagaaaccttacgaatgtaatgaatgtggaaagttattctcccagttgtcatacctcactatccatcatagaactcattcaggagtaaaaccctatgaatgtagtgaatgtgggaaaaccttctaccagaactcagccctttgtagacatcggagaatacacaaaggagagaagccctatgaatgctatatatgtggaaaattcttctctcagatgtcatacctcactatacatcatagaattcattcaggagagaagccctatgaatgtagtgaatgtgggaaaaccttctgccagaattcagcccttaatcgacatcagagaacacacacaggagagaaagcctacgaatgttatgaatgtgggaagtgcttctctcagatgtcctatctcactatacatcatcgaattcattcaggagagaaaccctttgaatgtaatgagtgtggaaaagccttctctcggatgtcatacctcactgtacattatagaactcattcaggagagaaaccctatgagtgtactgaatgtggaaaaaaattctaccacaaatcagcattcaacagccatcagagaattcataggagaggcaatatgaatgtaatagatgtgggaaggcttctctgaagtcagacctcattttatatcagagaaccctttcagtatagtgaatcagaaactcctgcctgaagtcaaacaccttgtacatcagagagttcacacaggttagtgtggacatccccttgtgtgttggactcataatctgaagactcacagaatggaaaccatgattataacaagaccacatggtataacaatactagactatagacaagtaaaaatttataaatattaagaatgtatatacatgtcaccatggattggaactgttttgcatatcagggaaatcatagccaaggggaaatctatcagtataaggaatgtggaagacataatcctttggaaactgttaatactaaaagatatgtttctgatacaatagcaaacttgaaaaaaaaaaaagaaatagaagattcctgctgtgaataaacatacttcttgtgtaaatagaaactgtaaagtcatcaggatagctagttaagtcggtaaccttaaactcatgtaagcagttcccaaagaacataggacttatgtttggggagagggttgtttttattacagtacattacaggaattgtatgttcacttcgaatcatgtttgaaaaaacgttgtatccttattttgtaattcatatagtaagagtattctaaacagcactacattaatatcatttgataggtataaagtatactttttcttgcactcttctctaggatttaatgcattgatcattcttaatgaacaatatcagctctaaaggaccaatgcttttataatgttttcaactgtatctgagtcagccagagagataaatatccatgtataaaatagatagaaaactttgcttggtaatttaaaattaataatgccagttttccaagagtgagaaaatcattgcactctatacagttttaagatatacttaaaatattcccatttgtatctatttttttttctactgttttttatttggacacttacataacagtgcagagcacaatgctgtgtaacataggaattcactgtgttttcatttgatgtcgtactggttttaaaccttgtgctctactccttcctgttaatgaattaagaacacattctaacaagggtctgtggcagacattgccgagtgactttctaacataggaattcactgtgttttcatttgatgtcgtactggttttaaaccttgtgctctactccttcctgttaatgaattaagaacacattctaacaagggtctgtggcagacattgccgagtgactttcttagtcactcccttactctgctggcggagtttggttatccatttatcctcaaaaggaagtgagataaatcctgattagttttaaccagtgacactccccttctcgttgccagcagttgatttacagtggtcacagggcccaattctagacataaaacaaaggatatacctgacagactacttctggaaaaggttttctcaaaggcccaaggattcaagcaaagggaagtggaatcttgtggtgaacagtaccttgtctggatgtggtgcctggtaaccatctttcagcaatggattatagtttaatcatggcctgagcagaaatactgaaagaccctgagacctggatgatgtctttgagccaccaaaccaagcagccttgtagccactcctcctttggactgtttcttttgtgagagactaaacttatttttaagccagttgatttaggatgctctattactaataactgaagacattctaattggtacagactgaaacctttataggagttatgcagttcagaagtggactttaggtaagtcatttattttaagctgttgatatagagatttattttctgtaaattttgacgtaaatagtttgagcattagaaatcaacttgaaacaataaaatgtatgcttccttgaactgtcatatcgttgacctgcaaaattcacctttggaacgtgacacaatgttaggcatacctccttttttctaatacatggaatacattttgttggaggtaatttatgtgattcatataccactgctacagtgttagctgacaacatatagtatgaggtaaggatctaattctgtttcctctcacatgattacttgatagctaagcatctgattggtttactgctttaccactgagctgaaatgccgtgttttccatttattaaaatcacacatggctcctgtttttgtcactcagcactttttctccatattcttcaagacgattgtgagtatggtacgtaacaggaattacatctggtaagttgtatagttttgtgtaggaactctatattcatagcatatttgtggaaatgatacctatggaggtttctcacactggtgtgtcattatacattaattgtacaatatgcattttcagtaaaatatttgaaaactgtaaaaaaaaaaaaaa

SEQ ID NO: 833 - protein, 697 aa, Homo sapiens
MNKSLGPVSFKDVAVDFTQEEWQQLDPEQKITYRDVMLENYSNLVSVGYHIIKPDVISKLEQGEEPWIVEGEFLLQSYPDEVWQTDDLIERIQEEENKPSRQTVFIETLIEERGNVPGKTFDVETNPVPSRKIAYKNSLCDSCEKCLTSVSEYISSDGSYARMKADECSGCGKSLLHIKLEKTHPGDQAYEFNQNGEPYTLNEESLYQKIRILEKPFEYIECQKAFQKDTVFVNHMEEKPYKWNGSEIAFLQMSDLTVHQTSHMEMKPYECSECGKSFCKKSKFIIHQRTHTGEKPYECNQCGKSFCQKGTLTVHQRTHTGEKPYECNECGKNFYQKLHLIQHQRTHSGEKPYECSYCGKSFCQKTHLTQHQRTHSGERPYVCHDCGKTFSQKSALNDHQKIHTGVKLYKCSECGKCFCRKSTLTTHLRTHTGEKPYECNECGKFFSRLSYLTVHYRTHSGEKPYECNECGKTFYLNSALMRHQRVHTGEKPYECNECGKLFSQLSYLTIHHRTHSGVKPYECSECGKTFYQNSALCRHRRIHKGEKPYECYICGKFFSQMSYLTIHHRIHSGEKPYECSECGKTFCQNSALNRHQRTHTGEKAYECYECGKCFSQMSYLTIHHRIHSGEKPFECNECGKAFSRMSYLTVHYRTHSGEKPYECTECGKKFYHKSAFNSHQRIHRRGNMNVIDVGRLL

SEQ ID NO: 834 - DNA, 1738 bp, Homo sapiens
gtctgcagactcgtgaatgacgtctaccgcgtgtataatcgacaccagtatccatttgttgttcttaacatttctgttgattcaggtaacttaataaaaatgcatgcagcggatttggaaaagcccatggtagaaaagcaggatcaatccccttcattaaggactggagaagaaaaaagggacgtgtccatttccagactgcgagaggccttttctcttcgtcacacaacagagaacaagcctcacagcccaaagactccagaaccaagaaggagccctctaggacagaaaaggggtatgtcgtcttctagcacttcagatgccatctctgacaaaggcgtcctgagacctcagaaagaggcagtgagttccagtcagggacccagtgaccctacggacagagcggaggtggagaaggactcggggcatggcagcacttccgtggattctgaggggttcagcatcccagacacgggcagtcactgcagcagcgagtgtgtggccagcaccccaggggacaggggctcgcaggaacatgtggactctcaggagaaagcgcctgaaactgacgactctttttcagatgtggactgccattcaaaccaggaagataccggatgtaaatttcaggttttgcctcagccaactaatctcacatccccaaacacaaaagtgttttaagaaagaagaaattctttccaattctgacattcgtcaaaagttagtaaatactcagaacgtgtcagcttctcaggttgatgtagctgtgaaaattaataagaaagttgtgcccctgaacttttctgagttctttagctaaacgaataaagcagttacatcatgaagcacagcaaagtgaaggggaacagaattacaggaagtttagggcaaggatttgtcctggagaaaatcaagcagccgaagatgaactaagaaaagagataagtaaaacgatgtttgcagaaatggaaatcattggtcagtttaacctgggatttataataaccaaactgaatgaggatatcttcatagtggaccagcatgccacggacgagaagtataacttcgagatgctgcagcagcacaccgtgctccaggggcagaggctcatagcacctcagactctcaacttaactgctgttaatgaagctgttctgatagaaaatctggaaatatttagaaagaatggcttcgattttgttatcgatgaaaatgctccagtcactgaaagggctaaactgatttccttgccaactagtaaaagctggaccttcggaccccaggacgtcgatgaactgatcttcatgctgagcgacagccctggggtcatgtgccggccttcccgagtcaagcagatgtttgcctccagagcctgccggaagtcggtgatgattgggactgctcttaacacaagcgagatgaagaaactgatcacccacatgggggagatggaccacccctggaactgtccccatggaaggccaaccatgagacacatcgccaacctgggtgtcatttctcagaactgaccgtagtcactgtatggaataattggttttatcgcagatttttatgttttgaaagacagagtcttcactaaccttttttgttttaaaatgaaacctgctacttaaaaaaaatacacatcacacccatttaaaagtgatcttgagaaccttttcaaaccagatggagcattgcttgcaaattttttttctctatgtttgcatgcgctcgt

SEQ ID NO: 835 - DNA, 3106 bp, Homo sapiens
gggacgccgagagcccggcaacacctcagcccgagcccggcgaggtctctgggctcctggagcgagagaggtggcatctcactacgtggcctaggctgatctccctctcctggactcacatgatcctcccaccttggcccttcaacgtgctgagatcgcaggtgtgagccaccacacccggccctgataaaactcatcagtgctttgaaacaagcagctctgaaccaaagaaatcatttgattcaagtaaccattggatcttcccaaggcaatggtgaaagaaaagaaaaaagcagacaaaaaaggggagaagtctgcccgctctccctcatctctctctgataatctagacttttccaaacaagatggcaacaccactaggcaagagatgtccccagctggtgtcccattgctgggaatgcagctcaacgaagtgaaacccaaaaaagaccgccaaaacgttcagcagaacgaagatgccagccaatacgaagagtccattctgaccaaactcatagtggaaagctatgaaggggaaaaggttcgtgggctgtatgagggagaaggcttcgcagcctttcaaggcggttgtacctatcgtggtatgttttcagaaggactcatgcatggacaggggacttatatttgggccgatggattaaaatatgagggcgactttgtgaagaatgtcccgatgaaccacggcgtgtacacgtggccggacggcagcatgtatgaaggcgaagtggtcaacggcatgaggaacggattcgggatgttcaagtgcagcacccagcctgtgtcctacatcggccactggtgcaatggcaagcggcacgggaagggctccatttattacaatcaagagggtacgtgttggtacgagggagactgggtacaaaacatcaaaaagggctggggaataagatgttataaatctggaaatatatacgaaggccagtgggaagacaacatgcgccacggggaggggaggatgaggtggctgaccaccaacgaagagtacaccgggcggtgggagaggggcatccagaatggctttggaacacacacatggtttctaaagagaatccgcagttcccagtatcctttgagaaatgaatacataggggagtttgtaaatggatatcgtcacggacgtggcaagttttattatgccagtggagccatgtatgatggagaatgggtttccaataagaaacatggcatgggccgattaactttcaagaacgggcgtgtgtacgaaggcgcattctccaatgaccacatagctgggtttccggatcttgaagttgaattcatcagctgcctggacctgtcttcaggagttgccccaagactgtccaggagcgccgaactgatcagaaagcttgatggcagtgaaagtcattctgtgttgggatcgagcattgagctggatctaaatttgctcctggacatgtaccctgagacagtccaacctgaagaaaagaagcaggtggaatatgccgtcttaagaaatattacagaattaagaagaatttacagcttttacagcagcctgggatgcggccactctctggataatacctttctgatgacaaagcttcacttctggagatttctaaaagattgcaaatttcatcaccacaaactaactcttgctgatatggacaggatattaagtgccaataatgacataccagttgaagaaatccattctccatttacaacaatacttttgagaacatttttgaattacctcctgcatttggcgtaccacatttatcatgaagaattccaaaagagaagcccatccctcttcttgtgttttacaaaactgatgaccgagaacattcgtccaaatgcctgccagataaaaggcaatttattccgtgagcaacagcggacgctctactctatgagttacatgaataagtgctgggagatttatctcgcttactgcagacccagtgcagcgcctccccacgagcctacgatgaagatgagacacttcctctggatgctgaaagactttaaaatgataaataaagaattaacagcagctacatttatggaggtcatagcagaggataatcgtttcatatatgatggaattgacagcaactttgaacctgagctggttttcctggaattctttgaagctctcttaagctttgcattcatctgtgttactgaccaaatgactaaatcctatacaaatgttccagctgatgatgtgtctggaaataaacatgaaactatttatacaatactaaatcaggacgcccagaacaagagtcccagcgcggtcatgagccacgaatcggatgctgctcactctgacagtgccaggtcatcttccagcaagttagaactctcgcctgatgttaacaaaataaggaaatcagagcccaagatcaagaagtctgtaagtcatgaaagagtctccaaaatgaattttaaattgactggaaaagggatcacctttttctcatctgagagcaagaaatatgagagacccaaggatgatcgagaggaagagttcaacacgtgggtcaataatacgtacgtcttctttgtgaacacgctctttcatgcgtataaacgtgaagaagctatcaaggagaaaataagggcagacaggttacgtagcacagcacaggcccagcagcggaagatggaagatgacgaactggaagcaaggctgaacatctttatcttgagagaggaagaggccaagagacatgactatgaggtggacatcacagtgctcaaggagccggcagacgtgtcatcctctcacctcatactggaccctcccaaggaggatgtgaccgtgtccccatccagcaagaccatcaccagcaagaagaagaaaaagtagagagacacgaggacacacacacaggcttaggatggcacgtgctgtaagatttcctgagcattacagttcttagcactgaactcgtcacagtgttttaacataccccttggcccactgcatctcaggtttcctacatggctggattacgggagttcgagaccagcctgggcaacatagtgagacccccccatctctgcaaaattaaaacatcagccgaccgtg

SEQ ID NO: 836 - protein, 870 aa, Homo sapiens
MVKEKKKADKKGEKSARSPSSLSDNLDFSKQDGNTTRQEMSPAGVPLLGMQLNEVKPKKDRQNVQQNEDASQYEESILTKLIVESYEGEKVRGLYEGEGFAAFQGGCTYRGMFSEGLMHGQGTYIWADGLKYEGDFVKNVPMNHGVYTWPDGSMYEGEVVNGMRNGFGMFKCSTQPVSYIGHWCNGKRHGKGSIYYNQEGTCWYEGDWVQNIKKGWGIRCYKSGNIYEGQWEDNMRHGEGRMRWLTTNEEYTGRWERGIQNGFGTHTWFLKRIRSSQYPLRNEYIGEFVNGYRHGRGKFYYASGAMYDGEWVSNKKHGMGRLTFKNGRVYEGAFSNDHIAGFPDLEVEFISCLDLSSGVAPRLSRSAELIRKLDGSESHSVLGSSIELDLNLLLDMYPETVQPEEKKQVEYAVLRNITELRRIYSFYSSLGCGHSLDNTFLMTKLHFWRFLKDCKFHHHKLTLADMDRILSANNDIPVEEIHSPFTTILLRTFLNYLLHLAYHIYHEEFQKRSPSLFLCFTKLMTENIRPNACQIKGNLFREQQRTLYSMSYMNKCWEIYLAYCRPSAAPPHEPTMKMRHFLWMLKDFKMINKELTAATFMEVIAEDNRFIYDGIDSNFEPELVFLEFFEALLSFAFICVTDQMTKSYTNVPADDVSGNKHETIYTILNQDAQNKSPSAVMSHESDAAHSDSARSSSSKLELSPDVNKIRKSEPKIKKSVSHERVSKMNFKLTGKGITFFSSESKKYERPKDDREEEFNTWVNNTYVFFVNTLFHAYKREEAIKEKIRADRLRSTAQAQQRKMEDDELEARLNIFILREEEAKRHDYEVDITVLKEPADVSSSHLILDPPKEDVTVSPSSKTITSKKKKK

SEQ ID NO: 837 - DNA, 1786 bp, Homo sapiens
gtgggaggctcccgaggtgggggccggggcgggatggctgcagcggcggccggggccgggagcgggccctgggcggcccaggagaagcagttcccgccggcgctgctgagtttcttcatctacaacccgcgcttcgggccgcgcgaaggacaggaggaaaataagattttattttatcatccaaatgaggtagaaaagaatgagaagattagaaatgtcggattgtgtgaagctattgtacagtttacaaggacatttagcccatcaaaacctgcaaaatctttacatacacagaagaacagacagttcttcaatgaaccagaagaaaatttctggatggtcatggttgttcggaatcctataattgaaaaacagagtaaagatggaaaaccagttattgaatatcaagaggaggagttgttggacaaggtttatagctcggtgctgcggcagtgctacagcatgtacaagctttttaatggtacatttctgaaagccatggaagacggaggcgtcaagcttctgaaagaaagattagagaaattcttccatcggtatttgcaaacgctacatttgcagtcatgtgacctacttgacatttttggtggaatcagcttcttcccgttggataaaatgacttatttgaaaatccagtcctttattaatagaatggaggaaagcctgaatatagtcaaatacactgcttttctctataacgatcagctcatctggagtggattagaacaagatgacatgagaattttatacaaataccttaccacctcccttttcccaaggcacatcgaacctgagttagcaggaagggattctccaataagagcagaaatgccaggaaatcttcaacactatggaagatttcttaccggacccttgaacctcaatgatccagatgcaaaatgcagattccccaaaatttttgtaaatacagatgacacttatgaagagctccatttaatcgtttataaggccatgagtgcggctgtgtgctttatgatcgacgcctctgtccacccaacgttggatttttgccgaagactggacagcatcgttgggccccagctcacagtgctggcctctgacatctgtgaacagtttaacatcaacaagaggatgtctgggtctgagaaagaaccccagtttaagtttatctacttcaaccacatgaatctcgccgagaagagcacagttcacatgaggaaaacgcccagcgtgtcgctcacttccgtgcacccggatttaatgaagattctcggtgacatcaacagtgactttaccagagtggatgaagatgaggagatcattgtgaaggccatgagtgattactgggttgttggaaagaagtctgatcggcgggagctctatgttattttgaatcaaaaaaatgcaaacctgattgaagtaaatgaagaggtcaagaaactttgtgcaacgcagttcaacaacatcttcttcttggattgacggatgacggctcaccgagagcatatctaaaaaacactctgcaaacatttggtcacatgcaagttagtggtcatatgacggactgcattcaggacaagggtaaagcaatacttgctttgaagaatcagatttcgactcggtctgctgatctgaggtttttagattttaaatatttatgtggaattaattaaaggtagttggctatatcgctatcatttcattcttttgacattatttgaatattttactggaaaataagactaataaattgttaaaagttttttaaaaaaaaaaaaaaaaaaaa

SEQ ID NO: 838 - protein, 482 aa, Homo sapiens
MAAAAAGAGSGPWAAQEKQFPPALLSFFIYNPRFGPREGQEENKILFYHPNEVEKNEKIRNVGLCEAIVQFTRTFSPSKPAKSLHTQKNRQFFNEPEENFWMVMVVRNPIIEKQSKDGKPVIEYQEEELLDKVYSSVLRQCYSMYKLFNGTFLKAMEDGGVKLLKERLEKFFHRYLQTLHLQSCDLLDIFGGISFFPLDKMTYLKIQSFINRMEESLNIVKYTAFLYNDQLIWSGLEQDDMRILYKYLTTSLFPRHIEPELAGRDSPIRAEMPGNLQHYGRFLTGPLNLNDPDAKCRFPKIFVNTDDTYEELHLIVYKAMSAAVCFMIDASVHPTLDFCRRLDSIVGPQLTVLASDICEQFNINKRMSGSEKEPQFKFIYFNHMNLAEKSTVHMRKTPSVSLTSVHPDLMKILGDINSDFTRVDEDEEIIVKAMSDYWVVGKKSDRRELYVILNQKNANLIEVNEEVKKLCATQFNNIFFLD

SEQ ID NO: 839 - DNA, 750 bp, Homo sapiens
atgtgcaaactatccgctcagcagagtgtggagtttctgttcctgggttatggtgtgtgctcggtggggctggagtggctggcttacctcctcgtggcttacagcctgggcgcctcagccgcctcactcctggttctgctgggcctgtggctgccacacccggtgcccctcgtggctggagaaggggtgcacctgctgctcaccttcatcctctttttctgggcccctgtgcctcaggtcctgcaacacagctggatcctctgtgtggcagccgccctttggggtgtgggcagcgccctgaacaagactggactcagcacactcctgggaatcttgtacgaagacaaggagagacaggacttcatcttcaccatctaccactggtggcaggctgtggccatcttcaccgtgtacctgggctccagcctgcacatgaaggctaagctggcggtgctgctggtgacgctggtggtggccgcggtctcctacctgcggatggagcagaagctgcggcggggcgtggccccgcgccagccccgcatcccgcggccccagcacaaggtgcgcggtgacggctacttggaggaggacaactcggacgagagcgacgcggagggcgagcatggggacggcgcggaggaggaggcgccgcccccggggcccaggcctggccccgagcccgctggactcggccgccggccctgcccgtacgaacaggcgcaggggggcgacgggccggaggagcagtga

SEQ ID NO: 840 - protein, 249 aa, Homo sapiens
MCKLSAQQSVEFLFLGYGVCSVGLEWLAYLLVAYSLGASAASLLVLLGLWLPHPVPLVAGEGVHLLLTFILFFWAPVPQVLQHSWILCVAAALWGVGSALNKTGLSTLLGILYEDKERQDFIFTIYHWWQAVAIFTVYLGSSLHMKAKLAVLLVTLVVAAVSYLRMEQKLRRGVAPRQPRIPRPQHKVRGDGYLEEDNSDESDAEGEHGDGAEEEAPPPGPRPGPEPAGLGRRPCPYEQAQGGDGPEEQ

SEQ ID NO: 841 - DNA, 834 bp, Homo sapiens
atgaaagctgacattggctcctgtgccccacctctgggcctggtttgcccttccccaggggaaccaacgtcctcctgtccccaaacccaaggaggagtggtgggtttctggaactcttgtaacccgactgaatatttaccaggttacctaaccaaactcctgcaaaaccacaccacatatgcctgtgatggggactatttcaatctacagtgccctcggcattctacgataagtgtccaatcggcattttatgggcaagattaccaaatgtgtagttcccagaagcctgcctcccagagggaagacagcttaacctgtgtggcacccaccaccttccaggatcagtggtgggccctgaggacagccaagggacatttctcgaggccctggaaatcatcagccacctccagcaacttcaccgggcctccctgggaagtctcccttgctgctgaggggcaccaagttcccaagaacatactcacagtgattgatccagccattgctaatctaaaaccttctttgaagcagaaagatggtgaatatggtatgaactccgaccctagcgaatcgaaggttctgaggaaagatggaattcttgttagcgactctatggcagcctttgcgtacattagagataggccagtgtgccgcagaggtgcttgtggacatcaggctgggccatttcgacctaaacaggcagtggccaccagccaacatcacacagtgctgagcgccatcctcaatgctgctggggacaggtgcccagacaactctcagtcgcacccccggccccactgtggggatatgacccacgggatgagctggggtctctag

SEQ ID NO: 842 - protein, 277 aa, Homo sapiens
MKADIGSCAPPLGLVCPSPGEPTSSCPQTQGGVVGFWNSCNPTEYLPGYLTKLLQNHTTYACDGDYFNLQCPRHSTISVQSAFYGQDYQMCSSQKPASQREDSLTCVAPTTFQDQWWALRTAKGHFSRPWKSSATSSNFTGPPWEVSLAAEGHQVPKNILTVIDPAIANLKPSLKQKDGEYGMNSDPSESKVLRKDGILVSDSMAAFAYIRDRPVCRRGACGHQAGPFRPKQAVATSQHHTVLSAILNAAGDRCPDNSQSHPRPHCGDMTHGMSWGL

SEQ ID NO: 843 - DNA, 14188 bp, Homo sapiens
ccggcctcgcgttccctcggacggttgcccaatggcagcccaggtggcagcccgggaggcgcgagacttcagagaagccccgacccttcgcctaacctcgggggccggcctggaggcagtgggcgctgtggagctcgaggaggaggaggagaacgaggaggaggcggcggccaggagagcgcggagtttcgcccaagacgcgcgggtgcgcttcctcggcggccgcctggcgatgatgctggggttcacggaggagaaatggagccagtatttggaaagcgaggacaaccggcaggttcttggggagtttctggaaagcaccagcccggcttgccttgtgtttagcttcgccgcctcggggcgccttgcggcttcccaggagattccaagagatgcaaaccataaacttgtttttatttccaagaagattactgaaagcattggagtaaatgacttttctcaagtggttttatttggagagttacctgcgttgtctcttggacatgtatctgctttccttgatgagattttagtgccagttctttctaataagaacaaccataagtcctggtcctgttttacttcacaagatatggaatatcacatagaagtcatgaaaaagaagatgtatatttttaggggcaaaatgtctagaagaactcttctaccaattcccactgttgcaggaaagatggatctggatcagaattgttcagagaacaagccaccgtcaaacgaaaggataatacttcatgcaattgaatctgtggttattgaatggtcacatcaaatccaagaaattatagaaagagattcagtgcagcgtttgttgaatggtcttcacttgtctcctcaagcagaactagatttctggatgatgaggagagaaaatctgtcatgcatttatgatcaacttcaggcacctgttgtcctcaaaatggttaagatcctgacaactaaacaaagcagctattttcctactctgaaggacatttttctggctgtggaaaatgctcttctcgaagcccaagatgtggaactttacctgagacctctgaggagacacatccagtgtctccaggagacggaattcccacagacacgcatattaatcgctccattatttcataccatctgtctgatctggagtcattccaagttttataacaccccagctcgggttatagttttattgcaagagttttgtaatctcttcattaaccaggcaacagcttacctttcacctgaggaccttttgaggggagaaatagaagagtcactggaaaaggtgcaggtggctgttaacatcttaaagactttcaaaaactcctttttcaactatagaaaaaaattggcaagctactttatgggaagaaagctgagaccatgggatttccagtctcatctggtgttttgcagatttgacaagtttcttgatcgtttaataaaaatagaggatatatttgccaccactttggaatttgaaaagctggaaagactggaatttggtggtaccaaaggagcaattttaaatggacaagtccacgagatgagtgaagaacttatggaactctgtaaactttttaaacagagcacttatgacccatctgattgcactaacatggagtttgaaagtgattatgtggcatttaagtccaaaactctggaatttgacagaaggcttgggacaattatttgtgaagctttctttaactgcaatggcttagaagctgcatttaagcttttgaccatatttggaaattttctagagaagccagttgtcatggaaattttcagcctacattacagcacactagtgcatatgtttaatacagagctggatgtgtgtaagcaactgtataatgaacacatgaaacagattgaatgtggtcatgtagttcttaacaagaacatgccatttacctcaggaaatatgaaatgggcccagcaggttctccaacgacttcaaatgttttggtcaaacttcgcatctctccgttatctatttttgggcaatcctgatcacgctttagtttatcaaaagtatgttgaaatgaccactttgcttgatcaatttgaaagtcgtatctataatgaatggaaaagtaatgtggatgaaatctgtgaattcaatttgaatcaacccttggttaaattcagtgccataaatggtcttctctgtgtcaattttgacccaaagctagtggctgtattgagagaagtgaaatatcttttgatgttgaagaaacaagacataccagattcagctttagccatcttcaagaaaaggaacactattttaaagtacattggaaatcttgaccttcttgtgcaagggtataataaactcaaacagacgctcctggaagttgaataccctctgattgaagatgagctgagggctattgacgagcagctgacagcagccacaacgtggctgacatggcaggatgactgctggggctacatcgagagggtgagggcagccacgtccgagttggagcacagagttgagcgcacacagaaaaacgtgaaggtgatccagcagaccatgaggggctgggccaggtgcgtgctacctcccaggagagagcacagacgagaggcagccttcaccttggaggacaagggtgatttgtttacaaaaaaatacaagttaatccaaggagatggctgcaagatccacaacttggtcgaggaaaataggaagctcttcaaagccaatccctctctggatacctggaaaatttatgtagaattcattgacgacattgtggtggaaggcttttttcaggctataatgcacgacttagacttctttctgaagaatacagagaaacaattgaaaccggcaccgttttttcaagcacaaatgatcttgttgcctcctgagattgtgtttaaaccttccctagacagagaggctggggatggcttctatgatcttgtagaagaaatgttatgcaatagttttagaatgtctgcccagatgaaccgaatagcaacacacctggaaattaaaaattatcagaatgatatggataacatgttaggcctggcagaggtcaggcaggagatcatgaacagagtggtgaatgtcatcaacaaagtcttagatttcagaaacaccctggagacccacacttacctctgggtggatgatcgagctgagtttatgaagcattttctcttgtatggccatgctgtgtcttccgatgaaatggatgctcatgcaaatgaagaaattcccgaacaaccaccaactcttgagcaattcaaagaacagattgacatttatgaagctttgtatgttcaaatgagcaaatttgaggactttagagtgtttgatagttggttcaaggtggacatgaagcctttcaaagtgagcttgttaaccataattaagaaatggagctggatgtttcaggagcatcttttgagatttgtcattgacagtctgaatgagctacaagaatttataaaggagacagattccggacttcagagagaattaaatgaaggtgatcatgatggtttagttgacatcatggtgcatcttctggctgtaagaagccgacagagagctactgatgaactctttgaacctctaaaagaaacgatcaccctcttggaaagctatggccagaagatgcctgagcaggtctatattcagctagaggaattacctgaaagatgggaaactaccaaaaagatcgcagcaactgtcagacatgaagtctcacctctccataatgcggaagtcactcttataaggaaaaaatgtattttgtttgacgcaaagcaggcagagttcagagagagattcagacactatgcccctcttggatttaatgcagaaaatccatacacagcgcttgataaggcaaatgaagagcttgaggccttagaagaagaaatgttgcagatgcaagaatctactcgtctttttgaagtggctcttccagagtacaaacaaatgaaacagtgtcgcaaagaaataaaattgctcaagggactgtgggatgtcattatttatgttcgaagaagcattgataattggactaaaacccagtggagacagattcatgtggaacagatggatgtagaactcagaaggtttgccaaggcgagttccataactgaaatttggtcactcaacaaggaagtccgcgtctgggatgcttacacgggcctggaaggcacagttaaggacatgacagcctccctgagggccatcacagagttacagagccctgccctcagggacaggcattggcaccagctgatgaaagctattggggtcaagtttttaataaatgaagccacaactttggcagatttgttagcactgcggttacacagagtggaagatgatgtccgaaggattgtggacaaggcggtgaaagagctggggactgagaaggttattactgaaatcagtcagacctgggcaaccatgaagttttcttacgaagttcactatcgaacaggcattccattactaaagtctgatgaacaactttttgaaactctagagcacaaccaagttcagttgcagactcttcttcaaagcaagtatgtagaatatttcattgagcaagtgttaagctggcaaaataaattaaacatagcagacttggtcatcttcacttggatggaagtccagcgaacttggtctcacctggaaagcatttttgtctgttcagaagatattcgaatccagcttgtgaaagatgctagaagatttgatggggtggatgctgaatttaaggagttaatgttcaagacagccaaagtagaaaatgtgttagaagcaacgtgcagacctaatctctatgaaaaacttaaagatttacagtccaggctttctctttgtgaaaaagctctcgctgaatacctggaaaccaagcgcatagcctttcctcgcttctatttcgtctcttctgctgatttacttgacattctctcaaaaggagctcagcctaaacaggtaacatgtcaccttgccaaacttttcgacagcattgcagatctgcagtttgaagacaatcaggatgtttctgcacacagggcagttggaatgtacagcaaagaaaaggagtatgtcccattccaagccgagtgtgaatgtgtgggccatgtggaaacatggcttctgcaacttgaacagactatgcaagaaacggtgcgtcattctataacagaagccatagtggcctacgaggaaaaacctagggaactgtggatttttgatttcccagctcaggttgcactaaccagctcacaaatatggtggaccacagatgtaggaatagccttcagtagactggaagaaggctacgaaacagccctgaaggatttccataaaaaacagatttctcagctgaatacactgattacacttttgctgggagaacttccacctggagacagacagaagatcatgacaatttgtaccatagatgtccatgccagagacgtggtggcaaaacttatttctcagaagcaagttgttgtcagtccccaagcttttacatggctgtctcaacttcgtcaccgatgggaggatacccagaaacactgctttgttaatatttgtgatgcccagttccagtacttctatgaatacttaggaaacagccctcgactagtgatcactcctctaactgacaggtgttatattaccttaactcaatcacttcatctaaccatgagtggggctcctgctggcccagctggtaccgggaaaacagagaccaccaaagacctaggacgtgcccttggcatgatggtctatgtattcaactgttcagagcaaatggactacaaatccataggcaatatctataagggattggtgcagacaggagcttggggctgctttgatgagttcaaccgaatctctgtggaagttctgtcagtggtggcagtacaagtgaaaatgattcatgatgccatcagaaacaggaagaagagatttgtatttcttggggaagctatcacactgaagccatcagttggaatatttattactatgaacccgggttatgctggtcgaaccgaattaccggaaaatctcaaagctcttttcagaccctgtgccatggtggcccctgacattgagctaatctgtgaaatcttgttagttgctgaaggttttgtggatgcgcgtgcattagcccgaaagttcattacgttgtacacgctttgcaaggagcttctctccaagcaggatcattacgactggggacttcgtgctattaagtctgtcttggttgtggctggatctctgaaacgaggagataaaaatagacccgaagatcaggtactcatgagagcattaagggatttcaatatgcccaaaatagtgactgacgacatcccagtgtttctgggcctggtcggtgacctgtttccagccctggatgtgccccggaggaggaagctgcactttgaacagatggtcaggcagtctaccctggagctccgcctgcagcctgaagagagcttcatcctcaaagttgtccagcttgaggaactgttggctgtgcggcactcggtctttgtagttggaaatgcaggcacaggaaagagtaagattttgagaacactgaaccgaacatatgttaacatgaaacagaagccggtttggaatgacttaaaccctaaagctgtgacaacagatgaactctttggtttcatacatcatgctacccgagaatggaaagatggcaagattgtttactcttattttataggtctcttctcatccattctacgagaacaagcaaatcttaagcatgatggaccaaaatggatagtcctggatggcgatattgaccccatgtggattgaatcactgaatactgtaatggatgataacaaggtgctgaccctcgccagcaatgagcgcattgcactcactcccttcatgaggcttctgtttgagatacatcacttaaggagcgcaaccccggccactgtttccagagctggtattctgtatgtgaacccacaagatctgggctggaatccgtatgtggccagttggatagacagaaggcggcatcaatcagaaaaggccaatttgactattctttttgataaatatgtccctgcatgcttggataaactgagaacaagctttaaaaccatcacttcaattcctgagagtagcctggtgcagactctatgtgttcttttggagtgcttgctgactcctgaaaatgtaccttctgacagcccaaaagaagtttatgaagtctattttgtatttgcttgtatctgggcttttggaggcaccctgctacaagatcagatttctgattatcaagctgacttcagtcggtggtggcagaaagagatgaaagcagtgaaatttccgtcgcagggaacaatctttgattattatgtggaccacaaaactaagaaattattgccctgggctgacaaaattgcccagtttactatggatccagatgtgcctctgcagacagttctcgttcacacaacagagacagctcgtcttagatatttcatggagttgttgcttgagaaaggaaaacctctaatgctagtaggaaatgcaggagtgggaaaaacagtctttgtaggtgacacattggcaagtctctctgaggattacatagtatcccgtgtgcctttcaactactacacgacatccacagctctgcaaaaaattcttgagaaacccctagagaaaaaagctggtcataactatggtcctggaggaaataaaaaattgatttattttatcgacgacatgaacatgcctgaagtggacttatatggcaccgttcagcctcacaccctgatccggcagcatattgattatggacattggtatgatagacagaaggtgatgcttaaagaaatccataactgccagtatgtcgcctgcatgaatccgatggtgggcagcttcaccatcaatcccaggctacagagacatttcacagtgtttgcattcaattttccatctttggatgcactaaacaccatctatggccaaatctttagcttccatttccaacagcaagcatttgctccatcaattctcaggagtggccccactttgatccaggcaacaatagcattccatcagacaatgatgtgtaactttttacccacggctattaaattccactacatctttaatctgagagatttatcaaacgtcttccaggggattttatttgcttctcctgagtgtttaaaaggtccacttgatttaatacatctgtggcttcatgaatctgcccgtgtttatggagacaaactgatagacaaaaaagattgtgatttgtttcagagaagaatgctggaaactgcttataaatattttgaaggtatagatagtcacatgctgcttcaacagcccctcatttattgccactttgctgatagagggaaggacccacattacatgccagtgaaggactgggaagtgctgaagacgattcttacagaaacgttagacaactacaatgaactaaatgctgccatgcacctagttttgtttgaagatgccatgcaacatgtgtgtcgcatcagccggatcttacgaacccctcagggctgtgctctcttggttggagttgggggcagtggcaagcagagcttgtccaggctggcagcttaccttcgtggccttgaggtctttcagatcactctgaccgagggctatggaatccaggaacttcgggtagatcttgccaatttgtacatccgaactggagccaagaacatgcccactgtgttcctgctgacagatgcccaggttctagatgagagcttcctcgtgctgattaatgacttgctggcatcaggagaaatcccagatctgttcagcgatgaagatgtggacaagataatttctggaattcataatgaagttcatgctctgggcatggtagactccagggaaaactgttggaaattctttatggccagggtgcgactacagctcaaaatcattttgtgtttctctccagttggtcgcacgctgagagttagagctcggaagttcccagccatagttaactgcacggctattgactggtttcatgcgtggccgcaggaggctctggtctccgtcagcaggaggttcattgaggaaaccaagggaattgagccagtgcacaaagactctattagccttttcatggcacatgttcacaccactgtaaatgaaatgagtaccagatattaccagaatgagagaagacacaactataccaccccaaagagttttctagaacaaatatcactgtttaagaacctgttgaagaagaagcaaaatgaggtatccgagaaaaaagaacgcctggtgaacggcatccaaaagctaaaaaccacagcctctcaggtgggagatctaaaagccagacttgcctctcaagaagccgagctgcaactgagaaatcatgatgccgaagctctgatcacaaagatcggccttcagacggagaaagtgagccgggaaaagaccatcgctgatgctgaggagcgaaaggtgacagccattcagactgaagtgttccagaaacagagagaatgtgaagctgacttactcaaggctgagcctgcactggtggctgctacagctgcactcaatacactcaacagggtcaacctcagtgagctgaaagcctttcccaaccctcccatcgcagttaccaatgttactgcagccgtgatggtccttctggctcctcggggaagagtgcccaaagaccgaagttggaaagcagctaaagtcttcatgggaaaggttgatgattttttgcaagcattaattaactatgacaaagagcacattccagagaactgtctaaaagtggtgaatgaacactatttgaaagacccagagtttaatccaaacctgattcgaaccaaatcttttgcagcagctggcctgtgtgcctgggtcatcaacatcattaaattctatgaggtctactgtgatgtggagccaaaacgccaagcattagcccaagcaaacttagaactggctgcagctactgaaaaactagaggctatcaggaaaaagcttgtggatctggatcgaaatctgagcagactcacggcttcatttgaaaaagcaacagctgagaaagtccggtgtcaagaagaggtgaaccaaaccaacaaaaccatcaaattagctaacagacttgtcaaggaacttgaggcaaagaagattcgctggggtcaatccattaagtcctttgaagctcaagagaagacactctgtggagatgttcttctcacggcggcatttgtgtcttacgtcggacccttcacaaggcagtatcgccaggagctggtgcactgcaagtgggttccctttcttcaacagaaggtttccattccactaaccgaaggcctggacttgatatccatgttgacggatgatgctacaattgccgcctggaataacgaaggactgcccagtgacagaatgtccaccgaaaatgccgctatcctaacacactgtgagcgctggcctctggtgatagatccccagcaacagggaattaagtggatcaagaataagtatggaatggacctgaaagtcacacatttgggccagaaagggtttttgaatgccattgaaactgctttggcctttggtgatgtcatcttaattgaaaatctcgaggaaacgatagatccagtcctggatccactacttggcaggaacacaattaaaaaaggaaagtatatcaggattggagataaagaatgtgaatttaacaagaactttcgccttatccttcacacaaaattggcaaatcctcactataagccggaattacaagctcagacaactctcctcaatttcacagtcacagaagatggtctagaagcccagctgctggcagaggttgtcagtattgaaaggccagatttggagaaacttaagttggtattgacaaagcaccaaaatgattttaaaattgagctcaagtatctggaagacgatctccttttgcgcctttctgcggcagagggaagctttctggatgacaccaaactggtagagagattggaggcaacaaagaccaccgtggcagagatagagcacaaggtgattgaagccaaagaaaatgaaagaaaaatcaacgaggcccgagaatgttacagaccagtggcagcaagagcatctcttctttattttgttattaatgacctccaaaaaatcaaccccctctaccaattctctttgaaggcttttaacgtgctgttccacagagcgatcgagcaggctgacaaggtggaagacatgcagggacgcatctctatcctgatggagagcatcacccatgctgtcttcctctacaccagccaggcgctgtttgagaaggacaagctcaccttcctgtcccagatggcttttcagattttgttgagaaagaaagagatagaccctcttgaattggatttcctgcttcgattcacagttgaacacactcatctgagtcccgttgacttcctaacttctcagtcatggagtgctatcaaggcaattgccgtcatggaagaatttcgaggcatagaccgagatgtggaaggatctgccaagcagtggaggaagtgggtagaatccgagtgtccagaaaaagaaaaattacctcaagaatggaagaagaaaagtttaatacagaagctgattcttctgagagcaatgcgccctgacagaatgacgtatgctctcagaaattttgtagaggaaaaactgggtgcgaagtatgtggagaggaccagattggacttagttaaagcattcgaagaaagcagcccagccacccccatattcttcatcctgtctccgggggtagatgcccttaaagacctggagattcttggcaaaagacttggctttacaattgactctggaaaattccacaatgtgtctttaggacaaggtcaggagacggtggcagaagtggccctggagaaagcttccaaaggaggacactgggtcatcctccaaaatgttcatttggtagccaagtggctaggaaccttggagaagctccttgaaagattcagccaaggaagccacagagattacagggttttcatgagtgctgagtctgcacctacaccagatgagcatatcatccctcaaggactcctggaaaattccattaagatcactaatgaacccccaacagggatgctggccaatttgcatgccgccctgtacaactttgatcaggatacacttgaaatatgctccaaggagcaggagtttaaaagcatccttttttctctctgctacttccacgcctgtgttgctgggagactgaggtttggcccccagggctggagccgaagctatccttttaatcctggagacctcaccatttgtgccagtgtcctctacaactacttagaggcaaactctaaagtcccatgggaagatctccgttatctctttggtgagatcatgtatggaggccacatcacagatgactgggatcgcaaactgtgtcgggtgtatttagaagaattcatgaatccatctctgactgaagatgaactgatgctggcaccaggttttgctgccccaccctacctagattatgcaggctaccaccagtacatagaggagatgcttcctccagaaagcccggcactgtatggcctccacccaaatgctgaaatagaattcctgacagtgacatccaacactctcttcagaactttgctggagatgcagcccaggaatgcactcagtggtgatgaactggggcagtctacagaagaaaaggttaagaatgtcttggatgacattttggagaaacttccagaagagttcaacatggcagagataatgcaaaaaaattcaaatagaagcccatatgttcttgtttgcttccaagaatgtgagaggatgaatattctcattcgggaaatacgtatatcacttgaacaactggaccttagtttgaagggggaattggcattatctcctgctgtggaagcccagcagtttgcattgagttatgacacggtaccagacacttggagcaaactggcttatccttctacttatggcctagcccagtggttcaatgacctcctcctgcgatgccgagaactcgatacttggacacaagaccttacccttccggctgtcgtgtggctctccggcttcttcaaccctcagtccttcttaactgcaatcatgcagacgatggctcgaaaaaatgagtggcccctggataaaacgcgcttgactgctgatgttaccaaaaaaacaaaggaagattatggacacccgccaagggaaggtgcatacctccacggactcttcatggagggcgcccgctgggacacccaagcaggaaccattgttgaagcccgtctcaaggagctggcatgccctatgccggtcatctttgcaaaagccacccccgtggacagacaagaaaccaaacagacctacgagtgccctgtgtatagaaccaaactgagaggccccagctacatctggaccttcaggctgaagagcgaagagaagactgcaaaatgggttctggctggagtggctctgcttctagaagcgtaaggtaacactggcattcctctagcctctgctggagtgcagtgaggattttctagcatgttgctgcactgttcccatgcacattattctaactttttagtaactcacacgtgcattcttttttcaacgctatccttagagtgaaagtcagaaaaaaatactagaaactaactcagggctgagcgtggtggcacacgactgtaatcccagttactcaggaggtaggagaatcacttgaacctaggaggcaaaggttgcagtgagccgaggttgcaccactgcactccctcctgggcaacagaacaagactccatctcaaaaaaaaaaaagtacatcataaaagtacatcatatgtgaacatgcaaaagcaatgcagccggaaagaacggagattttaatttttaacaaacaacaaattaaattattagcccttaaactctttcaaaatataaaagcagcaggccccaggtgagtcctgaaggaagaggctagcactctgtaaggcctccagtgtccagtgtctacaatgttgatggtccccttttgttcagtcaagttttaataaaaataaaactgttctacagttaa

SEQ ID NO: 844 - protein, 4523 aa, Homo sapiens
MAAQVAAREARDFREAPTLRLTSGAGLEAVGAVELEEEEENEEEAAARRARSFAQDARVRFLGGRLAMMLGFTEEKWSQYLESEDNRQVLGEFLESTSPACLVFSFAASGRLAASQEIPRDANHKLVFISKKITESIGVNDFSQVVLFGELPALSLGHVSAFLDEILVPVLSNKNNHKSWSCFTSQDMEYHIEVMKKKMYIFRGKMSRRTLLPIPTVAGKMDLDQNCSENKPPSNERIILHAIESVVIEWSHQIQEIIERDSVQRLLNGLHLSPQAELDFWMMRRENLSCIYDQLQAPVVLKMVKILTTKQSSYFPTLKDIFLAVENALLEAQDVELYLRPLRRHIQCLQETEFPQTRILIAPLFHTICLIWSHSKFYNTPARVIVLLQEFCNLFINQATAYLSPEDLLRGEIEESLEKVQVAVNILKTFKNSFFNYRKKLASYFMGRKLRPWDFQSHLVFCRFDKFLDRLIKIEDIFATTLEFEKLERLEFGGTKGAILNGQVHEMSEELMELCKLFKQSTYDPSDCTNMEFESDYVAFKSKTLEFDRRLGTIICEAFFNCNGLEAAFKLLTIFGNFLEKPVVMEIFSLHYSTLVHMFNTELDVCKQLYNEHMKQIECGHVVLNKNMPFTSGNMKWAQQVLQRLQMFWSNFASLRYLFLGNPDHALVYQKYVEMTTLLDQFESRIYNEWKSNVDEICEFNLNQPLVKFSAINGLLCVNFDPKLVAVLREVKYLLMLKKQDIPDSALAIFKKRNTILKYIGNLDLLVQGYNKLKQTLLEVEYPLIEDELRAIDEQLTAATTWLTWQDDCWGYIERVRAATSELEHRVERTQKNVKVIQQTMRGWARCVLPPRREHRREAAFTLEDKGDLFTKKYKLIQGDGCKIHNLVEENRKLFKANPSLDTWKIYVEFIDDIVVEGFFQAIMHDLDFFLKNTEKQLKPAPFFQAQMILLPPEIVFKPSLDREAGDGFYDLVEEMLCNSFRMSAQMNRIATHLEIKNYQNDMDNMLGLAEVRQEIMNRVVNVINKVLDFRNTLETHTYLWVDDRAEFMKHFLLYGHAVSSDEMDAHANEEIPEQPPTLEQFKEQIDIYEALYVQMSKFEDFRVFDSWFKVDMKPFKVSLLTIIKKWSWMFQEHLLRFVIDSLNELQEFIKETDSGLQRELNEGDHDGLVDIMVHLLAVRSRQRATDELFEPLKETITLLESYGQKMPEQVYIQLEELPERWETTKKIAATVRHEVSPLHNAEVTLIRKKCILFDAKQAEFRERFRHYAPLGFNAENPYTALDKANEELEALEEEMLQMQESTRLFEVALPEYKQMKQCRKEIKLLKGLWDVIIYVRRSIDNWTKTQWRQIHVEQMDVELRRFAKASSITEIWSLNKEVRVWDAYTGLEGTVKDMTASLRAITELQSPALRDRHWHQLMKAIGVKFLINEATTLADLLALRLHRVEDDVRRIVDKAVKELGTEKVITEISQTWATMKFSYEVHYRTGIPLLKSDEQLFETLEHNQVQLQTLLQSKYVEYFIEQVLSWQNKLNIADLVIFTWMEVQRTWSHLESIFVCSEDIRIQLVKDARRFDGVDAEFKELMFKTAKVENVLEATCRPNLYEKLKDLQSRLSLCEKALAEYLETKRIAFPRFYFVSSADLLDILSKGAQPKQVTCHLAKLFDSIADLQFEDNQDVSAHRAVGMYSKEKEYVPFQAECECVGHVETWLLQLEQTMQETVRHSITEAIVAYEEKPRELWIFDFPAQVALTSSQIWWTTDVGIAFSRLEEGYETALKDFHKKQISQLNTLITLLLGELPPGDRQKIMTICTIDVHARDVVAKLISQKQVVVSPQAFTWLSQLRHRWEDTQKHCFVNICDAQFQYFYEYLGNSPRLVITPLTDRCYITLTQSLHLTMSGAPAGPAGTGKTETTKDLGRALGMMVYVFNCSEQMDYKSIGNIYKGLVQTGAWGCFDEFNRISVEVLSVVAVQVKMIHDAIRNRKKRFVFLGEAITLKPSVGIFITMNPGYAGRTELPENLKALFRPCAMVAPDIELICEILLVAEGFVDARALARKFITLYTLCKELLSKQDHYDWGLRAIKSVLVVAGSLKRGDKNRPEDQVLMRALRDFNMPKIVTDDIPVFLGLVGDLFPALDVPRRRKLHFEQMVRQSTLELRLQPEESFILKVVQLEELLAVRHSVFVVGNAGTGKSKILRTLNRTYVNMKQKPVWNDLNPKAVTTDELFGFIHHATREWKDGKIVYSYFIGLFSSILREQANLKHDGPKWIVLDGDIDPMWIESLNTVMDDNKVLTLASNERIALTPFMRLLFEIHHLRSATPATVSRAGILYVNPQDLGWNPYVASWIDRRRHQSEKANLTILFDKYVPACLDKLRTSFKTITSIPESSLVQTLCVLLECLLTPENVPSDSPKEVYEVYFVFACIWAFGGTLLQDQISDYQADFSRWWQKEMKAVKFPSQGTIFDYYVDHKTKKLLPWADKIAQFTMDPDVPLQTVLVHTTETARLRYFMELLLEKGKPLMLVGNAGVGKTVFVGDTLASLSEDYIVSRVPFNYYTTSTALQKILEKPLEKKAGHNYGPGGNKKLIYFIDDMNMPEVDLYGTVQPHTLIRQHIDYGHWYDRQKVMLKEIHNCQYVACMNPMVGSFTINPRLQRHFTVFAFNFPSLDALNTIYGQIFSFHFQQQAFAPSILRSGPTLIQATIAFHQTMMCNFLPTAIKFHYIFNLRDLSNVFQGILFASPECLKGPLDLIHLWLHESARVYGDKLIDKKDCDLFQRRMLETAYKYFEGIDSHMLLQQPLIYCHFADRGKDPHYMPVKDWEVLKTILTETLDNYNELNAAMHLVLFEDAMQHVCRISRILRTPQGCALLVGVGGSGKQSLSRLAAYLRGLEVFQITLTEGYGIQELRVDLANLYIRTGAKNMPTVFLLTDAQVLDESFLVLINDLLASGEIPDLFSDEDVDKIISGIHNEVHALGMVDSRENCWKFFMARVRLQLKIILCFSPVGRTLRVRARKFPAIVNCTAIDWFHAWPQEALVSVSRRFIEETKGIEPVHKDSISLFMAHVHTTVNEMSTRYYQNERRHNYTTPKSFLEQISLFKNLLKKKQNEVSEKKERLVNGIQKLKTTASQVGDLKARLASQEAELQLRNHDAEALITKIGLQTEKVSREKTIADAEERKVTAIQTEVFQKQRECEADLLKAEPALVAATAALNTLNRVNLSELKAFPNPPIAVTNVTAAVMVLLAPRGRVPKDRSWKAAKVFMGKVDDFLQALINYDKEHIPENCLKVVNEHYLKDPEFNPNLIRTKSFAAAGLCAWVINIIKFYEVYCDVEPKRQALAQANLELAAATEKLEAIRKKLVDLDRNLSRLTASFEKATAEKVRCQEEVNQTNKTIKLANRLVKELEAKKIRWGQSIKSFEAQEKTLCGDVLLTAAFVSYVGPFTRQYRQELVHCKWVPFLQQKVSIPLTEGLDLISMLTDDATIAAWNNEGLPSDRMSTENAAILTHCERWPLVIDPQQQGIKWIKNKYGMDLKVTHLGQKGFLNAIETALAFGDVILIENLEETIDPVLDPLLGRNTIKKGKYIRIGDKECEFNKNFRLILHTKLANPHYKPELQAQTTLLNFTVTEDGLEAQLLAEVVSIERPDLEKLKLVLTKHQNDFKIELKYLEDDLLLRLSAAEGSFLDDTKLVERLEATKTTVAEIEHKVIEAKENERKINEARECYRPVAARASLLYFVINDLQKINPLYQFSLKAFNVLFHRAIEQADKVEDMQGRISILMESITHAVFLYTSQALFEKDKLTFLSQMAFQILLRKKEIDPLELDFLLRFTVEHTHLSPVDFLTSQSWSAIKAIAVMEEFRGIDRDVEGSAKQWRKWVESECPEKEKLPQEWKKKSLIQKLILLRAMRPDRMTYALRNFVEEKLGAKYVERTRLDLVKAFEESSPATPIFFILSPGVDALKDLEILGKRLGFTIDSGKFHNVSLGQGQETVAEVALEKASKGGHWVILQNVHLVAKWLGTLEKLLERFSQGSHRDYRVFMSAESAPTPDEHIIPQGLLENSIKITNEPPTGMLANLHAALYNFDQDTLEICSKEQEFKSILFSLCYFHACVAGRLRFGPQGWSRSYPFNPGDLTICASVLYNYLEANSKVPWEDLRYLFGEIMYGGHITDDWDRKLCRVYLEEFMNPSLTEDELMLAPGFAAPPYLDYAGYHQYIEEMLPPESPALYGLHPNAEIEFLTVTSNTLFRTLLEMQPRNALSGDELGQSTEEKVKNVLDDILEKLPEEFNMAEIMQKNSNRSPYVLVCFQECERMNILIREIRISLEQLDLSLKGELALSPAVEAQQFALSYDTVPDTWSKLAYPSTYGLAQWFNDLLLRCRELDTWTQDLTLPAVVWLSGFFNPQSFLTAIMQTMARKNEWPLDKTRLTADVTKKTKEDYGHPPREGAYLHGLFMEGARWDTQAGTIVEARLKELACPMPVIFAKATPVDRQETKQTYECPVYRTKLRGPSYIWTFRLKSEEKTAKWVLAGVALLLEA

SEQ ID NO: 845 - DNA, 1125 bp, Homo sapiens
ttctgccctcgagcccaccgggaacgaaagagaagctctatctcgcctccaggagcccagctatgaactccttctccacaagcgccttcggtccagttgccttctccctggggctgctcctggtgttgcctgctgccttccctgccccagtacccccaggagaagattccaaagatgtagccgccccacacagacagccactcacctcttcagaacgaattgacaaacaaattcggtacatcctcgacggcatctcagccctgagaaaggagacatgtaacaagagtaacatgtgtgaaagcagcaaagaggcactggcagaaaacaacctgaaccttccaaagatggctgaaaaagatggatgcttccaatctggattcaatgaggagacttgcctggtgaaaatcatcactggtcttttggagtttgaggtatacctagagtacctccagaacagatttgagagtagtgaggaacaagccagagctgtgcagatgagtacaaaagtcctgatccagttcctgcagaaaaaggcaaagaatctagatgcaataaccacccctgacccaaccacaaatgccagcctgctgacgaagctgcaggcacagaaccagtggctgcaggacatgacaactcatctcattctgcgcagctttaaggagttcctgcagtccagcctgagggctcttcggcaaatgtagcatgggcacctcagattgttgttgttaatgggcattccttcttctggtcagaaacctgtccactgggcacagaacttatgttgttctctatggagaactaaaagtatgagcgttaggacactattttaattatttttaatttattaatatttaaatatgtgaagctgagttaatttatgtaagtcatatttatatttttaagaagtaccacttgaaacattttatgtattagttttgaaataataatggaaagtggctatgcagtttgaatatcctttgtttcagagccagatcatttcttggaaagtgtaggcttacctcaaataaatggctaacttatacatatttttaaagaaatatttatattgtatttatataatgtataaatggtttttataccaataaatggcattttaaaaaattc

SEQ ID NO: 846 - protein, 212 aa, Homo sapiens
MNSFSTSAFGPVAFSLGLLLVLPAAFPAPVPPGEDSKDVAAPHRQPLTSSERIDKQIRYILDGISALRKETCNKSNMCESSKEALAENNLNLPKMAEKDGCFQSGFNEETCLVKIITGLLEFEVYLEYLQNRFESSEEQARAVQMSTKVLIQFLQKKAKNLDAITTPDPTTNASLLTKLQAQNQWLQDMTTHLILRSFKEFLQSSLRALRQM

SEQ ID NO: 847 - DNA, 7772 bp, Homo sapiens
agttaagctttggctcaaattctacacacactcattccagagctctcatgttctgcacctcaggagggaattcagcctcagtgatgtccatgaggcctgtcccaggctctctatcttctctgctacatctccacaacagacagagacagcccatgccagcctccatgcctgggaccctgcccaaccctacaatgccaggatcttccgccgtcttgatgccaatggagcgacaaatgtcagtgaactccagcatcatggggatgcaaggtccaaatctcagcaacccctgtgcttctccccaggtccagccaatgcattcagaagccaaaatgaggttgaaggctgcattgactcaccaccctgctgccatgtcaaatgggaacatgaacaccatgggacacatgatggagatgatgggctcccggcaggaccagacgccacaccatcacatgcactcgcacccgcatcagcaccagacactgccaccccatcacccttacccacaccagcaccagcacccagcacaccatcctcaccctcaaccccatcaccagcagaaccatccacatcaccactcccattcccaccttcatgcacacccagcacatcaccagacctcgccacatccgcccctgcacaccggcaaccaagcacaggtttcaccagcaacacaacagatgcagccaacccagacaatacagccaccccagcccacaggggggcgccggcgaagggtggtagacgaggatccggacgagaggcggcggaaatttctggaacggaaccgggcagctgccacccgctgcagacagaagaggaaggtctgggtgatgtcattggaaaagaaagcagaagaactcacccagacaaacatgcagcttcagaatgaagtgtctatgttgaaaaatgaggtggcccagctgaaacagttgttgttaacacataaagactgcccaataacagccatgcagaaagaatcacaaggatatctaagtccagagagtagccctcctgctagtcctgtcccagcttgctcccagcaacaagtcatccagcataataccatcactacttcctcatcggtcagcgaggtggtaggaagctccaccctcagccagctcaccactcacagaacagacctgaatccgattctttaaaatgcaccatcagacctggcctccaagaagagctgtagcgtaccatgcgtcctttcttttaagggcatttttagaattaactcagacctggaagactcctcagttcttcaaagactggctttcatttttatagttattatggaaatgttgtcttttatacttagttatataagaaaaaagggagttatgcaattaatatctatcagcttgggaaacgctttggtgcttttctccagttttctggtaccagttacttgtttataaactgaaccttttctgtatatagccatggtttcattcttatcagtccaaccctttgcctgaaacattgaatcttgttaaaccacagcttttagctaaaatgaggtatacctagatgtcaagtaagacagatccaaggtaactgggtaggaaatcttttgacatcttaactcatgttgagtttgtgctgtggtgtcaccagaattccagataaacacacagcctttcccatacctttttttttcttactataaaatattataagatccattgatgtccaaataataccaccaagcatctcttcacctctcctcctcttggtccacttgctaatgcccagttttcttctccatttccactttttcttaggctccctatttactattcattttgacttccttctgttttatttttttccctttagcattgcatgtgaataagaaaataatgtttaaagaaaaaaaaaaaaaagcaaacctccaaaacgtggacctaaccattgcttcacttacacttcacccacagctggagttcattcaactcttgcttttcacaaaatagtaaccaggagatgtttaatgtgcctgatttaatgtttttaataatcacagcaaatgaaaggtggtttagttataagtgaagcatggttgaataccagctggggagacactagggaagggagctttgtaagccttgattgcgaaagtccaaattttgatgtggggctataacatgacacccttggattgcgactggttttatacggcctgcctataacgttgaaaatccatgtactacataataattcagaagggctctattcactacacagattacattgttcaatcatcagctgctaatagcctaagatttatttttttttttttcttaagcctatggaaccggctttgctgttctggggggtgaaaatagactaactactggagaaacaaagagagaaagaaaacccagtgtttccataggggcacttttagccttcccacaacagttaagcactctttgactgctgaaggaaccccatggatgaggtgcaggctacttcactctttttttttcttttttgagacagagtctcacctattgcccagactgaagtgcagtggtgcgatcatggatcactgcagcagcatcctccgagttcaagctatccttccacctccgcctcctgagtagctgggaccacaggttcacataaccatgcctggctaatttatttttacttttattttaaaataaaagatgaggtctgtcttatgttgcccaggctggtctcaaactatcctacttcttcctcccaaagtgttgggattataggtgtgagccactgcacccagcctacttcactcttctgaattattctgatttattttcaacaacttttgtgaacttgcccgtgatacaaagcagatagtccctgaaccacagtcgtgcctccttgaaacaagccattctactgtgctaatgttttaatatcacatctcacaaataacaggggtgaatgtttctctctagcaatctaggcaggtgctggtgtttcatctccatttgaatgcttgacctcttaatgtgtgtgtgtgtgtgtgtgtgtgtgtgtgtgttcatgggttttaaaagaacagtattttacaaaaggtgtagcttttataagagtgcagaaaagggaaggatgtgtttttttctctcactatagtataagaatctattttggagaaaaaaagaaaatatgagggtctcgaagcatgatttttatataactagtttcagttttatctaataacttactttttaaatcaatatttatcaacaatctttccttgtatgcagtgctttcaaaagatggttttgagtgtccagtgaaacttatgacttggatatatggttgaagaatcaaaacaaaagcaaaaaaaaaaagcaaaaaaagaaaagagaaaaaaagaaaaaatgcaaatggaataattttctattatattttagacaaacatatcattttcgagtattttaaatactgaattcatagttgttgttttttaaattccaacagtaacagctgaatggtttaatctgactggcttcctaagaaatgtttaagactcagctttaaaaagaagttaacattcatatctctgttttgaaatcaaaaatcatatttcaaaattctttcctaggaccatctatgtgtctcccctcccctccacaaaaaggagaaagagtgcattaaaatgtttagttgggttttttaatttttaatttttatgttatgttttgctttgttttaagtaaacaaaaatttttctttctttactgcatgcatagcacttaataaaatggatttttaaaaaatccactagtaatatcagaatgtccagggagtgactgtcactacaatgatggtttagtttacttctgttccaccttttgattgaaatatttagttgttaggctgaaagcctcggcagttaagaacttgcctgagttttcttcgttcagcaacttgacagtttgactgatgtgcattatatatagctcaattatgtctgttttttatgctaagtaggaaaaccaaccacacacattagcaaaccggcctcaacatataattagaataaactgtcttcttgttctactcagggcctttaggtgtgttcattcacggtatggaaatacagtaaatgaaagattccaactagttgtcagtgcttcttgaaattccaaacagaaagatacattggtcaaatccaacacttggcttatcaatattaagtcttttacctaaaggcccagccgtcaccagacaacagaataatcaatctgcctgaaaatccctcctccttgtcctacactttttgcctgtttgggagaatatctttgtactccattctcctccctcagccagttactgggtcacccatccatgtgttcatgaatcaatcatcacggcctgcagagcacctgtcctaaggagggaaaatcctgtcacactgcctctccccattcgtgtgtggttttcttgatcggtgagatctgtctctgaagtcactgccagcctccctgggaacgtctatagtgcctcccctgccttatgtgatgggagttaacaactcagataagtacacctgagagcatttctatcaggtaaactgtcacttaaatggaggtgtccacatcttaattgtttctccttgacacatttctcaatccacgaagccaggagaggtagagtgaaaatcccagccatggatgaatgtactaatttgaaagccaagtgttaagtcggatgttttcccgttacactactactcagccctctcctgcggccacatcaacggatgcaagtcacagtcttaacacagcctgtgggagacaagcagtttgtgtgctcacagtatatattatagtaattagggtgacttagagcaaatactcttcagatcctatgtagtcagtgaaacaaaatggagagcgtattctgatagaaggacgtcgacggtgaatgttctggtggttgttgcctgttaagtaaactttagtgtgtaagttgagtttgtcattaaaatcataaaccagctgcggtaacagacaagcctttggctggggagttttaagcctcggtaactgctataaaactagccatccagttaggatagaatgtgtttctttctggttaaaaaaaggaaaaaccatctaagaaaatatatatgtatgtatgtgtgtatacagtggaattcaaaggaccaaagcaaaatttgaacaggaatctattaatttagaattttataagatatttattaataaatgttatttttaaacattccatttgaacagtattctgtaggatctacttgtttttaaagtgttagtccataataaactactatagttatgtgtattttcatttttcagggtttcaaatggctattctccatcatttggtggaaatgtttgcttagatctctgtgcatagacatttcaaggatttttattgctctgtgagttattttttaatcaacattctgaacagttttttttaaacatttatttctgtgtgttcatttttaaagtaagctctttcatttaggaagcagagttcagctaaagggaatcagtaactctaactggaacagctttcttgtagaagtgtaaaaacagcttcatctctgcctctctccaccccaccccaatttcctagaaagccttgcactattcagctcccttagtgctttttgtcccttcccgaacaatatgcagtagctttaagccattcaagctccattatgcagtatatctgagaagggaaaggaaacaacccatttaaatttgaataaaaccgtgcctatgcgaacagtagcaatttagaatctcttttctgcttttaaaataatttatatttaaaaattgcactttagctttttgatccctttgtatttctcttattctctttctaacctcttctctgtcctcaaacttgcctttgctctcctttacaataccccccacccctcctccaaggctctgagcggcatcatttaaaatactttacagatatttgcaccaggtacatttatgtgcgtccattggtagcacagctgagacctgtgtctcacatcagcctaggtgaagcctactacaagaatgccaaggagaagagccagtacactatatggtttatactctttatccctttattcatagcatgttttttaaaaatgttatattatgcaacagatgtgaggcagcagctaagctatacttaagaattttctctcaccttccaaaccaaagtgtcctgaataagccaggagacttattcttttgtgcaccctggtgcacatctgactgttgtcctagccatagactctctgaggccactgaaagaacagtggccctatcgatttcattcctaggtctcaaaaatacaatgttgccttgtaacataattagggacagcacctctatttcacaattataatctaaggtaggataagacgacacagcagcaataaacttacaagtaaaattcaataccaaaacaaacacaaagaaatttaaaaaacaaaaaacctagctcatcatgttgtgaaaatgaaaaagtgaatgtccattcaaaatattttactatttcttgtggagtttttcagtgatgtaatgcttgtagccaaattgcttaaagagtgtttatatatttttttccttataaattgtctattttttaaaaaagctatttaaccacagctgaagtggggggtaaggccaaattgccaacacttgttaaaagattaatactcttaagtggcactctgatacctttccaacttgtcatcagaaaggaatcaataattaccaactgttgtatttagaccaacttacaatatctagctcattagaagccaggatctagaaagctccttctaagccatttaagatattcttacattgagcttcatattatagaactttataggattggatattttacaatagaataatttagcctcaggactgagaatgtggaagctgaataaattagctttaaatacatcattaaaatcttatgcacaataagctcattagattctagttttctcctttagaataccaatgccacagacactacaggagataatgaaaggtatcagttgtgttgagtggagggagtttaagagaaaggacccttcccaaccagcagccagtagaaaatacaacctactcacctttttcccttctaagttctgctaaatcacatctgcctcatagagaaaggaatgttgcctttgagaactgtcttggagaacagataagcttgaaatgttctctctagagaggacatagggtttgggatcctctgaaaaggcccagaaaaatagctcagttcaaatacaatgttctaggacaattggaatataaatattgtccaaaaatataattaaaagaaaaaagtttagcactgtgtaaagtaagtgttaactgaggaagtcccaaaaaggtgctgtcactttaagttctggacttggggttctttgtatttgtaaacagcaaagcatttgtgtttgtttgtctatttgtaaagcaaccaccttccttattggaaggagaaaaaaaggggtacatacatgtaaatacttgctgcagcatttaatatgtttaattttgtgttaagctttttgttgcatcgtgaacacatttattgttaccaatggacaatgagttcattaagactgttcaactaggtcagatttttacatctctttctagcaagaagagacaagattttgtgcatttgtacaaatgttaatatcactgcaattccaatataataaagcactcaaatgcaaataa

SEQ ID NO: 848 - protein, 369 aa, Homo sapiens
MFCTSGGNSASVMSMRPVPGSLSSLLHLHNRQRQPMPASMPGTLPNPTMPGSSAVLMPMERQMSVNSSIMGMQGPNLSNPCASPQVQPMHSEAKMRLKAALTHHPAAMSNGNMNTMGHMMEMMGSRQDQTPHHHMHSHPHQHQTLPPHHPYPHQHQHPAHHPHPQPHHQQNHPHHHSHSHLHAHPAHHQTSPHPPLHTGNQAQVSPATQQMQPTQTIQPPQPTGGRRRRVVDEDPDERRRKFLERNRAAATRCRQKRKVWVMSLEKKAEELTQTNMQLQNEVSMLKNEVAQLKQLLLTHKDCPITAMQKESQGYLSPESSPPASPVPACSQQQVIQHNTITTSSSVSEVVGSSTLSQLTTHRTDLNPIL

SEQ ID NO: 849 - DNA, 8213 bp, Homo sapiens
ttttagtggtggagtcaatttatttctgagacgatctcatttacctgaatgaggagctcatatttattttcaggatttatgaggaatccaagatgaatttggagcaggagaggccgtttgtctgcagtgccccaggctgctcccagcgcttcccaacagaggaccatctgatgattcataggcacaaacatgaaatgactttgaagtttccttcaataaaaacagacaatatgttatcagatcaaactccgaccccaacgagattcctgaagaactgcgaggaggtgggcctcttcagcgagctggactgctccctggagcacgagttcaggaaggctcaggaagaggagagcagcaagcggaatatctcgatgcataatgcagttggtggggccatgacggggcccggaactcaccagcttagcagcgctcggctgcccaaccatgacaccaacgttgtgattcagcaagccatgccgtcgcctcagtccagctctgtcatcactcaggcaccttccaccaaccgccagatcgggcctgtcccaggctctctatcttctctgctacatctccacaacagacagagacagcccatgccagcctccatgcctgggaccctgcccaaccctacaatgccaggatcttccgccgtcttgatgccaatggagcgacaaatgtcagtgaactccagcatcatggggatgcaaggtccaaatctcagcaacccctgtgcttctccccaggtccagccaatgcattcagaagccaaaatgaggttgaaggctgcattgactcaccaccctgctgccatgtcaaatgggaacatgaacaccatgggacacatgatggagatgatgggctcccggcaggaccagacgccacaccatcacatgcactcgcacccgcatcagcaccagacactgccaccccatcacccttacccacaccagcaccagcacccagcacaccatcctcaccctcaaccccatcaccagcagaaccatccacatcaccactcccattcccaccttcatgcacacccagcacatcaccagacctcgccacatccgcccctgcacaccggcaaccaagcacaggtttcaccagcaacacaacagatgcagccaacccagacaatacagccaccccagcccacaggggggcgccggcgaagggtggtagacgaggatccggacgagaggcggcggaaatttctggaacggaaccgggcagctgccacccgctgcagacagaagaggaaggtctgggtgatgtcattggaaaagaaagcagaagaactcacccagacaaacatgcagcttcagaatgaagtgtctatgttgaaaaatgaggtggcccagctgaaacagttgttgttaacacataaagactgcccaataacagccatgcagaaagaatcacaaggatatctaagtccagagagtagccctcctgctagtcctgtcccagcttgctcccagcaacaagtcatccagcataataccatcactacttcctcatcggtcagcgaggtggtaggaagctccaccctcagccagctcaccactcacagaacagacctgaatccgattctttaaaatgcaccatcagacctggcctccaagaagagctgtagcgtaccatgcgtcctttcttttaagggcatttttagaattaactcagacctggaagactcctcagttcttcaaagactggctttcatttttatagttattatggaaatgttgtcttttatacttagttatataagaaaaaagggagttatgcaattaatatctatcagcttgggaaacgctttggtgcttttctccagttttctggtaccagttacttgtttataaactgaaccttttctgtatatagccatggtttcattcttatcagtccaaccctttgcctgaaacattgaatcttgttaaaccacagcttttagctaaaatgaggtatacctagatgtcaagtaagacagatccaaggtaactgggtaggaaatcttttgacatcttaactcatgttgagtttgtgctgtggtgtcaccagaattccagataaacacacagcctttcccatacctttttttttcttactataaaatattataagatccattgatgtccaaataataccaccaagcatctcttcacctctcctcctcttggtccacttgctaatgcccagttttcttctccatttccactttttcttaggctccctatttactattcattttgacttccttctgttttatttttttccctttagcattgcatgtgaataagaaaataatgtttaaagaaaaaaaaaaaaaagcaaacctccaaaacgtggacctaaccattgcttcacttacacttcacccacagctggagttcattcaactcttgcttttcacaaaatagtaaccaggagatgtttaatgtgcctgatttaatgtttttaataatcacagcaaatgaaaggtggtttagttataagtgaagcatggttgaataccagctggggagacactagggaagggagctttgtaagccttgattgcgaaagtccaaattttgatgtggggctataacatgacacccttggattgcgactggttttatacggcctgcctataacgttgaaaatccatgtactacataataattcagaagggctctattcactacacagattacattgttcaatcatcagctgctaatagcctaagatttatttttttttttttcttaagcctatggaaccggctttgctgttctggggggtgaaaatagactaactactggagaaacaaagagagaaagaaaacccagtgtttccataggggcacttttagccttcccacaacagttaagcactctttgactgctgaaggaaccccatggatgaggtgcaggctacttcactctttttttttcttttttgagacagagtctcacctattgcccagactgaagtgcagtggtgcgatcatggatcactgcagcagcatcctccgagttcaagctatccttccacctccgcctcctgagtagctgggaccacaggttcacataaccatgcctggctaatttatttttacttttattttaaaataaaagatgaggtctgtcttatgttgcccaggctggtctcaaactatcctacttcttcctcccaaagtgttgggattataggtgtgagccactgcacccagcctacttcactcttctgaattattctgatttattttcaacaacttttgtgaacttgcccgtgatacaaagcagatagtccctgaaccacagtcgtgcctccttgaaacaagccattctactgtgctaatgttttaatatcacatctcacaaataacaggggtgaatgtttctctctagcaatctaggcaggtgctggtgtttcatctccatttgaatgcttgacctcttaatgtgtgtgtgtgtgtgtgtgtgtgtgtgtgtgttcatgggttttaaaagaacagtattttacaaaaggtgtagcttttataagagtgcagaaaagggaaggatgtgtttttttctctcactatagtataagaatctattttggagaaaaaaagaaaatatgagggtctcgaagcatgatttttatataactagtttcagttttatctaataacttactttttaaatcaatatttatcaacaatctttccttgtatgcagtgctttcaaaagatggttttgagtgtccagtgaaacttatgacttggatatatggttgaagaatcaaaacaaaagcaaaaaaaaaaagcaaaaaaagaaaagagaaaaaaagaaaaaatgcaaatggaataattttctattatattttagacaaacatatcattttcgagtattttaaatactgaattcatagttgttgttttttaaattccaacagtaacagctgaatggtttaatctgactggcttcctaagaaatgtttaagactcagctttaaaaagaagttaacattcatatctctgttttgaaatcaaaaatcatatttcaaaattctttcctaggaccatctatgtgtctcccctcccctccacaaaaaggagaaagagtgcattaaaatgtttagttgggttttttaatttttaatttttatgttatgttttgctttgttttaagtaaacaaaaatttttctttctttactgcatgcatagcacttaataaaatggatttttaaaaaatccactagtaatatcagaatgtccagggagtgactgtcactacaatgatggtttagtttacttctgttccaccttttgattgaaatatttagttgttaggctgaaagcctcggcagttaagaacttgcctgagttttcttcgttcagcaacttgacagtttgactgatgtgcattatatatagctcaattatgtctgttttttatgctaagtaggaaaaccaaccacacacattagcaaaccggcctcaacatataattagaataaactgtcttcttgttctactcagggcctttaggtgtgttcattcacggtatggaaatacagtaaatgaaagattccaactagttgtcagtgcttcttgaaattccaaacagaaagatacattggtcaaatccaacacttggcttatcaatattaagtcttttacctaaaggcccagccgtcaccagacaacagaataatcaatctgcctgaaaatccctcctccttgtcctacactttttgcctgtttgggagaatatctttgtactccattctcctccctcagccagttactgggtcacccatccatgtgttcatgaatcaatcatcacggcctgcagagcacctgtcctaaggagggaaaatcctgtcacactgcctctccccattcgtgtgtggttttcttgatcggtgagatctgtctctgaagtcactgccagcctccctgggaacgtctatagtgcctcccctgccttatgtgatgggagttaacaactcagataagtacacctgagagcatttctatcaggtaaactgtcacttaaatggaggtgtccacatcttaattgtttctccttgacacatttctcaatccacgaagccaggagaggtagagtgaaaatcccagccatggatgaatgtactaatttgaaagccaagtgttaagtcggatgttttcccgttacactactactcagccctctcctgcggccacatcaacggatgcaagtcacagtcttaacacagcctgtgggagacaagcagtttgtgtgctcacagtatatattatagtaattagggtgacttagagcaaatactcttcagatcctatgtagtcagtgaaacaaaatggagagcgtattctgatagaaggacgtcgacggtgaatgttctggtggttgttgcctgttaagtaaactttagtgtgtaagttgagtttgtcattaaaatcataaaccagctgcggtaacagacaagcctttggctggggagttttaagcctcggtaactgctataaaactagccatccagttaggatagaatgtgtttctttctggttaaaaaaaggaaaaaccatctaagaaaatatatatgtatgtatgtgtgtatacagtggaattcaaaggaccaaagcaaaatttgaacaggaatctattaatttagaattttataagatatttattaataaatgttatttttaaacattccatttgaacagtattctgtaggatctacttgtttttaaagtgttagtccataataaactactatagttatgtgtattttcatttttcagggtttcaaatggctattctccatcatttggtggaaatgtttgcttagatctctgtgcatagacatttcaaggatttttattgctctgtgagttattttttaatcaacattctgaacagttttttttaaacatttatttctgtgtgttcatttttaaagtaagctctttcatttaggaagcagagttcagctaaagggaatcagtaactctaactggaacagctttcttgtagaagtgtaaaaacagcttcatctctgcctctctccaccccaccccaatttcctagaaagccttgcactattcagctcccttagtgctttttgtcccttcccgaacaatatgcagtagctttaagccattcaagctccattatgcagtatatctgagaagggaaaggaaacaacccatttaaatttgaataaaaccgtgcctatgcgaacagtagcaatttagaatctcttttctgcttttaaaataatttatatttaaaaattgcactttagctttttgatccctttgtatttctcttattctctttctaacctcttctctgtcctcaaacttgcctttgctctcctttacaataccccccacccctcctccaaggctctgagcggcatcatttaaaatactttacagatatttgcaccaggtacatttatgtgcgtccattggtagcacagctgagacctgtgtctcacatcagcctaggtgaagcctactacaagaatgccaaggagaagagccagtacactatatggtttatactctttatccctttattcatagcatgttttttaaaaatgttatattatgcaacagatgtgaggcagcagctaagctatacttaagaattttctctcaccttccaaaccaaagtgtcctgaataagccaggagacttattcttttgtgcaccctggtgcacatctgactgttgtcctagccatagactctctgaggccactgaaagaacagtggccctatcgatttcattcctaggtctcaaaaatacaatgttgccttgtaacataattagggacagcacctctatttcacaattataatctaaggtaggataagacgacacagcagcaataaacttacaagtaaaattcaataccaaaacaaacacaaagaaatttaaaaaacaaaaaacctagctcatcatgttgtgaaaatgaaaaagtgaatgtccattcaaaatattttactatttcttgtggagtttttcagtgatgtaatgcttgtagccaaattgcttaaagagtgtttatatatttttttccttataaattgtctattttttaaaaaagctatttaaccacagctgaagtggggggtaaggccaaattgccaacacttgttaaaagattaatactcttaagtggcactctgatacctttccaacttgtcatcagaaaggaatcaataattaccaactgttgtatttagaccaacttacaatatctagctcattagaagccaggatctagaaagctccttctaagccatttaagatattcttacattgagcttcatattatagaactttataggattggatattttacaatagaataatttagcctcaggactgagaatgtggaagctgaataaattagctttaaatacatcattaaaatcttatgcacaataagctcattagattctagttttctcctttagaataccaatgccacagacactacaggagataatgaaaggtatcagttgtgttgagtggagggagtttaagagaaaggacccttcccaaccagcagccagtagaaaatacaacctactcacctttttcccttctaagttctgctaaatcacatctgcctcatagagaaaggaatgttgcctttgagaactgtcttggagaacagataagcttgaaatgttctctctagagaggacatagggtttgggatcctctgaaaaggcccagaaaaatagctcagttcaaatacaatgttctaggacaattggaatataaatattgtccaaaaatataattaaaagaaaaaagtttagcactgtgtaaagtaagtgttaactgaggaagtcccaaaaaggtgctgtcactttaagttctggacttggggttctttgtatttgtaaacagcaaagcatttgtgtttgtttgtctatttgtaaagcaaccaccttccttattggaaggagaaaaaaaggggtacatacatgtaaatacttgctgcagcatttaatatgtttaattttgtgttaagctttttgttgcatcgtgaacacatttattgttaccaatggacaatgagttcattaagactgttcaactaggtcagatttttacatctctttctagcaagaagagacaagattttgtgcatttgtacaaatgttaatatcactgcaattccaatataataaagcactcaaatgcaaataa

SEQ ID NO: 850 - protein, 501 aa, Homo sapiens
MNLEQERPFVCSAPGCSQRFPTEDHLMIHRHKHEMTLKFPSIKTDNMLSDQTPTPTRFLKNCEEVGLFSELDCSLEHEFRKAQEEESSKRNISMHNAVGGAMTGPGTHQLSSARLPNHDTNVVIQQAMPSPQSSSVITQAPSTNRQIGPVPGSLSSLLHLHNRQRQPMPASMPGTLPNPTMPGSSAVLMPMERQMSVNSSIMGMQGPNLSNPCASPQVQPMHSEAKMRLKAALTHHPAAMSNGNMNTMGHMMEMMGSRQDQTPHHHMHSHPHQHQTLPPHHPYPHQHQHPAHHPHPQPHHQQNHPHHHSHSHLHAHPAHHQTSPHPPLHTGNQAQVSPATQQMQPTQTIQPPQPTGGRRRRVVDEDPDERRRKFLERNRAAATRCRQKRKVWVMSLEKKAEELTQTNMQLQNEVSMLKNEVAQLKQLLLTHKDCPITAMQKESQGYLSPESSPPASPVPACSQQQVIQHNTITTSSSVSEVVGSSTLSQLTTHRTDLNPIL

SEQ ID NO: 851 - DNA, 8532 bp, Homo sapiens
aacatttacaacaaagttgattctgtgtagggttggaggctagacagttccacaaatttttagtcacattttccatgtcagttaaatctagggagttcaagactactggaaaaattagtctcattactaaaagaaacttagagaccgagggaggtaccagagtctaggaggtacctctgggttgcagaagtaattgtaaaataccagacctgttctttttactaaaagctagtttcactatcttctggtctgaaatactgaggcaaatactcaagacttattttcttcctaatcttgctggtgaaacagaagttactagaaagaaaggaagaaaaaacttgatttggtgactgcaggaagcaacacgttgctgcttttattctacagataatgatttatgaggaatccaagatgaatttggagcaggagaggccgtttgtctgcagtgccccaggctgctcccagcgcttcccaacagaggaccatctgatgattcataggcacaaacatgaaatgactttgaagtttccttcaataaaaacagacaatatgttatcagatcaaactccgaccccaacgagattcctgaagaactgcgaggaggtgggcctcttcagcgagctggactgctccctggagcacgagttcaggaaggctcaggaagaggagagcagcaagcggaatatctcgatgcataatgcagttggtggggccatgacggggcccggaactcaccagcttagcagcgctcggctgcccaaccatgacaccaacgttgtgattcagcaagccatgccgtcgcctcagtccagctctgtcatcactcaggcaccttccaccaaccgccagatcgggcctgtcccaggctctctatcttctctgctacatctccacaacagacagagacagcccatgccagcctccatgcctgggaccctgcccaaccctacaatgccaggatcttccgccgtcttgatgccaatggagcgacaaatgtcagtgaactccagcatcatggggatgcaaggtccaaatctcagcaacccctgtgcttctccccaggtccagccaatgcattcagaagccaaaatgaggttgaaggctgcattgactcaccaccctgctgccatgtcaaatgggaacatgaacaccatgggacacatgatggagatgatgggctcccggcaggaccagacgccacaccatcacatgcactcgcacccgcatcagcaccagacactgccaccccatcacccttacccacaccagcaccagcacccagcacaccatcctcaccctcaaccccatcaccagcagaaccatccacatcaccactcccattcccaccttcatgcacacccagcacatcaccagacctcgccacatccgcccctgcacaccggcaaccaagcacaggtttcaccagcaacacaacagatgcagccaacccagacaatacagccaccccagcccacaggggggcgccggcgaagggtggtagacgaggatccggacgagaggcggcggaaatttctggaacggaaccgggcagctgccacccgctgcagacagaagaggaaggtctgggtgatgtcattggaaaagaaagcagaagaactcacccagacaaacatgcagcttcagaatgaagtgtctatgttgaaaaatgaggtggcccagctgaaacagttgttgttaacacataaagactgcccaataacagccatgcagaaagaatcacaaggatatctaagtccagagagtagccctcctgctagtcctgtcccagcttgctcccagcaacaagtcatccagcataataccatcactacttcctcatcggtcagcgaggtggtaggaagctccaccctcagccagctcaccactcacagaacagacctgaatccgattctttaaaatgcaccatcagacctggcctccaagaagagctgtagcgtaccatgcgtcctttcttttaagggcatttttagaattaactcagacctggaagactcctcagttcttcaaagactggctttcatttttatagttattatggaaatgttgtcttttatacttagttatataagaaaaaagggagttatgcaattaatatctatcagcttgggaaacgctttggtgcttttctccagttttctggtaccagttacttgtttataaactgaaccttttctgtatatagccatggtttcattcttatcagtccaaccctttgcctgaaacattgaatcttgttaaaccacagcttttagctaaaatgaggtatacctagatgtcaagtaagacagatccaaggtaactgggtaggaaatcttttgacatcttaactcatgttgagtttgtgctgtggtgtcaccagaattccagataaacacacagcctttcccatacctttttttttcttactataaaatattataagatccattgatgtccaaataataccaccaagcatctcttcacctctcctcctcttggtccacttgctaatgcccagttttcttctccatttccactttttcttaggctccctatttactattcattttgacttccttctgttttatttttttccctttagcattgcatgtgaataagaaaataatgtttaaagaaaaaaaaaaaaaagcaaacctccaaaacgtggacctaaccattgcttcacttacacttcacccacagctggagttcattcaactcttgcttttcacaaaatagtaaccaggagatgtttaatgtgcctgatttaatgtttttaataatcacagcaaatgaaaggtggtttagttataagtgaagcatggttgaataccagctggggagacactagggaagggagctttgtaagccttgattgcgaaagtccaaattttgatgtggggctataacatgacacccttggattgcgactggttttatacggcctgcctataacgttgaaaatccatgtactacataataattcagaagggctctattcactacacagattacattgttcaatcatcagctgctaatagcctaagatttatttttttttttttcttaagcctatggaaccggctttgctgttctggggggtgaaaatagactaactactggagaaacaaagagagaaagaaaacccagtgtttccataggggcacttttagccttcccacaacagttaagcactctttgactgctgaaggaaccccatggatgaggtgcaggctacttcactctttttttttcttttttgagacagagtctcacctattgcccagactgaagtgcagtggtgcgatcatggatcactgcagcagcatcctccgagttcaagctatccttccacctccgcctcctgagtagctgggaccacaggttcacataaccatgcctggctaatttatttttacttttattttaaaataaaagatgaggtctgtcttatgttgcccaggctggtctcaaactatcctacttcttcctcccaaagtgttgggattataggtgtgagccactgcacccagcctacttcactcttctgaattattctgatttattttcaacaacttttgtgaacttgcccgtgatacaaagcagatagtccctgaaccacagtcgtgcctccttgaaacaagccattctactgtgctaatgttttaatatcacatctcacaaataacaggggtgaatgtttctctctagcaatctaggcaggtgctggtgtttcatctccatttgaatgcttgacctcttaatgtgtgtgtgtgtgtgtgtgtgtgtgtgtgtgttcatgggttttaaaagaacagtattttacaaaaggtgtagcttttataagagtgcagaaaagggaaggatgtgtttttttctctcactatagtataagaatctattttggagaaaaaaagaaaatatgagggtctcgaagcatgatttttatataactagtttcagttttatctaataacttactttttaaatcaatatttatcaacaatctttccttgtatgcagtgctttcaaaagatggttttgagtgtccagtgaaacttatgacttggatatatggttgaagaatcaaaacaaaagcaaaaaaaaaaagcaaaaaaagaaaagagaaaaaaagaaaaaatgcaaatggaataattttctattatattttagacaaacatatcattttcgagtattttaaatactgaattcatagttgttgttttttaaattccaacagtaacagctgaatggtttaatctgactggcttcctaagaaatgtttaagactcagctttaaaaagaagttaacattcatatctctgttttgaaatcaaaaatcatatttcaaaattctttcctaggaccatctatgtgtctcccctcccctccacaaaaaggagaaagagtgcattaaaatgtttagttgggttttttaatttttaatttttatgttatgttttgctttgttttaagtaaacaaaaatttttctttctttactgcatgcatagcacttaataaaatggatttttaaaaaatccactagtaatatcagaatgtccagggagtgactgtcactacaatgatggtttagtttacttctgttccaccttttgattgaaatatttagttgttaggctgaaagcctcggcagttaagaacttgcctgagttttcttcgttcagcaacttgacagtttgactgatgtgcattatatatagctcaattatgtctgttttttatgctaagtaggaaaaccaaccacacacattagcaaaccggcctcaacatataattagaataaactgtcttcttgttctactcagggcctttaggtgtgttcattcacggtatggaaatacagtaaatgaaagattccaactagttgtcagtgcttcttgaaattccaaacagaaagatacattggtcaaatccaacacttggcttatcaatattaagtcttttacctaaaggcccagccgtcaccagacaacagaataatcaatctgcctgaaaatccctcctccttgtcctacactttttgcctgtttgggagaatatctttgtactccattctcctccctcagccagttactgggtcacccatccatgtgttcatgaatcaatcatcacggcctgcagagcacctgtcctaaggagggaaaatcctgtcacactgcctctccccattcgtgtgtggttttcttgatcggtgagatctgtctctgaagtcactgccagcctccctgggaacgtctatagtgcctcccctgccttatgtgatgggagttaacaactcagataagtacacctgagagcatttctatcaggtaaactgtcacttaaatggaggtgtccacatcttaattgtttctccttgacacatttctcaatccacgaagccaggagaggtagagtgaaaatcccagccatggatgaatgtactaatttgaaagccaagtgttaagtcggatgttttcccgttacactactactcagccctctcctgcggccacatcaacggatgcaagtcacagtcttaacacagcctgtgggagacaagcagtttgtgtgctcacagtatatattatagtaattagggtgacttagagcaaatactcttcagatcctatgtagtcagtgaaacaaaatggagagcgtattctgatagaaggacgtcgacggtgaatgttctggtggttgttgcctgttaagtaaactttagtgtgtaagttgagtttgtcattaaaatcataaaccagctgcggtaacagacaagcctttggctggggagttttaagcctcggtaactgctataaaactagccatccagttaggatagaatgtgtttctttctggttaaaaaaaggaaaaaccatctaagaaaatatatatgtatgtatgtgtgtatacagtggaattcaaaggaccaaagcaaaatttgaacaggaatctattaatttagaattttataagatatttattaataaatgttatttttaaacattccatttgaacagtattctgtaggatctacttgtttttaaagtgttagtccataataaactactatagttatgtgtattttcatttttcagggtttcaaatggctattctccatcatttggtggaaatgtttgcttagatctctgtgcatagacatttcaaggatttttattgctctgtgagttattttttaatcaacattctgaacagttttttttaaacatttatttctgtgtgttcatttttaaagtaagctctttcatttaggaagcagagttcagctaaagggaatcagtaactctaactggaacagctttcttgtagaagtgtaaaaacagcttcatctctgcctctctccaccccaccccaatttcctagaaagccttgcactattcagctcccttagtgctttttgtcccttcccgaacaatatgcagtagctttaagccattcaagctccattatgcagtatatctgagaagggaaaggaaacaacccatttaaatttgaataaaaccgtgcctatgcgaacagtagcaatttagaatctcttttctgcttttaaaataatttatatttaaaaattgcactttagctttttgatccctttgtatttctcttattctctttctaacctcttctctgtcctcaaacttgcctttgctctcctttacaataccccccacccctcctccaaggctctgagcggcatcatttaaaatactttacagatatttgcaccaggtacatttatgtgcgtccattggtagcacagctgagacctgtgtctcacatcagcctaggtgaagcctactacaagaatgccaaggagaagagccagtacactatatggtttatactctttatccctttattcatagcatgttttttaaaaatgttatattatgcaacagatgtgaggcagcagctaagctatacttaagaattttctctcaccttccaaaccaaagtgtcctgaataagccaggagacttattcttttgtgcaccctggtgcacatctgactgttgtcctagccatagactctctgaggccactgaaagaacagtggccctatcgatttcattcctaggtctcaaaaatacaatgttgccttgtaacataattagggacagcacctctatttcacaattataatctaaggtaggataagacgacacagcagcaataaacttacaagtaaaattcaataccaaaacaaacacaaagaaatttaaaaaacaaaaaacctagctcatcatgttgtgaaaatgaaaaagtgaatgtccattcaaaatattttactatttcttgtggagtttttcagtgatgtaatgcttgtagccaaattgcttaaagagtgtttatatatttttttccttataaattgtctattttttaaaaaagctatttaaccacagctgaagtggggggtaaggccaaattgccaacacttgttaaaagattaatactcttaagtggcactctgatacctttccaacttgtcatcagaaaggaatcaataattaccaactgttgtatttagaccaacttacaatatctagctcattagaagccaggatctagaaagctccttctaagccatttaagatattcttacattgagcttcatattatagaactttataggattggatattttacaatagaataatttagcctcaggactgagaatgtggaagctgaataaattagctttaaatacatcattaaaatcttatgcacaataagctcattagattctagttttctcctttagaataccaatgccacagacactacaggagataatgaaaggtatcagttgtgttgagtggagggagtttaagagaaaggacccttcccaaccagcagccagtagaaaatacaacctactcacctttttcccttctaagttctgctaaatcacatctgcctcatagagaaaggaatgttgcctttgagaactgtcttggagaacagataagcttgaaatgttctctctagagaggacatagggtttgggatcctctgaaaaggcccagaaaaatagctcagttcaaatacaatgttctaggacaattggaatataaatattgtccaaaaatataattaaaagaaaaaagtttagcactgtgtaaagtaagtgttaactgaggaagtcccaaaaaggtgctgtcactttaagttctggacttggggttctttgtatttgtaaacagcaaagcatttgtgtttgtttgtctatttgtaaagcaaccaccttccttattggaaggagaaaaaaaggggtacatacatgtaaatacttgctgcagcatttaatatgtttaattttgtgttaagctttttgttgcatcgtgaacacatttattgttaccaatggacaatgagttcattaagactgttcaactaggtcagatttttacatctctttctagcaagaagagacaagattttgtgcatttgtacaaatgttaatatcactgcaattccaatataataaagcactcaaatgcaaataa

SEQ ID NO: 852 - protein, 508 aa, Homo sapiens
MIYEESKMNLEQERPFVCSAPGCSQRFPTEDHLMIHRHKHEMTLKFPSIKTDNMLSDQTPTPTRFLKNCEEVGLFSELDCSLEHEFRKAQEEESSKRNISMHNAVGGAMTGPGTHQLSSARLPNHDTNVVIQQAMPSPQSSSVITQAPSTNRQIGPVPGSLSSLLHLHNRQRQPMPASMPGTLPNPTMPGSSAVLMPMERQMSVNSSIMGMQGPNLSNPCASPQVQPMHSEAKMRLKAALTHHPAAMSNGNMNTMGHMMEMMGSRQDQTPHHHMHSHPHQHQTLPPHHPYPHQHQHPAHHPHPQPHHQQNHPHHHSHSHLHAHPAHHQTSPHPPLHTGNQAQVSPATQQMQPTQTIQPPQPTGGRRRRVVDEDPDERRRKFLERNRAAATRCRQKRKVWVMSLEKKAEELTQTNMQLQNEVSMLKNEVAQLKQLLLTHKDCPITAMQKESQGYLSPESSPPASPVPACSQQQVIQHNTITTSSSVSEVVGSSTLSQLTTHRTDLNPIL

SEQ ID NO: 853 - DNA, 8188 bp, Homo sapiens
gatctgatgaatcccaggagtggagcaagaggcagattttggacacggttatgagaatgacagaaactgcctaaagcatttatgctctggcattcgtccctgtttctggaggtccagtaagcgcttcccaacagaggaccatctgatgattcataggcacaaacatgaaatgactttgaagtttccttcaataaaaacagacaatatgttatcagatcaaactccgaccccaacgagattcctgaagaactgcgaggaggtgggcctcttcagcgagctggactgctccctggagcacgagttcaggaaggctcaggaagaggagagcagcaagcggaatatctcgatgcataatgcagttggtggggccatgacggggcccggaactcaccagcttagcagcgctcggctgcccaaccatgacaccaacgttgtgattcagcaagccatgccgtcgcctcagtccagctctgtcatcactcaggcaccttccaccaaccgccagatcgggcctgtcccaggctctctatcttctctgctacatctccacaacagacagagacagcccatgccagcctccatgcctgggaccctgcccaaccctacaatgccaggatcttccgccgtcttgatgccaatggagcgacaaatgtcagtgaactccagcatcatggggatgcaaggtccaaatctcagcaacccctgtgcttctccccaggtccagccaatgcattcagaagccaaaatgaggttgaaggctgcattgactcaccaccctgctgccatgtcaaatgggaacatgaacaccatgggacacatgatggagatgatgggctcccggcaggaccagacgccacaccatcacatgcactcgcacccgcatcagcaccagacactgccaccccatcacccttacccacaccagcaccagcacccagcacaccatcctcaccctcaaccccatcaccagcagaaccatccacatcaccactcccattcccaccttcatgcacacccagcacatcaccagacctcgccacatccgcccctgcacaccggcaaccaagcacaggtttcaccagcaacacaacagatgcagccaacccagacaatacagccaccccagcccacaggggggcgccggcgaagggtggtagacgaggatccggacgagaggcggcggaaatttctggaacggaaccgggcagctgccacccgctgcagacagaagaggaaggtctgggtgatgtcattggaaaagaaagcagaagaactcacccagacaaacatgcagcttcagaatgaagtgtctatgttgaaaaatgaggtggcccagctgaaacagttgttgttaacacataaagactgcccaataacagccatgcagaaagaatcacaaggatatctaagtccagagagtagccctcctgctagtcctgtcccagcttgctcccagcaacaagtcatccagcataataccatcactacttcctcatcggtcagcgaggtggtaggaagctccaccctcagccagctcaccactcacagaacagacctgaatccgattctttaaaatgcaccatcagacctggcctccaagaagagctgtagcgtaccatgcgtcctttcttttaagggcatttttagaattaactcagacctggaagactcctcagttcttcaaagactggctttcatttttatagttattatggaaatgttgtcttttatacttagttatataagaaaaaagggagttatgcaattaatatctatcagcttgggaaacgctttggtgcttttctccagttttctggtaccagttacttgtttataaactgaaccttttctgtatatagccatggtttcattcttatcagtccaaccctttgcctgaaacattgaatcttgttaaaccacagcttttagctaaaatgaggtatacctagatgtcaagtaagacagatccaaggtaactgggtaggaaatcttttgacatcttaactcatgttgagtttgtgctgtggtgtcaccagaattccagataaacacacagcctttcccatacctttttttttcttactataaaatattataagatccattgatgtccaaataataccaccaagcatctcttcacctctcctcctcttggtccacttgctaatgcccagttttcttctccatttccactttttcttaggctccctatttactattcattttgacttccttctgttttatttttttccctttagcattgcatgtgaataagaaaataatgtttaaagaaaaaaaaaaaaaagcaaacctccaaaacgtggacctaaccattgcttcacttacacttcacccacagctggagttcattcaactcttgcttttcacaaaatagtaaccaggagatgtttaatgtgcctgatttaatgtttttaataatcacagcaaatgaaaggtggtttagttataagtgaagcatggttgaataccagctggggagacactagggaagggagctttgtaagccttgattgcgaaagtccaaattttgatgtggggctataacatgacacccttggattgcgactggttttatacggcctgcctataacgttgaaaatccatgtactacataataattcagaagggctctattcactacacagattacattgttcaatcatcagctgctaatagcctaagatttatttttttttttttcttaagcctatggaaccggctttgctgttctggggggtgaaaatagactaactactggagaaacaaagagagaaagaaaacccagtgtttccataggggcacttttagccttcccacaacagttaagcactctttgactgctgaaggaaccccatggatgaggtgcaggctacttcactctttttttttcttttttgagacagagtctcacctattgcccagactgaagtgcagtggtgcgatcatggatcactgcagcagcatcctccgagttcaagctatccttccacctccgcctcctgagtagctgggaccacaggttcacataaccatgcctggctaatttatttttacttttattttaaaataaaagatgaggtctgtcttatgttgcccaggctggtctcaaactatcctacttcttcctcccaaagtgttgggattataggtgtgagccactgcacccagcctacttcactcttctgaattattctgatttattttcaacaacttttgtgaacttgcccgtgatacaaagcagatagtccctgaaccacagtcgtgcctccttgaaacaagccattctactgtgctaatgttttaatatcacatctcacaaataacaggggtgaatgtttctctctagcaatctaggcaggtgctggtgtttcatctccatttgaatgcttgacctcttaatgtgtgtgtgtgtgtgtgtgtgtgtgtgtgtgttcatgggttttaaaagaacagtattttacaaaaggtgtagcttttataagagtgcagaaaagggaaggatgtgtttttttctctcactatagtataagaatctattttggagaaaaaaagaaaatatgagggtctcgaagcatgatttttatataactagtttcagttttatctaataacttactttttaaatcaatatttatcaacaatctttccttgtatgcagtgctttcaaaagatggttttgagtgtccagtgaaacttatgacttggatatatggttgaagaatcaaaacaaaagcaaaaaaaaaaagcaaaaaaagaaaagagaaaaaaagaaaaaatgcaaatggaataattttctattatattttagacaaacatatcattttcgagtattttaaatactgaattcatagttgttgttttttaaattccaacagtaacagctgaatggtttaatctgactggcttcctaagaaatgtttaagactcagctttaaaaagaagttaacattcatatctctgttttgaaatcaaaaatcatatttcaaaattctttcctaggaccatctatgtgtctcccctcccctccacaaaaaggagaaagagtgcattaaaatgtttagttgggttttttaatttttaatttttatgttatgttttgctttgttttaagtaaacaaaaatttttctttctttactgcatgcatagcacttaataaaatggatttttaaaaaatccactagtaatatcagaatgtccagggagtgactgtcactacaatgatggtttagtttacttctgttccaccttttgattgaaatatttagttgttaggctgaaagcctcggcagttaagaacttgcctgagttttcttcgttcagcaacttgacagtttgactgatgtgcattatatatagctcaattatgtctgttttttatgctaagtaggaaaaccaaccacacacattagcaaaccggcctcaacatataattagaataaactgtcttcttgttctactcagggcctttaggtgtgttcattcacggtatggaaatacagtaaatgaaagattccaactagttgtcagtgcttcttgaaattccaaacagaaagatacattggtcaaatccaacacttggcttatcaatattaagtcttttacctaaaggcccagccgtcaccagacaacagaataatcaatctgcctgaaaatccctcctccttgtcctacactttttgcctgtttgggagaatatctttgtactccattctcctccctcagccagttactgggtcacccatccatgtgttcatgaatcaatcatcacggcctgcagagcacctgtcctaaggagggaaaatcctgtcacactgcctctccccattcgtgtgtggttttcttgatcggtgagatctgtctctgaagtcactgccagcctccctgggaacgtctatagtgcctcccctgccttatgtgatgggagttaacaactcagataagtacacctgagagcatttctatcaggtaaactgtcacttaaatggaggtgtccacatcttaattgtttctccttgacacatttctcaatccacgaagccaggagaggtagagtgaaaatcccagccatggatgaatgtactaatttgaaagccaagtgttaagtcggatgttttcccgttacactactactcagccctctcctgcggccacatcaacggatgcaagtcacagtcttaacacagcctgtgggagacaagcagtttgtgtgctcacagtatatattatagtaattagggtgacttagagcaaatactcttcagatcctatgtagtcagtgaaacaaaatggagagcgtattctgatagaaggacgtcgacggtgaatgttctggtggttgttgcctgttaagtaaactttagtgtgtaagttgagtttgtcattaaaatcataaaccagctgcggtaacagacaagcctttggctggggagttttaagcctcggtaactgctataaaactagccatccagttaggatagaatgtgtttctttctggttaaaaaaaggaaaaaccatctaagaaaatatatatgtatgtatgtgtgtatacagtggaattcaaaggaccaaagcaaaatttgaacaggaatctattaatttagaattttataagatatttattaataaatgttatttttaaacattccatttgaacagtattctgtaggatctacttgtttttaaagtgttagtccataataaactactatagttatgtgtattttcatttttcagggtttcaaatggctattctccatcatttggtggaaatgtttgcttagatctctgtgcatagacatttcaaggatttttattgctctgtgagttattttttaatcaacattctgaacagttttttttaaacatttatttctgtgtgttcatttttaaagtaagctctttcatttaggaagcagagttcagctaaagggaatcagtaactctaactggaacagctttcttgtagaagtgtaaaaacagcttcatctctgcctctctccaccccaccccaatttcctagaaagccttgcactattcagctcccttagtgctttttgtcccttcccgaacaatatgcagtagctttaagccattcaagctccattatgcagtatatctgagaagggaaaggaaacaacccatttaaatttgaataaaaccgtgcctatgcgaacagtagcaatttagaatctcttttctgcttttaaaataatttatatttaaaaattgcactttagctttttgatccctttgtatttctcttattctctttctaacctcttctctgtcctcaaacttgcctttgctctcctttacaataccccccacccctcctccaaggctctgagcggcatcatttaaaatactttacagatatttgcaccaggtacatttatgtgcgtccattggtagcacagctgagacctgtgtctcacatcagcctaggtgaagcctactacaagaatgccaaggagaagagccagtacactatatggtttatactctttatccctttattcatagcatgttttttaaaaatgttatattatgcaacagatgtgaggcagcagctaagctatacttaagaattttctctcaccttccaaaccaaagtgtcctgaataagccaggagacttattcttttgtgcaccctggtgcacatctgactgttgtcctagccatagactctctgaggccactgaaagaacagtggccctatcgatttcattcctaggtctcaaaaatacaatgttgccttgtaacataattagggacagcacctctatttcacaattataatctaaggtaggataagacgacacagcagcaataaacttacaagtaaaattcaataccaaaacaaacacaaagaaatttaaaaaacaaaaaacctagctcatcatgttgtgaaaatgaaaaagtgaatgtccattcaaaatattttactatttcttgtggagtttttcagtgatgtaatgcttgtagccaaattgcttaaagagtgtttatatatttttttccttataaattgtctattttttaaaaaagctatttaaccacagctgaagtggggggtaaggccaaattgccaacacttgttaaaagattaatactcttaagtggcactctgatacctttccaacttgtcatcagaaaggaatcaataattaccaactgttgtatttagaccaacttacaatatctagctcattagaagccaggatctagaaagctccttctaagccatttaagatattcttacattgagcttcatattatagaactttataggattggatattttacaatagaataatttagcctcaggactgagaatgtggaagctgaataaattagctttaaatacatcattaaaatcttatgcacaataagctcattagattctagttttctcctttagaataccaatgccacagacactacaggagataatgaaaggtatcagttgtgttgagtggagggagtttaagagaaaggacccttcccaaccagcagccagtagaaaatacaacctactcacctttttcccttctaagttctgctaaatcacatctgcctcatagagaaaggaatgttgcctttgagaactgtcttggagaacagataagcttgaaatgttctctctagagaggacatagggtttgggatcctctgaaaaggcccagaaaaatagctcagttcaaatacaatgttctaggacaattggaatataaatattgtccaaaaatataattaaaagaaaaaagtttagcactgtgtaaagtaagtgttaactgaggaagtcccaaaaaggtgctgtcactttaagttctggacttggggttctttgtatttgtaaacagcaaagcatttgtgtttgtttgtctatttgtaaagcaaccaccttccttattggaaggagaaaaaaaggggtacatacatgtaaatacttgctgcagcatttaatatgtttaattttgtgttaagctttttgttgcatcgtgaacacatttattgttaccaatggacaatgagttcattaagactgttcaactaggtcagatttttacatctctttctagcaagaagagacaagattttgtgcatttgtacaaatgttaatatcactgcaattccaatataataaagcactcaaatgcaaataa

SEQ ID NO: 854 - protein, 475 aa, Homo sapiens
MIHRHKHEMTLKFPSIKTDNMLSDQTPTPTRFLKNCEEVGLFSELDCSLEHEFRKAQEEESSKRNISMHNAVGGAMTGPGTHQLSSARLPNHDTNVVIQQAMPSPQSSSVITQAPSTNRQIGPVPGSLSSLLHLHNRQRQPMPASMPGTLPNPTMPGSSAVLMPMERQMSVNSSIMGMQGPNLSNPCASPQVQPMHSEAKMRLKAALTHHPAAMSNGNMNTMGHMMEMMGSRQDQTPHHHMHSHPHQHQTLPPHHPYPHQHQHPAHHPHPQPHHQQNHPHHHSHSHLHAHPAHHQTSPHPPLHTGNQAQVSPATQQMQPTQTIQPPQPTGGRRRRVVDEDPDERRRKFLERNRAAATRCRQKRKVWVMSLEKKAEELTQTNMQLQNEVSMLKNEVAQLKQLLLTHKDCPITAMQKESQGYLSPESSPPASPVPACSQQQVIQHNTITTSSSVSEVVGSSTLSQLTTHRTDLNPIL

SEQ ID NO: 855 - DNA, 2487 bp, Homo sapiens
ggagtcgagcgagagcctgtggaggagtccgcctgctgtagcgtgcgtaagcaaggcagctacgccgggcggctacgctgcggaatcggcgtaggcgcctttggagaatcggcgggctgcgctccgctggggctggtcgcggagggggggaggggatgtcggtcagtgcgagatccgctgctgctgaggagaggagcgtcaacagcagcaccatggctcaacagaagaaccttgaaggctatgtgggatttgccaatctcccaaatcaagtatacagaaaatcggtgaagagaggttttgaattcacgcttatggtagtgggtgaatctggattgggaaagtcgacattaatcaactcattattcctcacagatttgtattctccagagtatccaggtccttctcatagaattaaaaagactgtacaggtggaacaatccaaagttttaatcaaagaaggtggtgttcagttgctgctcacaatagttgataccccaggatttggagatgcagtggataatagtaattgctggcagcctgttatcgactacattgatagtaaatttgaggactacctaaatgcagaatcacgagtgaacagacgtcagatgcctgataacagggtgcagtgttgtttatacttcattgctccttcaggacatggacttaaaccattggatattgagtttatgaagcgtttgcatgaaaaagtgaatatcatcccacttattgccaaagcagacacactcacaccagaggaatgccaacagtttaaaaaacagataatgaaagaaatccaagaacataaaattaaaatatacgaatttccagaaacagatgatgaagaagaaaataaacttgttaaaaagataaaggaccgtttacctcttgctgtggtaggtagtaatactatcattgaagttaatggcaaaagggtcagaggaaggcagtatccttggggtgttgctgaagttgaaaatggtgaacattgtgattttacaatcctaagaaatatgttgataagaacacacatgcaggacttgaaagatgttactaataatgtccactatgagaactacagaagcagaaaacttgcagctgtgacttataatggagttgataacaacaagaataaagggcagctgactaagagccctctggcacaaatggaagaagaaagaagggagcatgtagctaaaatgaagaagatggagatggagatggagcaggtgtttgagatgaaggtcaaagaaaaagttcaaaaactgaaggactctgaagctgagctccagcggcgccatgagcaaatgaaaaagaatttggaagcacagcacaaagaattggaggaaaaacgtcgtcagttcgaggatgagaaagcaaactgggaagctcaacaacgtattttagaacaacagaactcttcaagaaccttggaaaagaacaagaagaaagggaagatcttttaaactctctattgaccaccagttaacgtattagttgccaatatgccagcttggacatcagtgtttgttggatccgtttgaccaatttgcaccagttttatccataatgatggatttaacagcatgacaaaaattatttttttttttgttcttgatggagattaagatgccttgaattgtctagggtgttctgtacttagaaagtaagagctctaagtacctttcctacattttctttttttattaaacagatatcttcagtttaatgcaagagaacattttactgttgtacaatcatgttctggtggtttgattgtttacaggatattccaaaataaaaggactctggaagattttcattgaggataaattgccataatatgatgcaaactgtgcttctctatgataattacaatacaaaggttccattcagtgcagcatatacaataatgtaatttagtctaacacagttgaccctattttttgacacttccattgtttaaaaatacacatggaaaaaaaaaaaaccctatatgcttactgtgcacctagagcttttttataacaacgtctttttgtttgtttgttttggattctttaaatatatattattctcatttagtgccctctttagccagaatctcattactgcttcatttttgtaataacatttaatttagatattttccatatattggcactgctaaaatagaatatagcatctttcatatggtaggaaccaacaaggaaactttcctttaactccctttttacactttatggtaagtagcagggggggaaatgcatttatagatcatttctaggcaaaattgtgaagctaatgaccaacctgtttctacctatatgcagtctctttattttactagaaatgggaatcatggcctcttgaagagaaaaaagtcaccattctgcatttagctgtattcatatattgcatttctgtattttttgtttgtattgtaaaaaattcacataataaacgatgttgtgatgtaaaaaaaaa

SEQ ID NO: 856 - protein, 417 aa, Homo sapiens
MAQQKNLEGYVGFANLPNQVYRKSVKRGFEFTLMVVGESGLGKSTLINSLFLTDLYSPEYPGPSHRIKKTVQVEQSKVLIKEGGVQLLLTIVDTPGFGDAVDNSNCWQPVIDYIDSKFEDYLNAESRVNRRQMPDNRVQCCLYFIAPSGHGLKPLDIEFMKRLHEKVNIIPLIAKADTLTPEECQQFKKQIMKEIQEHKIKIYEFPETDDEEENKLVKKIKDRLPLAVVGSNTIIEVNGKRVRGRQYPWGVAEVENGEHCDFTILRNMLIRTHMQDLKDVTNNVHYENYRSRKLAAVTYNGVDNNKNKGQLTKSPLAQMEEERREHVAKMKKMEMEMEQVFEMKVKEKVQKLKDSEAELQRRHEQMKKNLEAQHKELEEKRRQFEDEKANWEAQQRILEQQNSSRTLEKNKKKGKIF

SEQ ID NO: 857 - DNA, 2496 bp, Homo sapiens
ggagtcgagcgagagcctgtggaggagtccgcctgctgtagcgtgcgtaagcaaggcagctacgccgggcggctacgctgcggaatcggcgtaggcgcctttggagaatcggcgggctgcgctccgctggggctggtcgcggagggggggaggggatgtcggtcagtgcgagatccgctgctgctgaggagaggagcgtcaacagcagcaccatggtagctcaacagaagaaccttgaaggctatgtgggatttgccaatctcccaaatcaagtatacagaaaatcggtgaagagaggttttgaattcacgcttatggtagtgggtgaatctggattgggaaagtcgacattaatcaactcattattcctcacagatttgtattctccagagtatccaggtccttctcatagaattaaaaagactgtacaggtggaacaatccaaagttttaatcaaagaaggtggtgttcagttgctgctcacaatagttgataccccaggatttggagatgcagtggataatagtaattgctggcagcctgttatcgactacattgatagtaaatttgaggactacctaaatgcagaatcacgagtgaacagacgtcagatgcctgataacagggtgcagtgttgtttatacttcattgctccttcaggacatggacttaaaccattggatattgagtttatgaagcgtttgcatgaaaaagtgaatatcatcccacttattgccaaagcagacacactcacaccagaggaatgccaacagtttaaaaaacagataatgaaagaaatccaagaacataaaattaaaatatacgaatttccagaaacagatgatgaagaagaaaataaacttgttaaaaagataaaggaccgtttacctcttgctgtggtaggtagtaatactatcattgaagttaatggcaaaagggtcagaggaaggcagtatccttggggtgttgctgaagttgaaaatggtgaacattgtgattttacaatcctaagaaatatgttgataagaacacacatgcaggacttgaaagatgttactaataatgtccactatgagaactacagaagcagaaaacttgcagctgtgacttataatggagttgataacaacaagaataaagggcagctgactaagagccctctggcacaaatggaagaagaaagaagggagcatgtagctaaaatgaagaagatggagatggagatggagcaggtgtttgagatgaaggtcaaagaaaaagttcaaaaactgaaggactctgaagctgagctccagcggcgccatgagcaaatgaaaaagaatttggaagcacagcacaaagaattggaggaaaaacgtcgtcagttcgaggatgagaaagcaaactgggaagctcaacaacgtattttagaacaacagaactcttcaagaaccttggaaaagaacaagaagaaagggaagatcttttaaactctctattgaccaccagttaacgtattagttgccaatatgccagcttggacatcagtgtttgttggatccgtttgaccaatttgcaccagttttatccataatgatggatttaacagcatgacaaaaattatttttttttttgttcttgatggagattaagatgccttgaattgtctagggtgttctgtacttagaaagtaagagctctaagtacctttcctacattttctttttttattaaacagatatcttcagtttaatgcaagagaacattttactgttgtacaatcatgttctggtggtttgattgtttacaggatattccaaaataaaaggactctggaagattttcattgaggataaattgccataatatgatgcaaactgtgcttctctatgataattacaatacaaaggttccattcagtgcagcatatacaataatgtaatttagtctaacacagttgaccctattttttgacacttccattgtttaaaaatacacatggaaaaaaaaaaaaccctatatgcttactgtgcacctagagcttttttataacaacgtctttttgtttgtttgttttggattctttaaatatatattattctcatttagtgccctctttagccagaatctcattactgcttcatttttgtaataacatttaatttagatattttccatatattggcactgctaaaatagaatatagcatctttcatatggtaggaaccaacaaggaaactttcctttaactccctttttacactttatggtaagtagcagggggggaaatgcatttatagatcatttctaggcaaaattgtgaagctaatgaccaacctgtttctacctatatgcagtctctttattttactagaaatgggaatcatggcctcttgaagagaaaaaagtcaccattctgcatttagctgtattcatatattgcatttctgtattttttgtttgtattgtaaaaaattcacataataaacgatgttgtgatgtaaaaaaaaaaaaaaa

SEQ ID NO: 858 - protein, 418 aa, Homo sapiens
MVAQQKNLEGYVGFANLPNQVYRKSVKRGFEFTLMVVGESGLGKSTLINSLFLTDLYSPEYPGPSHRIKKTVQVEQSKVLIKEGGVQLLLTIVDTPGFGDAVDNSNCWQPVIDYIDSKFEDYLNAESRVNRRQMPDNRVQCCLYFIAPSGHGLKPLDIEFMKRLHEKVNIIPLIAKADTLTPEECQQFKKQIMKEIQEHKIKIYEFPETDDEEENKLVKKIKDRLPLAVVGSNTIIEVNGKRVRGRQYPWGVAEVENGEHCDFTILRNMLIRTHMQDLKDVTNNVHYENYRSRKLAAVTYNGVDNNKNKGQLTKSPLAQMEEERREHVAKMKKMEMEMEQVFEMKVKEKVQKLKDSEAELQRRHEQMKKNLEAQHKELEEKRRQFEDEKANWEAQQRILEQQNSSRTLEKNKKKGKIF

SEQ ID NO: 859 - DNA, 1419 bp, Homo sapiens
atggtttatcagagtctctcatctttaatgaaaacttttgctgcttttcaagcaaacttggttcccataatttgggattcatccacagaatgttcaaagtttagtgtcagccattttcagcagaaaatagaggctgacaatttcctgtgttctttagaagactttgaaagcttcatgggaagaatgaagactattcttggcctgaacatttgccccatggggtgctggacccagccaaacagccttgtattggcaaaggagggtcaagtgaaaggagaccttgttctgcgccaggctctcaaaaagggtagcctgaaaccctattggccacacggaacctcttttagatgctgtttgtggacctgccgaaatcgaatgccactcaggctttctgaaaccctatgggggtgggaagaggcagtagctgacacctctgagagcagaggggagattgacatttcaccaccaacaaaaggcgagaggccttttctgtcctgtgtccttgagacccagaacttagccatataccaatgggatgatgtcctccccaggggcaggagcagacccagaaccaggaatggctgtggggaacgcagatacccttcagaggagtttgctcagaggacacaattgtgcacgtgtgatccttggggcgacttgcaggggtacccttatgccatgcacaagaatccagcccagcagttctcaaagtttccttttcccacagagctatacattttctttatcttccctcctccttcctctttgtcctttgataaagaaatccaagaacataacgttaaaatacatgaatttccagaaacagatgatgaagaagaaaaaaaacttgttaaaaagataaaggaccatttacctcttgctgtggtgggtagtaatactatcattgaagttaatggcaaaagggtcataggaaggcagtatccttggagtgttgctgaagttgaaaatggtgaacattgtgattttacagttctaagaaatatgttgataagaaaacacacgcaggacttgaaagatgttactaataatgtccactacgagaactatggaatcagaaaactggcagctgtgacttatcatggagttgataacaagaagaataaagggcagtttgctaagagccctctggcacaaatggaagaagaaagaagggagcaagtagctaaaattaagaagatggagatggagatggagcaggtgtttgaaatgaaggtcaaagaaaaagttcaaaaactgaaggactctgaagctgagctccagcggcgccatgagcaaatgaaaaagaatttggaagcacagcacaaagaattggaggaaaaacgtcgtcagtttgaggatgagaaagcaaactgggaagctcaacaacgtattttagaacaacagaactcttcaaggtaa

SEQ ID NO: 860 - protein, 472 aa, Homo sapiens
MVYQSLSSLMKTFAAFQANLVPIIWDSSTECSKFSVSHFQQKIEADNFLCSLEDFESFMGRMKTILGLNICPMGCWTQPNSLVLAKEGQVKGDLVLRQALKKGSLKPYWPHGTSFRCCLWTCRNRMPLRLSETLWGWEEAVADTSESRGEIDISPPTKGERPFLSCVLETQNLAIYQWDDVLPRGRSRPRTRNGCGERRYPSEEFAQRTQLCTCDPWGDLQGYPYAMHKNPAQQFSKFPFPTELYIFFIFPPPSSLSFDKEIQEHNVKIHEFPETDDEEEKKLVKKIKDHLPLAVVGSNTIIEVNGKRVIGRQYPWSVAEVENGEHCDFTVLRNMLIRKHTQDLKDVTNNVHYENYGIRKLAAVTYHGVDNKKNKGQFAKSPLAQMEEERREQVAKIKKMEMEMEQVFEMKVKEKVQKLKDSEAELQRRHEQMKKNLEAQHKELEEKRRQFEDEKANWEAQQRILEQQNSSR

SEQ ID NO: 861 - DNA, 830 bp, Homo sapiens
atggtggccaagttggagtatgagtctgtgctgtgtgtgaagccaaacatcagcgtctactggattcctccctgggcctccaactgtgattacagggcatctgactggaaattagaccagcctgattggactgttcacctccgaatcatttcaaaagggaagactgcctatatcaaactcgaggataaagtttcaggggagctcttcactcagataccagtagaacaatatcctggtattgctgtggagacagtgacagattccagctgctactttttaatctggattcaggatggtcctgggcagagtgctgtcattgacactgctggcttcacagatcggggagatgcctttgaatttaatgtctccttgcaggatcacttcaaatgggtaaagcaggaatctgagatttccaaggaatctcaagaaatggacgcttgtcctaacttggatctgggcttcaaagaaagacaaaccatcaagttgagtacggggaacattacaaccaagaatggatgtgcttctaagcccaggactgcaatgggtgggggcctgagcttactcgcatccccaccaggaggccaagtcagtattcccccactgtcctcctcagttgcatcagcaatcatgtcaccctaccagccattccaaaatctaaccatggaggcagtgatgcagatatccttttagatttggattctcctgctcctgtcacaacaccagcaccaactccagtttctgcaagcaatgacttgtggggagacttcagcactgcatccagctctgttccaaaccaggcaccacagccatccaactgggtccaattctga

SEQ ID NO: 862 - DNA, 918 bp, Homo sapiens
atgcctggccacaatacctccaggaattcctcttgcgatcctatagtgacaccccacttaatcagcctctacttcatagtgcttattggcgggctggtgggtgtcatttccattcttttcctcctggtgaaaatgaacacccggtcagtgaccaccatggcggtcattaacttggtggtggtccacagcgtttttctgctgacagtgccatttcgcttgacctacctcatcaagaagacttggatgtttgggctgcccttctgcaaatttgtgagtgccatgctgcacatccacatgtacctcacgttcctattctatgtggtgatcctggtcaccagatacctcatcttcttcaagtgcaaagacaaagtggaattctacagaaaactgcatgctgtggctgccagtgctggcatgtggacgctggtgattgtcattgtggtacccctggttgtctcccggtatggaatccatgaggaatacaatgaggagcactgttttaaatttcacaaagagcttgcttacacatatgtgaaaatcatcaactatatgatagtcatttttgtcatagccgttgctgtgattctgttggtcttccaggtcttcatcattatgttgatggtgcagaagctacgccactctttactatcccaccaggagttctgggctcagctgaaaaacctattttttataggggtcatccttgtttgtttccttccctaccagttctttaggatctattacttgaatgttgtgacgcattccaatgcctgtaacagcaaggttgcattttataacgaaatcttcttgagtgtaacagcaattagctgctatgatttgcttctctttgtctttgggggaagccattggtttaagcaaaagataattggcttatggaattgtgttttgtgccgttag

SEQ ID NO: 863 - protein, 305 aa, Homo sapiens
MPGHNTSRNSSCDPIVTPHLISLYFIVLIGGLVGVISILFLLVKMNTRSVTTMAVINLVVVHSVFLLTVPFRLTYLIKKTWMFGLPFCKFVSAMLHIHMYLTFLFYVVILVTRYLIFFKCKDKVEFYRKLHAVAASAGMWTLVIVIVVPLVVSRYGIHEEYNEEHCFKFHKELAYTYVKIINYMIVIFVIAVAVILLVFQVFIIMLMVQKLRHSLLSHQEFWAQLKNLFFIGVILVCFLPYQFFRIYYLNVVTHSNACNSKVAFYNEIFLSVTAISCYDLLLFVFGGSHWFKQKIIGLWNCVLCR

SEQ ID NO: 864 - DNA, 2223 bp, Homo sapiens
gctgaaagaatgttcttataatgatccaagaggaagtggcaaatgagtgctcttcttcaggatccaatgatagctggacaagtcagtaagcccttgctgtcagtgcggagtgaaatgaatgcggagttgagaggtgaggacaaggctgctacttcagacagcgagctgaatgagcccctgcttgcgcctgtggaatcaaatgacagcgaggacactcccagcaagctcttcggggctagaggaaacccagcattatcagacccaggcactcctgaccaacaccaggccagtcagacccaccccccatttccagttgggccacagccacttctgacggcacagcagttagcttctgctgtggccggcgtgatgccgggaggccccccagccctcaaccagccaatcctcattcccttcaacatggcgggacagctaggaggccagcaaggactggttctcacactgccaacagcgaatctcaccaacatccaagggctggtggcagcagctgcagccggaggcattatgactctgccactgcaaaatctacaagctacctcatccctgaactcccagctccagcagctccagctccagctccagcagcagcagcagcagcagcagcagcagcctcccccgtcaaccaaccagcacccgcaaccagccccacaggcgccctcgcagtcccagcagcagccgctgcagcccaccccaccccagcagccaccacccgcctctcagcagccgccagctcctacatctcagctgcaacaggcgcctcagccccagcagcaccaaccccactcccactcccagaaccagaaccaaccatctccaacccagcagagctccagccccccgcagaaacctagtcagtctccaggacatggcctgccttcaccgctcacgccacccaatcctctacagctggttaataatccactagcaagtcaggctgcagcggctgcagcagccatgagctccatagcaagctcacaggcctttggcaatgccctctccagtcttcagggggtcacaggtcaactagttactaatgcacaaggacagattatcgggaccattccactgatgcctaatccagggccatcgagccaagcagcaagcggcactcagggcttgcaagtgcagccaatcaccccccagctcctcacaaacgcccagggccagatcatcgccacagtcattgggaaccagatcctgcccgtgatcaacacccagggcatcacgctgtcacccatcaagcccggccagcagctccaccaaccctcccagacgtcagtgggtcaagcagcctcccaaggcaaccttctgcacctggctcacagccaagcatccatgtctcaaagtcccgtccggcaggcttcctcttcttcctcctcatcctcctcttcttcagctttgagcgtgggccagttagtcagcaatcctcaaacggcagcgggtgaggtggatggggttaatctggaggagatccgagaatttgccaaagcttttaaaatccggcgcctgtcccttggcctgacccagactcaggtgggacaggctctcagtgctacagagggccccgcgtacagccagtcggccatctgcagacacaccatcctgagaagccactttttcctaccacaggaagcccaagagaacactatagctagcagtctgacagccaaactgaaccctggccttttgtatcctgccaggtttgaaaagctggacatcacccctaaaagtgcccagaagatcaagccggtgcttgagcggtggatggctgaggctgaggcccgccatcgagcaggtatgcagaacctgaccgagtttatcgggagtgaaccatccaaaaagcgcaagcggcgcacctccttcacaccccaggcccttgagatcctcaatgcccactttgagaagaacacacacccttctgggcaggaaatgaccgaaattgctgagaagctgaactatgaccgagaagtagttagagtttggttctgcaataagaggcaagccctgaagaacacaattaaacgcttaaaacagcacgagccggccacggcagtccctttggagcccttaacagactctctggaagaaaactcctaaagagatgcccacccataatcagaagcaaaattcacagaaactaaactccacccttgggactccacaacaacaacaacaacaaaatttaatttaatttaaaaatag

SEQ ID NO: 865 - protein, 683 aa, Homo sapiens
MIAGQVSKPLLSVRSEMNAELRGEDKAATSDSELNEPLLAPVESNDSEDTPSKLFGARGNPALSDPGTPDQHQASQTHPPFPVGPQPLLTAQQLASAVAGVMPGGPPALNQPILIPFNMAGQLGGQQGLVLTLPTANLTNIQGLVAAAAAGGIMTLPLQNLQATSSLNSQLQQLQLQLQQQQQQQQQQPPPSTNQHPQPAPQAPSQSQQQPLQPTPPQQPPPASQQPPAPTSQLQQAPQPQQHQPHSHSQNQNQPSPTQQSSSPPQKPSQSPGHGLPSPLTPPNPLQLVNNPLASQAAAAAAAMSSIASSQAFGNALSSLQGVTGQLVTNAQGQIIGTIPLMPNPGPSSQAASGTQGLQVQPITPQLLTNAQGQIIATVIGNQILPVINTQGITLSPIKPGQQLHQPSQTSVGQAASQGNLLHLAHSQASMSQSPVRQASSSSSSSSSSSALSVGQLVSNPQTAAGEVDGVNLEEIREFAKAFKIRRLSLGLTQTQVGQALSATEGPAYSQSAICRHTILRSHFFLPQEAQENTIASSLTAKLNPGLLYPARFEKLDITPKSAQKIKPVLERWMAEAEARHRAGMQNLTEFIGSEPSKKRKRRTSFTPQALEILNAHFEKNTHPSGQEMTEIAEKLNYDREVVRVWFCNKRQALKNTIKRLKQHEPATAVPLEPLTDSLEENS

SEQ ID NO: 866 - DNA, 2539 bp, Homo sapiens
aaacaacgggcgggagcggtgaagagactacagctcccagcatgcagagccaggccggcagagccaggccggcacagcccggcttcccccttcaggactgcgcgccgccccatgttcatgctggctgggattgtaatccggtcgccctgcaattaaaaaactggaagctaatcaaagatgacaagtcccagtatgccaggcgtagctcccgccctccaatccacaccttcccgagtccagagcagttctgccatgccaaaggggagcctggttgttcccgaacctctcttgcctgccaagtgacagcgagaccaggcggcttgtcttatcgtgtaattatgtcactacctctccctgagatgctggcttcatgcttcgtcattgccagaagtttgatttctcacggagcagcaggggacctggagctactcgcaaagctgtcacggttgccatatcttggagcagtactcgccccgccccttctcctcgccccgctccttccctctgcgctgcctctcccctcggcaccgcccctccgtctcgccccacccctgacacgccccctttgaacatgcgcagtgtagtccctgcgtaggactggggctaatcgccaggtgtctgactgttctccgacttcttggcatcctacgcgggaagctccctcgtgagtgtctgaaaccgtccgttcgctgccagaaatggatatatgcgttccctgataacctagcacttgccttttcaaagccaccatttcctctatcctctaggctgtcgcaaatcctcctgttcatcccaggagtgccccttggaccccgggctggctgcatgacccacacctgggtcaggcctctcacagggacgctcctgccactctgacaaagagttgaaaacgtcacagcgaaaggcctgaccctgctgcatccagtcaggaaacagccacagggaagggagcccctaagacactttgggagccacatccaccgcttctctgcccccgatccaggctggttcccagaccttggggtcctagtgtggacctcccggccgtaattaacgcaggtgcagggccagagagccccttggtccctcccaacacataagggaagtttgtgtggtgaggtcatgaacagtgtctgcgtttctgctgtgaataggaccttcatggaaacacttaatttccctttttaaatatccctttggaaccacgtttaataatttgctggtggaacttaacagtgataattctttgaatccatttttcttttttctttttttgacacggagtctcactctgtagcccaggctggagtgcagtgactgactcgatctgggctcactgaaacctccgcctcctgggttcaagcaattgttctgccccagcctccccagtagttgaaattacagacacccgccaccttgccgggctaatttttgtatttttagtacagatggggtttcgccatgttggccagtctggtctcgaactcctgatctcaagtgatccgcccgtctcagcctctcaaagtgctgggattgcaggcgtgagccactgtgcccggcctgaatccattttaacatttagttttccagattaactcgaagtaccccacgactacacgctaatgaaactagaggaggcacagcctcagctccgtgcaggagggacgcacaagagcagaatctccgtgggacatctttctggagcatcagtattactgcaggatttggaagaaacgaatttaaataatttccaacgtaagacactggaaatttaagagaaggctggaaagtcattggcctttaataactgtcagtcatctgtgcctaagtcagactttctccaagaaaaaaaaaaaaaaaactctaaggagaacctatttttcattcttctaagtagttaaaattagaaatcacagcaagtcaatagaaagctctgccctgctagtcttctaaatcacaatatggccttggtatggatttatttgtattttttggaggggtgtgttgacatgttgggtataaaaattggggggttttgacaaattttggaagttttcagctattagttggtgatttacttggtacctcatttaattttcctgtcccctcttcaacttggactcaatcactccacaggtctctaagactcttcattttctttaagatttttcactcttttattcagaatggacaatttctattgctctgtgttctgtttctaatctttgaataagctcaaaagtattttttaaatttccttatcttcttattgtttcgtaatttccatgtctttgctgaggttccacagctcttcattcatgattagaatattttcctttacccccatgaacagatttataatggctgcctttaaacatcctgaattacaacatcttaaatatcttaggatcacttctactgcctgctttttaaattgtgtatggatctcattttcgtgtttcttcacacgtctcatgaattttaatgttgtgtactaaaactgtaaagaatcattatagagactctcgattatgttgtg

SEQ ID NO: 867 - DNA, 1479 bp, Homo sapiens
atggtccccaaggtgcagtacctacagtccccagccaagccagactatgcgctccacgtgccacctgctccttacatgtgccccaggctccacgcagctgggtcctcctctgttagatgggagtcccaggcttcccgcagacacaagccaactaccagccacaccttgtgggcccacttggacctctttactccagtgaccattgagacccaactggccagtcaaggatggtacagggctgatgtcctgaatcacattctggtggagcctcggacactacagctgctgaatgagctgctggcctgctgggatgggggcggcagctggcagaaatggttgcagctgcaggacattaaggcagctggactgttgacattcagagacatagctatagaattttctctggcggaatggcaatgcctggatcatgctcagcagaatttatatagagatgtgatgttagagaactacagaaacctggtctccctgggtattgctgtctctaagccagacttgatcacctgtctggagcaaaataaagagccccagaatataaagagaaatgagatggtagccaaacacccagttacatgttctcatttcacccaagaccttcagtcagagcagggcataaaagattcactccaaaaagtgatactgagaagatatggaaaatgtggacaggaggatttacaagtaaaaaaatgctgtaaaagtgtaggtgagtgtgaggtgcacaaaggaggttataattatgttaaccaatgtttgtcagctacccaaaacaaaacatttcagactcataaatgcgtcaaagtctttggtaaattttcaaattccaatagacacaagacaagacatactggaaagaaaccctacacatgtgaagaatgtggcaaagcctttagccgctcttcaacacttactaaccacaagagaattcatactggagagagaccctacaaatgtgaagaatgtggcaaagcctttagcttatcctcaacccttaagaaacataagatagttcatactggggagaaactctacacatgtgaagaatgtgggaaagcctttaccttctcctcaactctaaatactcataagaggattcatactggagagaaaccctacacttgtgaagaatgtggcaaagcctttagcttaccctcaaccttcacttaccacaagagaactcatactggagagaaaccctacaaatgtgaagaatgtggcaaagcctttaactgctcctcaacccttaagaaacataagataattcatactggagagaaactctacaaatgtaaagaatgtgggaaagcctttaccttctcctcaactctaaatactcataagaggattcatactggagagaaaccctacaaatgtgaagaatgtgaccaaacttttaagtggcattcaagtcttgctaatcataagaatatgcatactggagagaaaccctacaaatatgaataa

SEQ ID NO: 868 - protein, 492 aa, Homo sapiens
MVPKVQYLQSPAKPDYALHVPPAPYMCPRLHAAGSSSVRWESQASRRHKPTTSHTLWAHLDLFTPVTIETQLASQGWYRADVLNHILVEPRTLQLLNELLACWDGGGSWQKWLQLQDIKAAGLLTFRDIAIEFSLAEWQCLDHAQQNLYRDVMLENYRNLVSLGIAVSKPDLITCLEQNKEPQNIKRNEMVAKHPVTCSHFTQDLQSEQGIKDSLQKVILRRYGKCGQEDLQVKKCCKSVGECEVHKGGYNYVNQCLSATQNKTFQTHKCVKVFGKFSNSNRHKTRHTGKKPYTCEECGKAFSRSSTLTNHKRIHTGERPYKCEECGKAFSLSSTLKKHKIVHTGEKLYTCEECGKAFTFSSTLNTHKRIHTGEKPYTCEECGKAFSLPSTFTYHKRTHTGEKPYKCEECGKAFNCSSTLKKHKIIHTGEKLYKCKECGKAFTFSSTLNTHKRIHTGEKPYKCEECDQTFKWHSSLANHKNMHTGEKPYKYE

SEQ ID NO: 869 - DNA, 429 bp, Homo sapiens
atgcggctttttatggcttttcgcccccatcaccgcagctttttgcccccgccgccgcggctttttgcccccgccaccgcagctttttgtcgccgcggctgtttgcctcggccgccatggcttgttgcccccgccgccgtggcatgttgcccccatcgccccggctttttcccccaccgccccggctttttgaccccaccgttgcggctttttgcgcccgccgccgcaactttttgcggctttttgcccccgccgccgcgggattttgcccccatcaccgcggctttttccccgccgccgcggctttttgccgacgcagctttttattcccaccgccacaggtttttaccgctgcggctttttcaccccggcatcgcgggtttttgcccccaccgccgtggctttttgccccaaccgccgcgggtctga

SEQ ID NO: 870 - protein, 142 aa, Homo sapiens
MRLFMAFRPHHRSFLPPPPRLFAPATAAFCRRGCLPRPPWLVAPAAVACCPHRPGFFPHRPGFLTPPLRLFAPAAATFCGFLPPPPRDFAPITAAFSPPPRLFADAAFYSHRHRFLPLRLFHPGIAGFCPHRRGFLPQPPRV

SEQ ID NO: 871 - DNA, 1424 bp, Homo sapiens
atggccgccgtggccgagcggggccgcgtgcctacccccgtgcctgcgcccgcgcccagcactgaggggctgccgcgcgccttgctgcagagcctgcacaccctgttccacatctggacaacaggcggtgcggctgcaggcacctgcacgagatccagtctcgctggcagggcgccaacacgtgggagcagccacgcggggtgctggagggcttgtgccaggtggcccaggccagcggctacttgaccttcgagcgcttcgtggccggcttgcgcaccacgctgctgagcccgatggcggcccctgggaccccacatgcgccctggccgggaccagggaccagccgccgccgccgccgccgccgccgccgcggcagcgcctggtgttagcgcccgctgaagagccgcggacggtcctggagaggaagccccagcccctgggcgtgcgcggccatctggccgtcccagcggcgcggcccgcagcccggagcagctgtgctcccgggccgaggcggcgccctgccccgtggagccggagctgtcccagagcaccgcgctggaaccgagccggagtgcagacgcaggtgcagtggcctgcagggcccagggccagggaggcggactcaggggatgcctggcgggcctccagtgccccaggggaacgtcggagtcacaccatcaccagcggtatggactgcggcctgctgaagcagataaagaagctggagcagagaaggctgtgcagttgcaggctttggagatgacggcgcggggccgcggctggtaccagcagcagctgcaatgagtgcaggagcaccagcaccgactatggggctgcgggagcccccgcccactggggcggctactgcccaaggtacaggaggtggcctggtgcctgagggagctgctggctgcggcctgtgccagccaggccctgtccaagtcctcctccgccccccacccggtcctgcccgcacgtccacttcgtccctgggccggcagcagcagaccatcctcatgctgaatgagcagaaccgactcctcacccaggaggtgacagagaagagtgagcgcatcacgcagctggagcaggagaagtcagcactcattaagcagctgtttgaggcccgcgccctgagccagtgggacgtgggcgcctctggacttcatctagtccgtgtgggcagcgcgggcccccagggccggcctggcactcagcccttcgaggttgggcgccccatcacacccaccttctctggctggagacccccggcaggcccagacagtcccagagtgggcgccttcctgcccgcattgccaaatgggctccccaggcctgcccccggctggtccccacaccaaacccttgactccgttttagctcctggtgctgacatgggctggggctgtcttgagtctgcatag

SEQ ID NO: 872 - DNA, 2163 bp, Homo sapiens
agaggcggaagtaaaagcgaactacagtggatgggtgcagttcaggagatagctgttctccagcctttctggagggatgcagagcctttccttaggacaaacaagcatttcaaaaggtttgaactacctaaccattatggcaccaggaaacctctggcatatgagaaataactttctctttggttcaagatgttggatgactcgattttcagcagaaaacatcttcaaatcagtttcatttaggctttttggtgtgaagtgtcataatacagacagtgagcctttgaaaaatgaggacctactgaaaaacttacttactatgggagtagatattgacatggcaaggaaacgacagcctggagtttttcataggatgattaccaatgagcaggacctgaagatgttccttctttccaaaggagctagcaaagaagtgatcgctagcatcatatcaagatatccacgagcaataacacgtactcccgagaatctttcaaaacggtgggatctgtggagaaagattgtgacatcagaccttgaaattgtaaatattttggaacgttctcctgaatccttttttcggtccaataacaacctaaacttagagaataatataaagttcctctactcagttggattgacccgtaaatgcctttgtcgattgttgaccaatgcccctcgtaccttctccaatagtcttgatctgaataaacagatggttgaatttttgcaggcagccggtttgtcattgggtcacaatgatcccgcagattttgtcagaaagataatttttaaaaacccttttatcttaattcagagcaccaagcgggtgaaagctaacattgaattcttacggtcaactttcaatttgaacagtgaggaactgctggttctgatatgtggtccaggagctgaaatcctagacctttccaatgactatgccagaagaagctacgcaaacatcaaagagaagctgttttctcttggatgtactgaagaagaggtacagaagtttgtcttaagctatccagatgtgatcttcttggcagagaaaaagtttaatgataaaatagactgcctcatggaagaaaacattagcatttcacaaataatcgaaaatcctcgggttctggattcaagcataagtactttaaaaagtcgaatcaaagaattggtaaatgctggctgtaacttgagtactttaaacatcactcttctatcttggagtaaaaaaagatatgaagctaaattgaaaaagttaagcagatttgcctaaggatgccaatgtttttaattctcaggaactgtgaatatgttatgccacattgcaaaagaattttgcagaagtgattaatttaaaatgttattaagggccttgagatggggagattatcctgaattactttggagggcctaatataattgtagggatctttaaaagttgaagagggaggcaaaagaggaggtcagagtgatcctgtataagaaagacaactacttttgaaggaagttaaaaggtggctttgaaggaggaagacaccttgagccaaggaatgaagggggcctgtaaaaaaagattgaaaaggcaaggaaacagattctccattagagtccccagaaaggaatgcagccttgctggcacctttttagcccagtgagatcaatgtcaaacttctgacccacagaaccataagatggtaaatttgtgttgttttaaaccactgagtcagtgataatttgctgaagaagcaaatagattaacatagcaactaagtagatgattagttgcattataggtgaagtcaaaaatacagtcctttagtaaagtctctatttcttccttttataagagtaattatatttaaaaaatctacctacccttctggaattgctaatgttagtgtttataaagtcttaaatgtgtgcataaaaaactaaatgtgaatataaaatctaaataaaggaatatgtttgcctaatatagtttaaggaaatgataatcatttctgtgcattttgttggcatttcagctaatattaaagagtaattttcagaggcattgacttaaaaaatggcaaatcagataatgtcggtattttcaagatacaatctagctctgacataaactgaaagacgtgagacaaattatatgaccttaatttt

SEQ ID NO: 873 - protein, 399 aa, Homo sapiens
MQSLSLGQTSISKGLNYLTIMAPGNLWHMRNNFLFGSRCWMTRFSAENIFKSVSFRLFGVKCHNTDSEPLKNEDLLKNLLTMGVDIDMARKRQPGVFHRMITNEQDLKMFLLSKGASKEVIASIISRYPRAITRTPENLSKRWDLWRKIVTSDLEIVNILERSPESFFRSNNNLNLENNIKFLYSVGLTRKCLCRLLTNAPRTFSNSLDLNKQMVEFLQAAGLSLGHNDPADFVRKIIFKNPFILIQSTKRVKANIEFLRSTFNLNSEELLVLICGPGAEILDLSNDYARRSYANIKEKLFSLGCTEEEVQKFVLSYPDVIFLAEKKFNDKIDCLMEENISISQIIENPRVLDSSISTLKSRIKELVNAGCNLSTLNITLLSWSKKRYEAKLKKLSRFA

SEQ ID NO: 874 - DNA, 12462 bp, Homo sapiens
gaagatggcggcggcggcggcggtgacggcgcttcccgtgcggctgaggacgatccgccagtgagcgcggagactgcttccacttcgggcgggggagcgccggaccgaatcggctctctaggccgtggagcttgccgtcccacctccgtccaaatcgacctttcctttctatccccaaccacccctcaacccctgttttcccctgccttccttgcagaggccatggaggacgaggagagacagaagaagctggaggccggcaaagccaagcttgcccagtttcgacaaagaaaagctcagtcggatgggcagagtccttccaagaagcagaaaaaaaagagaaaaacgtcaagcagtaaacatgatgtgtcagcacaccatgatttgaatattgatcaatcacagtgtaatgaaatgtacataaatagttctcagagagtagaatcaactgtgattcctgaatctacaataatgagaactctacatagtggagaaataaccagtcatgagcagggcttctctgtggaactggaaagtgaaatttcaaccacagcagatgactgcagttcagaggtaaatggttgcagttttgtgatgagaacaggaaagcctacaaatttattaagggaagaagaatttggtgttgatgattcttattctgaacaaggagcacaagacagtccgactcatctagagatgatggaaagtgagttggctgggaagcagcatgagattgaagagctaaacagagagctggaagaaatgagggttacctatgggactgaaggactgcagcagttacaagaatttgaagctgccattaaacaaagagatggcattataacccagctcactgctaatttacaacaagcaagaagagaaaaggatgagacaatgagagaatttttagagttgacagaacagagtcaaaaattacagattcaatttcagcaattacaggctagtgaaactctgagaaacagcactcatagtagcacagctgcagacttactacaagccaaacaacagatcctcactcatcaacagcagcttgaagaacaagaccacttattagaagattatcagaaaaagaaagaagacttcacaatgcaaattagtttcttgcaagagaaaattaaagtatatgaaatggaacaagataaaaaagtagaaaactcaaataaagaagaaatacaggaaaaggagacaatcattgaagaattaaacacaaaaataatagaagaagaaaagaaaactcttgagctaaaggataaattaacaactgctgataaattactaggagaattacaagaacagattgtgcaaaagaaccaagaaataaaaaacatgaaattagagctgactaattctaagcaaaaagaaagacagtcttctgaagaaataaaacagttaatggggacagtcgaagaacttcagaagagaaatcataaagacagccagttcgaaactgatatagtacaacgaatggaacaagaaacacaaagaaagttagaacaactccgggcagagctggatgagatgtatgggcagcagatagtgcaaatgaaacaagaattaataagacaacacatggcacagatggaggaaatgaaaacacggcataagggagaaatggagaatgctttaaggtcatattcaaatattacagttaatgaagatcagataaagttaatgaatgtggcaataaatgaactgaatataaaattgcaagatactaactctcaaaaggaaaaactcaaggaagaactaggactaattttagaagaaaagtgtgctctacagagacagcttgaagaccttgttgaagaattgagcttttcaagggaacagattcagagagctagacagacaatagctgaacaagaaagtaaacttaatgaagcacataagtcccttagtacagtggaagatttgaaagctgagattgtttctgcatctgaatccagaaaggaactagaattaaaacatgaagcagaagttacaaattacaagataaaacttgaaatgttagaaaaagaaaagaatgctgtgttagacagaatggctgaatcacaagaagctgaattagagaggctgagaacacagcttctatttagtcacgaagaagagctttccaaactgaaggaagatttagaaattgaacatcgaataaatattgaaaaacttaaagataatttaggcattcactataaacagcagatagatggtttacagaatgaaatgagtcaaaagatagaaaccatgcagtttgaaaaggacaatttgataactaagcagaatcaattaattttggaaatttcaaagctaaaagatttacagcagtctcttgtaaattcaaagtcagaagaaatgactcttcaaatcaatgaacttcaaaaagaaattgaaatactcagacaagaagaaaaagaaaagggtacacttgaacaagaagttcaagaattacaacttaaaacagaattgttagaaaaacagatgaaggaaaaagagaatgatcttcaagaaaaatttgcacaacttgaagcagagaatagcattcttaaagatgaaaagaaaacccttgaagacatgttgaaaatacatactcctgttagccaagaagaaagattgattttcttagactccattaagtccaaatccaaagactctgtgtgggaaaaagaaatagaaatacttatagaggaaaatgaggacctcaaacaacaatgtattcagctaaatgaagagattgaaaagcaaaggaacactttttcatttgctgaaaaaaactttgaagttaactatcaagagttacaagaggagtatgcttgccttctcaaagtaaaagatgatttagaagacagtaaaaataaacaggaattagagtataaaagtaaacttaaagcacttaatgaagagcttcatttgcaaagaataaatccaactacagtgaaaatgaaaagttctgtctttgatgaagacaaaacttttgtagcagaaacattggaaatgggtgaggttgttgaaaaggatacaacagaactcatggaaaaacttgaggtaaccaagcgagagaaattagagctgtcacagagactgtctgatctttctgaacaattgaaacagaaacatggtgagattagttttctaaatgaagaagttaaatctttaaagcaagagaaagaacaagtttcattgagatgtagagagctagaaatcattattaaccacaacagggcagaaaatgtacagtcatgtgatactcaagtaagctctttattagatggagttgtgaccatgacaagcaggggtgctgaaggatcagtttctaaagtaaataaaagttttggtgaagaatcaaaaataatggtggaagataaagtttcttttgaaaatatgactgttggagaagaaagtaagcaagaacagttgattttggatcacttaccatctgtaacaaaggaatcatcacttagagcaactcaaccaagtgaaaatgataaacttcagaaagaactcaatgtacttaaatcagaacagaatgatttaaggctacagatggaagcccaacgcatttgcctctctctggtttattcaactcatgtggatcaggttcgtgaatatatggaaaatgaaaaagataaagctctttgcagtcttaaagaagagcttatttttgctcaagaggaaaagatcaaggaacttcagaaaatacaccagttagaactacagactatgaaaacacaagaaacaggtgatgaaggaaagcctttacatctgctcattggaaaacttcaaaaggcagtgtctgaagaatgttcttattttttacagactttatgcagtgtccttggtgaatattatactcctgctttaaaatgtgaagtaaatgcagaagacaaagagaattctggtgattacatttctgaaaatgaagatccagaattacaagattatagatatgaagttcaagactttcaagaaaatatgcacactcttctcaacaaagtaacagaagaatacaacaaactcttggtacttcaaacacgactaagcaagatctggggacagcagacagatggtatgaaacttgaatttggagaagaaaaccttccaaaagaggaaacagagtttttatcaatccattctcagatgaccaatttggaagacattgatgtcaatcataaaagcaagttatcttctctgcaagatcttgaaaaaactaaacttgaagaacaagttcaagaattagaaagcctcatatcctctttgcagcaacagttgaaagaaactgaacaaaactatgaggcagagatccactgtttacagaagaggcttcaagctgttagtgagtccacggttccgccaagcttacctgttgattcggtggtaattacagaatctgatgcacagagaacaatgtaccctggaagttgtgtgaaaaagaatattgatggtacaatagagttttctggtgaatttggagtgaaagaggaaacaaatatcgttaagttgcttgaaaaacaataccaagaacaattagaagaagaagtagctaaggttattgtgtcaatgagtatagcatttgctcaacaaactgaactgtctagaatatctgggggaaaagaaaatactgcatcatcaaagcaagcacatgctgtgtgtcagcaagaacaacattattttaatgaaatgaaattatcacaggatcaaattggttttcagacttttgagacagtggatgtgaaatttaaagaagaatttaaaccacttagtaaagagttaggagaacatggaaaggaaattttattatcaaatagtgatccccatgatataccagaatcaaaggactgtgtgctgactatttcagaagaaatgttctccaaagataaaacatttatagttagacagtctattcatgatgagatttcagtgtcaagcatggatgcttctagacaactaatgttgaatgaagaacagttggaagatatgagacaggaacttgtacgacaataccaagaacatcaacaggcaacggaattgttaaggcaagcacatatgcggcaaatggagagacagcgagaagaccaggaacagctacaagaagagattaagagacttaatagacaattagcccagagatcctccatagataatgaaaacctggtttcagagagagagagggtgcttttagaggagctggaagcactaaagcagctgtctttagctggaagagagaagctgtgttgtgagctgcgcaacagcagtacgcaaacacagaatggaaatgaaaaccaaggagaagttgaagaacaaacatttaaagaaaaggaattagacagaaaacctgaagatgtgcctcctgagattttgtctaatgaaaggtatgcactccagaaagctaataatagacttttgaagatcctcttagaagttgtaaagacaacagcagctgttgaagaaacaattggtcgccatgtccttgggattctagatagatctagtaaaagccagtcatctgccagcctaatttggaggtcagaagcagaggcatctgtaaagtcatgtgtccatgaggaacatacaagagttacagatgaatccattccctcttattctggaagtgatatgccaagaaatgacattaacatgtggtcaaaagtaactgaggaaggaacagagctgtcacaacgacttgtgaggagtggttttgctggaactgaaatagaccctgaaaatgaagaacttatgctgaacattagctctcgactacaagcagcagttgaaaaactcctagaagccataagtgaaactagcagtcagcttgaacatgcgaaagtgacacagacagagttgatgcgtgagtcatttagacagaaacaagaagcaacagagtcccttaagtgccaagaggaacttcgagagcgccttcatgaggagtccagggccagagaacagctagctgtggagctcagtaaggctgagggcgtcattgatggctatgcagatgaaaaaactctttttgaaaggcaaattcaggaaaaaactgatataatagatcgtcttgagcaggagttgttatgtgcaagtaacaggttgcaagaattggaggcagagcaacagcagatccaagaagaaagagaattactgtccagacaaaaggaagctatgaaagcagaggcaggcccagttgaacaacaattactacaggagacagaaaaattaatgaaggaaaaactagaagtacaatgtcaagctgaaaaagtacgtgatgaccttcaaaaacaagtgaaagctctagaaatagatgtggaagaacaagtcagtaggtttatagagctggaacaagaaaaaaatactgaactaatggatttaagacagcaaaaccaagcattggaaaagcagttagaaaaaatgagaaaatttttagatgagcaagccattgacagagaacatgagagagatgtattccaacaggaaatacagaaactagaacagcaacttaaggttgttcctcgattccagcctatcagtgaacatcaaactagagaggttgaacagttagcaaatcatctgaaagaaaaaacagacaaatgcagtgagcttttgctctctaaagagcagcttcaaagggatatacaagaaaggaatgaagaaatagagaaactggagttcagagtaagagaactggagcaggcgcttcttgtgagtgcagatacttttcaaaaggtagaggaccgaaaacactttggagctgtagaagctaaaccagaattgtccctagaagtacaattgcaggctgaacgagatgccatagacagaaaggaaaaagagattacaaacttagaagagcaattagaacagtttagagaagaactggaaaataagaatgaagaagttcaacaattacatatgcaattagaaatacagaaaaaggaatctactacccgcctacaagaacttgaacaggaaaacaaattatttaaggatgacatggagaaactgggacttgccataaaggaatctgatgccatgtctactcaagaccaacatgtgctatttgggaaatttgctcaaataatacaggaaaaagaggtagaaattgaccaattaaatgaacaagttacgaaactccagcagcaacttaaaattacaacagataacaaggttattgaagaaaaaaatgaactgataagggatcttgaaacccaaatagaatgtttgatgagtgatcaagaatgtgtgaagagaaatagagaagaagaaatagagcagctcaatgaagtgattgaaaaacttcaacaggaattggcaaatattggacagaagacatcaatgaatgctcattccctctcagaagaagcagacagtttaaaacatcaattggatgtggttatagctgaaaagctggccttggaacagcaagtagaaaccgctaatgaagaaatgaccttcatgaaaaatgtacttaaagaaaccaattttaaaatgaatcagctaacacaggaattattcagcttaaagagagaacgtgaaagtgtggaaaagattcaaagcataccagagaatagtgttaacgtggctatagatcatctgagcaaagacaaacctgaactagaagtagtccttacagaggatgctcttaaatccctagaaaatcagacatacttcaaatcttttgaagaaaatggcaaaggttccataattaatttggaaacaaggttgctacaacttgagagcactgttagtgcaaaggacttagaacttacccagtgttataaacaaataaaagacatgcaagaacaaggccagtttgaaacagaaatgcttcaaaagaagattgtaaacctacagaaaatagttgaagaaaaagtggctgctgctcttgtcagtcaaatccaacttgaggcagttcaggaatatgcaaaattctgtcaagataatcaaacaatttcatcagaacctgaaagaacaaatattcagaatttaaatcaactaagagaagatgagttggggtcagatatatcagcattaaccttgagaatatcagaattagaaagccaggttgttgaaatgcatactagtttgattttagaaaaagaacaagtagaaattgcagaaaaaaatgttttagaaaaagaaaagaagctgctagaactacagaagctattggagggcaatgagaaaaaacagagagagaaagaaaagaaaagaagccctcaagatgttgaagttctcaagacaactactgagctatttcatagcaatgaagaaagtggattttttaatgaactcgaggctcttagagctgaatcagtggctaccaaagcagaacttgccagttataaagaaaaggctgaaaaacttcaagaagagcttttggtaaaagaaacaaatatgacatctcttcagaaagacttaagccaagttagggatcacctcgcagaggcaaaagagaaattgtccattttagaaaaagaagatgagactgaggtacaagaaagcaaaaaggcctgcatgtttgagccacttcctataaaactgagtaagagcattgcatcccagacagatgggactctgaagatcagtagcagcaatcagactccacaaattcttgttaaaaatgcaggaatacaaattaatttacagagtgaatgttcctcagaagaagttactgaaataatcagtcagtttactgaaaaaattgagaagatgcaagaactacatgctgctgaaattttggacatggaatccagacatatttcagaaactgaaaccttaaagagggaacactatgttgccgttcagttactgaaagaggaatgtggtaccttgaaggcagtgatacagtgtctgagaagtaaagagggatcctcaattcctgagctagcacattctgatgcttaccagactagagaaatatgctccagtgattctggatcagactggggtcagggaatttatcttacacacagtcagggatttgacatagcatcagaaggccgaggagaagaaagtgaaagtgcaacagattcctttccaaagaaaataaagggattactgagagctgtccataatgaaggcatgcaggtgctttctctcactgagtctccctatagtgatggagaggaccattctattcagcaggtttcagaaccttggctagaagagagaaaagcttacatcaatacaatctcatctctaaaggatttaattacaaagatgcaactgcaaagagaagccgaggtttatgatagttctcaatctcatgagagcttctcagactggcgaggtgaactactgcttgcccttcaacaagttttcttagaagagcgtagtgttttactagcagcatttcggacggagctgacagctctaggtactacagatgcagttggtttactaaactgtttggaacagagaatacaagaacagggtgttgaatatcaagcagctatggaatgcctccagaaagcagatagaaggagtttgttatctgaaattcaggcactgcatgcacaaatgaatggtaggaaaattactctgaaaagagaacaagagagtgagaaaccaagccaagaactcttggaatataatatacagcagaagcagtctcaaatgctggagatgcaagtggagctcagcagtatgaaagacagagcaacggaactgcaggagcagctgagttctgagaaaatggtggttgctgaactgaagagtgagcttgcacaaactaaattggaactagaaacaacactcaaggcacagcataaacacctaaaagaattggaggctttcaggttggaagttaaagataagacagatgaagtacatttgcttaatgacacattagcaagtgaacagaaaaaatcaagagagctccagtgggctttggagaaagagaaagccaagttgggacgcagtgaagaacgggataaagaagaacttgaggatctgaagttttcacttgagagtcagaaacaaaggaatcttcagctaaatctacttttggaacaacagaaacaactactgaacgaatcccagcaaaaaatagaatcacagagaatgctatatgatgcccagttgtcagaagaacaaggtcgaaacttagagcttcaggtacttcttgaatctgagaaagttcgaattcgggaaatgagtagtaccctagatagggagcgggaattgcacgcacagctgcagagcagtgatggtactggacagtctcggccacccttgccctcagaggacctactgaaagagctgcagaaacagctagaggaaaaacacagtcgcatagtagaattgttaaatgagactgaaaaatataaactggattctttgcaaacacgacagcaaatggaaaaagataggcaggttcacaggaaaacactgcagacagaacaggaggccaacactgagggacagaaaaaaatgcatgagctccagtccaaagtggaagatcttcagcgccagctggaagagaaaagacaacaagtttataagttagaccttgaaggacagcgactacaaggaatcatgcaggaattccagaagcaagaactagaacgagaagaaaaacgagaaagtagaagaattctgtatcagaaccttaatgagccaaccacgtggagcttaaccagtgatagaactagaaattgggttcttcaacagaaaatagaaggagaaacaaaagaatcaaactacgctaaattgattgaaatgaatggaggaggaaccggctgtaatcatgaattagaaatgatcagacaaaagcttcaatgtgtagcttcaaaactacaggttctaccccagaaagcctctgagagactacagtttgaaacagcagatgatgaagatttcatttgggttcaggaaaatattgatgaaattattttacaactacagaaattaactggccagcaaggtgaagagcccagcttggtgtccccaagtacttcttgtggctcattgactgaaagactactgagacaaaatgctgagctgacagggcatatcagtcaactgactgaagagaagaatgacttaaggaacatggttatgaagctggaagagcagatcaggtggtatcgacagacaggagctggtagagataattcttccaggttttcattgaatggtggtgccaacattgaagccatcattgcctctgaaaaagaagtatggaacagagaaaaattgactctccagaaatctttgaaaagggcagaggctgaagtatacaaactgaaagctgaactaagaaatgactctttacttcaaactctgagccctgattctgaacatgtcactttaaagagaatttatggtaaatacttgagggcagaaagttttcgaaaggctctcatttaccagaagaaatacctgctgctgttactgggtgggttccaggaatgtgaagatgccaccttggccctgcttgcccggatgggggggcagccagctttcacggatctagaggtgatcaccaatcgcccaaagggcttcaccaggtttcggtcggccgtcagagtatccattgcaatttccagaatgaaatttttggttcgacggtggcatcgagtcacaggttctgtttccatcaatattaacagagatggctttggactgaatcaaggtgcagaaaagactgactcattttatcattcttctggtgggctggagttatatggagaaccaagacatactacgtatcgctcaagatcagatctggactatattaggtcccctttaccatttcagaataggtacccaggcactccagctgatttcaatcctggttctttagcatgttctcagcttcagaattacgatcctgacagagccctaacagattatatcactcggctagaggcactgcaaagacgacttggaactatacagtcaggttcaactactcaatttcatgctggcatgagaagataatcctttgaaacatcattaattgaagtgattttaaatagatttccttttgtaaatcaatggttcttttgtgcttttgtattgtgaatattcaatgggaccaatatgaacacagcttatgattgtatacaaatcccttgccagcacatgaaaacaaactggaatttgtatatataagcattgtgtatgtattcatgcacaataattattgaattacctgtatatttgtggaatgctaatttaaaacattaaattataaaccttgtgtatttatcaaatgggtgaaaagattaaacttttacgcattacaatactgctgaatgtgtagctcgaggtgtcctgcacttttcttataaggctactgaagttacatgttttgcctaatatattctactggtgatgaagacagataatatcacttgtagagacctatttttgtataatggtagaagttttgaattttatggggtattttgtcaagtactgaaataaaaatgacttcaccattttcaccacact

SEQ ID NO: 875 - protein, 3907 aa, Homo sapiens
MEDEERQKKLEAGKAKLAQFRQRKAQSDGQSPSKKQKKKRKTSSSKHDVSAHHDLNIDQSQCNEMYINSSQRVESTVIPESTIMRTLHSGEITSHEQGFSVELESEISTTADDCSSEVNGCSFVMRTGKPTNLLREEEFGVDDSYSEQGAQDSPTHLEMMESELAGKQHEIEELNRELEEMRVTYGTEGLQQLQEFEAAIKQRDGIITQLTANLQQARREKDETMREFLELTEQSQKLQIQFQQLQASETLRNSTHSSTAADLLQAKQQILTHQQQLEEQDHLLEDYQKKKEDFTMQISFLQEKIKVYEMEQDKKVENSNKEEIQEKETIIEELNTKIIEEEKKTLELKDKLTTADKLLGELQEQIVQKNQEIKNMKLELTNSKQKERQSSEEIKQLMGTVEELQKRNHKDSQFETDIVQRMEQETQRKLEQLRAELDEMYGQQIVQMKQELIRQHMAQMEEMKTRHKGEMENALRSYSNITVNEDQIKLMNVAINELNIKLQDTNSQKEKLKEELGLILEEKCALQRQLEDLVEELSFSREQIQRARQTIAEQESKLNEAHKSLSTVEDLKAEIVSASESRKELELKHEAEVTNYKIKLEMLEKEKNAVLDRMAESQEAELERLRTQLLFSHEEELSKLKEDLEIEHRINIEKLKDNLGIHYKQQIDGLQNEMSQKIETMQFEKDNLITKQNQLILEISKLKDLQQSLVNSKSEEMTLQINELQKEIEILRQEEKEKGTLEQEVQELQLKTELLEKQMKEKENDLQEKFAQLEAENSILKDEKKTLEDMLKIHTPVSQEERLIFLDSIKSKSKDSVWEKEIEILIEENEDLKQQCIQLNEEIEKQRNTFSFAEKNFEVNYQELQEEYACLLKVKDDLEDSKNKQELEYKSKLKALNEELHLQRINPTTVKMKSSVFDEDKTFVAETLEMGEVVEKDTTELMEKLEVTKREKLELSQRLSDLSEQLKQKHGEISFLNEEVKSLKQEKEQVSLRCRELEIIINHNRAENVQSCDTQVSSLLDGVVTMTSRGAEGSVSKVNKSFGEESKIMVEDKVSFENMTVGEESKQEQLILDHLPSVTKESSLRATQPSENDKLQKELNVLKSEQNDLRLQMEAQRICLSLVYSTHVDQVREYMENEKDKALCSLKEELIFAQEEKIKELQKIHQLELQTMKTQETGDEGKPLHLLIGKLQKAVSEECSYFLQTLCSVLGEYYTPALKCEVNAEDKENSGDYISENEDPELQDYRYEVQDFQENMHTLLNKVTEEYNKLLVLQTRLSKIWGQQTDGMKLEFGEENLPKEETEFLSIHSQMTNLEDIDVNHKSKLSSLQDLEKTKLEEQVQELESLISSLQQQLKETEQNYEAEIHCLQKRLQAVSESTVPPSLPVDSVVITESDAQRTMYPGSCVKKNIDGTIEFSGEFGVKEETNIVKLLEKQYQEQLEEEVAKVIVSMSIAFAQQTELSRISGGKENTASSKQAHAVCQQEQHYFNEMKLSQDQIGFQTFETVDVKFKEEFKPLSKELGEHGKEILLSNSDPHDIPESKDCVLTISEEMFSKDKTFIVRQSIHDEISVSSMDASRQLMLNEEQLEDMRQELVRQYQEHQQATELLRQAHMRQMERQREDQEQLQEEIKRLNRQLAQRSSIDNENLVSERERVLLEELEALKQLSLAGREKLCCELRNSSTQTQNGNENQGEVEEQTFKEKELDRKPEDVPPEILSNERYALQKANNRLLKILLEVVKTTAAVEETIGRHVLGILDRSSKSQSSASLIWRSEAEASVKSCVHEEHTRVTDESIPSYSGSDMPRNDINMWSKVTEEGTELSQRLVRSGFAGTEIDPENEELMLNISSRLQAAVEKLLEAISETSSQLEHAKVTQTELMRESFRQKQEATESLKCQEELRERLHEESRAREQLAVELSKAEGVIDGYADEKTLFERQIQEKTDIIDRLEQELLCASNRLQELEAEQQQIQEERELLSRQKEAMKAEAGPVEQQLLQETEKLMKEKLEVQCQAEKVRDDLQKQVKALEIDVEEQVSRFIELEQEKNTELMDLRQQNQALEKQLEKMRKFLDEQAIDREHERDVFQQEIQKLEQQLKVVPRFQPISEHQTREVEQLANHLKEKTDKCSELLLSKEQLQRDIQERNEEIEKLEFRVRELEQALLVSADTFQKVEDRKHFGAVEAKPELSLEVQLQAERDAIDRKEKEITNLEEQLEQFREELENKNEEVQQLHMQLEIQKKESTTRLQELEQENKLFKDDMEKLGLAIKESDAMSTQDQHVLFGKFAQIIQEKEVEIDQLNEQVTKLQQQLKITTDNKVIEEKNELIRDLETQIECLMSDQECVKRNREEEIEQLNEVIEKLQQELANIGQKTSMNAHSLSEEADSLKHQLDVVIAEKLALEQQVETANEEMTFMKNVLKETNFKMNQLTQELFSLKRERESVEKIQSIPENSVNVAIDHLSKDKPELEVVLTEDALKSLENQTYFKSFEENGKGSIINLETRLLQLESTVSAKDLELTQCYKQIKDMQEQGQFETEMLQKKIVNLQKIVEEKVAAALVSQIQLEAVQEYAKFCQDNQTISSEPERTNIQNLNQLREDELGSDISALTLRISELESQVVEMHTSLILEKEQVEIAEKNVLEKEKKLLELQKLLEGNEKKQREKEKKRSPQDVEVLKTTTELFHSNEESGFFNELEALRAESVATKAELASYKEKAEKLQEELLVKETNMTSLQKDLSQVRDHLAEAKEKLSILEKEDETEVQESKKACMFEPLPIKLSKSIASQTDGTLKISSSNQTPQILVKNAGIQINLQSECSSEEVTEIISQFTEKIEKMQELHAAEILDMESRHISETETLKREHYVAVQLLKEECGTLKAVIQCLRSKEGSSIPELAHSDAYQTREICSSDSGSDWGQGIYLTHSQGFDIASEGRGEESESATDSFPKKIKGLLRAVHNEGMQVLSLTESPYSDGEDHSIQQVSEPWLEERKAYINTISSLKDLITKMQLQREAEVYDSSQSHESFSDWRGELLLALQQVFLEERSVLLAAFRTELTALGTTDAVGLLNCLEQRIQEQGVEYQAAMECLQKADRRSLLSEIQALHAQMNGRKITLKREQESEKPSQELLEYNIQQKQSQMLEMQVELSSMKDRATELQEQLSSEKMVVAELKSELAQTKLELETTLKAQHKHLKELEAFRLEVKDKTDEVHLLNDTLASEQKKSRELQWALEKEKAKLGRSEERDKEELEDLKFSLESQKQRNLQLNLLLEQQKQLLNESQQKIESQRMLYDAQLSEEQGRNLELQVLLESEKVRIREMSSTLDRERELHAQLQSSDGTGQSRPPLPSEDLLKELQKQLEEKHSRIVELLNETEKYKLDSLQTRQQMEKDRQVHRKTLQTEQEANTEGQKKMHELQSKVEDLQRQLEEKRQQVYKLDLEGQRLQGIMQEFQKQELEREEKRESRRILYQNLNEPTTWSLTSDRTRNWVLQQKIEGETKESNYAKLIEMNGGGTGCNHELEMIRQKLQCVASKLQVLPQKASERLQFETADDEDFIWVQENIDEIILQLQKLTGQQGEEPSLVSPSTSCGSLTERLLRQNAELTGHISQLTEEKNDLRNMVMKLEEQIRWYRQTGAGRDNSSRFSLNGGANIEAIIASEKEVWNREKLTLQKSLKRAEAEVYKLKAELRNDSLLQTLSPDSEHVTLKRIYGKYLRAESFRKALIYQKKYLLLLLGGFQECEDATLALLARMGGQPAFTDLEVITNRPKGFTRFRSAVRVSIAISRMKFLVRRWHRVTGSVSININRDGFGLNQGAEKTDSFYHSSGGLELYGEPRHTTYRSRSDLDYIRSPLPFQNRYPGTPADFNPGSLACSQLQNYDPDRALTDYITRLEALQRRLGTIQSGSTTQFHAGMRR

SEQ ID NO: 876 - DNA, 6058 bp, Homo sapiens
gaagatggcggcggcggcggcggtgacggcgcttcccgtgcggctgaggacgatccgccagtgagcgcggagactgcttccacttcgggcgggggagcgccggaccgaatcggctctctaggccgtggagcttgccgtcccacctccgtccaaatcgacctttcctttctatccccaaccacccctcaacccctgttttcccctgccttccttgcagaggccatggaggacgaggagagacagaagaagctggaggccggcaaagccaagattgaagaactctctttagcttttcttgtcagacagcttgcccagtttcgacaaagaaaagctcagtcggatgggcagagtccttccaagaagcagaaaaaaaagagaaaaacgtcaagcagtaaacatgatgtgtcagcacaccatgatttgaatattgatcaatcacagtgtaatgaaatgtacataaatagttctcagagagtagaatcaactgtgattcctgaatctacaataatgagaactctacatagtggagaaataaccagtcatgagcagggcttctctgtggaactggaaagtgaaatttcaaccacagcagatgactgcagttcagaggtaaatggttgcagttttgtgatgagaacaggaaagcctacaaatttattaagggaagaagaatttggtgttgatgattcttattctgaacaaggagcacaagacagtccgactcatctagagatgatggaaagtgagttggctgggaagcagcatgagattgaagagctaaacagagagctggaagaaatgagggttacctatgggactgaaggactgcagcagttacaagaatttgaagctgccattaaacaaagagatggcattataacccagctcactgctaatttacaacaagcaagaagagaaaaggatgagacaatgagagaatttttagagttgacagaacagagtcaaaaattacagattcaatttcagcaattacaggctagtgaaactctgagaaacagcactcatagtagcacagctgcagacttactacaagccaaacaacagatcctcactcatcaacagcagcttgaagaacaagaccacttattagaagattatcagaaaaagaaagaagacttcacaatgcaaattagtttcttgcaagagaaaattaaagtatatgaaatggaacaagataaaaaagtagaaaactcaaataaagaagaaatacaggaaaaggagacaatcattgaagaattaaacacaaaaataatagaagaagaaaagaaaactcttgagctaaaggataaattaacaactgctgataaattactaggagaattacaagaacagattgtgcaaaagaaccaagaaataaaaaacatgaaattagagctgactaattctaagcaaaaagaaagacagtcttctgaagaaataaaacagttaatggggacagtcgaagaacttcagaagagaaatcataaagacagccagttcgaaactgatatagtacaacgaatggaacaagaaacacaaagaaagttagaacaactccgggcagagctggatgagatgtatgggcagcagatagtgcaaatgaaacaagaattaataagacaacacatggcacagatggaggaaatgaaaacacggcataagggagaaatggagaatgctttaaggtcatattcaaatattacagttaatgaagatcagataaagttaatgaatgtggcaataaatgaactgaatataaaattgcaagatactaactctcaaaaggaaaaactcaaggaagaactaggactaattttagaagaaaagtgtgctctacagagacagcttgaagaccttgttgaagaattgagcttttcaagggaacagattcagagagctagacagacaatagctgaacaagaaagtaaacttaatgaagcacataagtcccttagtacagtggaagatttgaaagctgagattgtttctgcatctgaatccagaaaggaactagaattaaaacatgaagcagaagttacaaattacaagataaaacttgaaatgttagaaaaagaaaagaatgctgtgttagacagaatggctgaatcacaagaagctgaattagagaggctgagaacacagcttctatttagtcacgaagaagagctttccaaactgaaggaagatttagaaattgaacatcgaataaatattgaaaaacttaaagataatttaggcattcactataaacagcagatagatggtttacagaatgaaatgagtcaaaagatagaaaccatgcagtttgaaaaggacaatttgataactaagcagaatcaattaattttggaaatttcaaagctaaaagatttacagcagtctcttgtaaattcaaagtcagaagaaatgactcttcaaatcaatgaacttcaaaaagaaattgaaatactcagacaagaagaaaaagaaaagggtacacttgaacaagaagttcaagaattacaacttaaaacagaattgttagaaaaacagatgaaggaaaaagagaatgatcttcaagaaaaatttgcacaacttgaagcagagaatagcattcttaaagatgaaaagaaaacccttgaagacatgttgaaaatacatactcctgttagccaagaagaaagattgattttcttagactccattaagtccaaatccaaagactctgtgtgggaaaaagaaatagaaatacttatagaggaaaatgaggacctcaaacaacaatgtattcagctaaatgaagagattgaaaagcaaaggaacactttttcatttgctgaaaaaaactttgaagttaactatcaagagttacaagaggagtatgcttgccttctcaaagtaaaagatgatttagaagacagtaaaaataaacaggaattagagtataaaagtaaacttaaagcacttaatgaagagcttcatttgcaaagaataaatccaactacagtgaaaatgaaaagttctgtctttgatgaagacaaaacttttgtagcagaaacattggaaatgggtgaggttgttgaaaaggatacaacagaactcatggaaaaacttgaggtaaccaagcgagagaaattagagctgtcacagagactgtctgatctttctgaacaattgaaacagaaacatggtgagattagttttctaaatgaagaagttaaatctttaaagcaagagaaagaacaagtttcattgagatgtagagagctagaaatcattattaaccacaacagggcagaaaatgtacagtcatgtgatactcaagtaagctctttattagatggagttgtgaccatgacaagcaggggtgctgaaggatcagtttctaaagtaaataaaagttttggtgaagaatcaaaaataatggtggaagataaagtttcttttgaaaatatgactgttggagaagaaagtaagcaagaacagttgattttggatcacttaccatctgtaacaaaggaatcatcacttagagcaactcaaccaagtgaaaatgataaacttcagaaagaactcaatgtacttaaatcagaacagaatgatttaaggctacagatggaagcccaacgcatttgcctctctctggtttattcaactcatgtggatcaggttcgtgaatatatggaaaatgaaaaagataaagctctttgcagtcttaaagaagagcttatttttgctcaagaggaaaagatcaaggaacttcagaaaatacaccagttagaactacagactatgaaaacacaagaaacaggtgatgaaggaaagcctttacatctgctcattggaaaacttcaaaaggcagtgtctgaagaatgttcttattttttacagactttatgcagtgtccttggtgaatattatactcctgctttaaaatgtgaagtaaatgcagaagacaaagagaattctggtgattacatttctgaaaatgaagatccagaattacaagattatagatatgaagttcaagactttcaagaaaatatgcacactcttctcaacaaagtaacagaagaatacaacaaactcttggtacttcaaacacgactaagcaagatctggggacagcagacagatggtatgaaacttgaatttggagaagaaaaccttccaaaagaggaaacagagtttttatcaatccattctcagatgaccaatttggaagacattgatgtcaatcataaaagcaagttatcttctctgcaagatcttgaaaaaactaaacttgaagaacaagttcaagaattagaaagcctcatatcctctttgcagcaacagttgaaagaaactgaacaaaactatgaggcagagatccactgtttacagaagaggcttcaagctgttagtgagtccacggttccgccaagcttacctgttgattcggtggtaattacagaatctgatgcacagagaacaatgtaccctggaagttgtgtgaaaaagaatattgatggtacaatagagttttctggtgaatttggagtgaaagaggaaacaaatatcgttaagttgcttgaaaaacaataccaagaacaattagaagaagaagtagctaaggttattgtgtcaatgagtatagcatttgctcaacaaactgaactgtctagaatatctgggggaaaagaaaatactgcatcatcaaagcaagcacatgctgtgtgtcagcaagaacaacattattttaatgaaatgaaattatcacaggatcaaattggttttcagacttttgagacagtggatgtgaaatttaaagaagaatttaaaccacttagtaaagagttaggagaacatggaaaggaaattttattatcaaatagtgatccccatgatataccagaatcaaaggactgtgtgctgactatttcagaagaaatgttctccaaagataaaacatttatagttagacagtctattcatgatgagatttcagtgtcaagcatggatgcttctagacaactaatgttgaatgaagaacagttggaagatatgagacaggaacttgtacgacaataccaagaacatcaacaggcaacggaattgttaaggcaagcacatatgcggcaaatggagagacagcgagaagaccaggaacagctacaagaagagattaagagacttaatagacaattagcccaggtaagggtcttgtagtcccctttctctccccagttatttttttttccaaacaccaacttgaaccagatccccaattaaaacaacagtattttttatgtagccataatttttttttttttttgccgaaatctgaataaactacatatatttagcatcaggaacacactctatactaagacagcagctttagatcttgttagggacacctatctcaaccttggagtgggcattgtctttctgtcattttatttaactcctttttcaagcactggaaaagtggctacacggttttgtttttttcttttaaatcattccattagccatatatagcaaactcactttgacattttggaaataacattgtgctgaggtgctccattatgcagttactatcattcagttttactatcttcatttatagttttgtgagtccaccaattagcatctcgaaggtttacctttatctgtctttaatccatctttttaatcatgaatggaaatcggaagtagtatgcttctgaaactctttccagggaaacatctcttcttgatttgagaaatgcaaatttatttaacattcttatccctttcttgactaaatttaaatacttcttggtatttgggagctggattcttgtcaactgctgtataaaatatactcacaaaaccattgcagaaaagcaagaaatatttatgtagaagttcttatgaaaacttattgaatttaattttgaaaactgaagctaagagagataataaatatctagagataactattaacagtattctttcaaacataaaataataagataattgggagctgagcataaaacattatttggaaaaattaactttgcttttcttcattgcattttgtgaattc

SEQ ID NO: 877 - protein, 1655 aa, Homo sapiens
MEDEERQKKLEAGKAKIEELSLAFLVRQLAQFRQRKAQSDGQSPSKKQKKKRKTSSSKHDVSAHHDLNIDQSQCNEMYINSSQRVESTVIPESTIMRTLHSGEITSHEQGFSVELESEISTTADDCSSEVNGCSFVMRTGKPTNLLREEEFGVDDSYSEQGAQDSPTHLEMMESELAGKQHEIEELNRELEEMRVTYGTEGLQQLQEFEAAIKQRDGIITQLTANLQQARREKDETMREFLELTEQSQKLQIQFQQLQASETLRNSTHSSTAADLLQAKQQILTHQQQLEEQDHLLEDYQKKKEDFTMQISFLQEKIKVYEMEQDKKVENSNKEEIQEKETIIEELNTKIIEEEKKTLELKDKLTTADKLLGELQEQIVQKNQEIKNMKLELTNSKQKERQSSEEIKQLMGTVEELQKRNHKDSQFETDIVQRMEQETQRKLEQLRAELDEMYGQQIVQMKQELIRQHMAQMEEMKTRHKGEMENALRSYSNITVNEDQIKLMNVAINELNIKLQDTNSQKEKLKEELGLILEEKCALQRQLEDLVEELSFSREQIQRARQTIAEQESKLNEAHKSLSTVEDLKAEIVSASESRKELELKHEAEVTNYKIKLEMLEKEKNAVLDRMAESQEAELERLRTQLLFSHEEELSKLKEDLEIEHRINIEKLKDNLGIHYKQQIDGLQNEMSQKIETMQFEKDNLITKQNQLILEISKLKDLQQSLVNSKSEEMTLQINELQKEIEILRQEEKEKGTLEQEVQELQLKTELLEKQMKEKENDLQEKFAQLEAENSILKDEKKTLEDMLKIHTPVSQEERLIFLDSIKSKSKDSVWEKEIEILIEENEDLKQQCIQLNEEIEKQRNTFSFAEKNFEVNYQELQEEYACLLKVKDDLEDSKNKQELEYKSKLKALNEELHLQRINPTTVKMKSSVFDEDKTFVAETLEMGEVVEKDTTELMEKLEVTKREKLELSQRLSDLSEQLKQKHGEISFLNEEVKSLKQEKEQVSLRCRELEIIINHNRAENVQSCDTQVSSLLDGVVTMTSRGAEGSVSKVNKSFGEESKIMVEDKVSFENMTVGEESKQEQLILDHLPSVTKESSLRATQPSENDKLQKELNVLKSEQNDLRLQMEAQRICLSLVYSTHVDQVREYMENEKDKALCSLKEELIFAQEEKIKELQKIHQLELQTMKTQETGDEGKPLHLLIGKLQKAVSEECSYFLQTLCSVLGEYYTPALKCEVNAEDKENSGDYISENEDPELQDYRYEVQDFQENMHTLLNKVTEEYNKLLVLQTRLSKIWGQQTDGMKLEFGEENLPKEETEFLSIHSQMTNLEDIDVNHKSKLSSLQDLEKTKLEEQVQELESLISSLQQQLKETEQNYEAEIHCLQKRLQAVSESTVPPSLPVDSVVITESDAQRTMYPGSCVKKNIDGTIEFSGEFGVKEETNIVKLLEKQYQEQLEEEVAKVIVSMSIAFAQQTELSRISGGKENTASSKQAHAVCQQEQHYFNEMKLSQDQIGFQTFETVDVKFKEEFKPLSKELGEHGKEILLSNSDPHDIPESKDCVLTISEEMFSKDKTFIVRQSIHDEISVSSMDASRQLMLNEEQLEDMRQELVRQYQEHQQATELLRQAHMRQMERQREDQEQLQEEIKRLNRQLAQVRVL

SEQ ID NO: 878 - DNA, 12474 bp, Homo sapiens
gaagatggcggcggcggcggcggtgacggcgcttcccgtgcggctgaggacgatccgccagtgagcgcggagactgcttccacttcgggcgggggagcgccggaccgaatcggctctctaggccgtggagcttgccgtcccacctccgtccaaatcgacctttcctttctatccccaaccacccctcaacccctgttttcccctgccttccttgcagaggccatggaggacgaggagagacagaagaagctggaggccggcaaagccaagattgaagaactctctttagcttttcttgtcagacagcttgcccagtttcgacaaagaaaagctcagtcggatgggcagagtccttccaagaagcagaaaaaaaagagaaaaacgtcaagcagtaaacatgatgtgtcagcacaccatgatttgaatattgatcaatcacagtgtaatgaaatgtacataaatagttctcagagagtagaatcaactgtgattcctgaatctacaataatgagaactctacatagtggagaaataaccagtcatgagcagggcttctctgtggaactggaaagtgaaatttcaaccacagcagatgactgcagttcagaggtaaatggttgcagttttgtgatgagaacaggaaagcctacaaatttattaagggaagaagaatttggtgttgatgattcttattctgaacaaggagcacaagacagtccgactcatctagagatgatggaaagtgagttggctgggaagcagcatgagattgaagagctaaacagagagctggaagaaatgagggttacctatgggactgaaggactgcagcagttacaagaatttgaagctgccattaaacaaagagatggcattataacccagctcactgctaatttacaacaagcaagaagagaaaaggatgagacaatgagagaatttttagagttgacagaacagagtcaaaaattacagattcaatttcagcaattacaggctagtgaaactctgagaaacagcactcatagtagcacagctgcagacttactacaagccaaacaacagatcctcactcatcaacagcagcttgaagaacaagaccacttattagaagattatcagaaaaagaaagaagacttcacaatgcaaattagtttcttgcaagagaaaattaaagtatatgaaatggaacaagataaaaaagtagaaaactcaaataaagaagaaatacaggaaaaggagacaatcattgaagaattaaacacaaaaataatagaagaagaaaagaaaactcttgagctaaaggataaattaacaactgctgataaattactaggagaattacaagaacagattgtgcaaaagaaccaagaaataaaaaacatgaaattagagctgactaattctaagcaaaaagaaagacagtcttctgaagaaataaaacagttaatggggacagtcgaagaacttcagaagagaaatcataaagacagccagttcgaaactgatatagtacaacgaatggaacaagaaacacaaagaaagttagaacaactccgggcagagctggatgagatgtatgggcagcagatagtgcaaatgaaacaagaattaataagacaacacatggcacagatggaggaaatgaaaacacggcataagggagaaatggagaatgctttaaggtcatattcaaatattacagttaatgaagatcagataaagttaatgaatgtggcaataaatgaactgaatataaaattgcaagatactaactctcaaaaggaaaaactcaaggaagaactaggactaattttagaagaaaagtgtgctctacagagacagcttgaagaccttgttgaagaattgagcttttcaagggaacagattcagagagctagacagacaatagctgaacaagaaagtaaacttaatgaagcacataagtcccttagtacagtggaagatttgaaagctgagattgtttctgcatctgaatccagaaaggaactagaattaaaacatgaagcagaagttacaaattacaagataaaacttgaaatgttagaaaaagaaaagaatgctgtgttagacagaatggctgaatcacaagaagctgaattagagaggctgagaacacagcttctatttagtcacgaagaagagctttccaaactgaaggaagatttagaaattgaacatcgaataaatattgaaaaacttaaagataatttaggcattcactataaacagcagatagatggtttacagaatgaaatgagtcaaaagatagaaaccatgcagtttgaaaaggacaatttgataactaagcagaatcaattaattttggaaatttcaaagctaaaagatttacagcagtctcttgtaaattcaaagtcagaagaaatgactcttcaaatcaatgaacttcaaaaagaaattgaaatactcagacaagaagaaaaagaaaagggtacacttgaacaagaagttcaagaattacaacttaaaacagaattgttagaaaaacagatgaaggaaaaagagaatgatcttcaagaaaaatttgcacaacttgaagcagagaatagcattcttaaagatgaaaagaaaacccttgaagacatgttgaaaatacatactcctgttagccaagaagaaagattgattttcttagactccattaagtccaaatccaaagactctgtgtgggaaaaagaaatagaaatacttatagaggaaaatgaggacctcaaacaacaatgtattcagctaaatgaagagattgaaaagcaaaggaacactttttcatttgctgaaaaaaactttgaagttaactatcaagagttacaagaggagtatgcttgccttctcaaagtaaaagatgatttagaagacagtaaaaataaacaggaattagagtataaaagtaaacttaaagcacttaatgaagagcttcatttgcaaagaataaatccaactacagtgaaaatgaaaagttctgtctttgatgaagacaaaacttttgtagcagaaacattggaaatgggtgaggttgttgaaaaggatacaacagaactcatggaaaaacttgaggtaaccaagcgagagaaattagagctgtcacagagactgtctgatctttctgaacaattgaaacagaaacatggtgagattagttttctaaatgaagaagttaaatctttaaagcaagagaaagaacaagtttcattgagatgtagagagctagaaatcattattaaccacaacagggcagaaaatgtacagtcatgtgatactcaagtaagctctttattagatggagttgtgaccatgacaagcaggggtgctgaaggatcagtttctaaagtaaataaaagttttggtgaagaatcaaaaataatggtggaagataaagtttcttttgaaaatatgactgttggagaagaaagtaagcaagaacagttgattttggatcacttaccatctgtaacaaaggaatcatcacttagagcaactcaaccaagtgaaaatgataaacttcagaaagaactcaatgtacttaaatcagaacagaatgatttaaggctacagatggaagcccaacgcatttgcctctctctggtttattcaactcatgtggatcaggttcgtgaatatatggaaaatgaaaaagataaagctctttgcagtcttaaagaagagcttatttttgctcaagaggaaaagatcaaggaacttcagaaaatacaccagttagaactacagactatgaaaacacaagaaacaggtgatgaaggaaagcctttacatctgctcattggaaaacttcaaaaggcagtgtctgaagaatgttcttattttttacagactttatgcagtgtccttggtgaatattatactcctgctttaaaatgtgaagtaaatgcagaagacaaagagaattctggtgattacatttctgaaaatgaagatccagaattacaagattatagatatgaagttcaagactttcaagaaaatatgcacactcttctcaacaaagtaacagaagaatacaacaaactcttggtacttcaaacacgactaagcaagatctggggacagcagacagatggtatgaaacttgaatttggagaagaaaaccttccaaaagaggaaacagagtttttatcaatccattctcagatgaccaatttggaagacattgatgtcaatcataaaagcaagttatcttctctgcaagatcttgaaaaaactaaacttgaagaacaagttcaagaattagaaagcctcatatcctctttgcagcaacagttgaaagaaactgaacaaaactatgaggcagagatccactgtttacagaagaggcttcaagctgttagtgagtccacggttccgccaagcttacctgttgattcggtggtaattacagaatctgatgcacagagaacaatgtaccctggaagttgtgtgaaaaagaatattgatggtacaatagagttttctggtgaatttggagtgaaagaggaaacaaatatcgttaagttgcttgaaaaacaataccaagaacaattagaagaagaagtagctaaggttattgtgtcaatgagtatagcatttgctcaacaaactgaactgtctagaatatctgggggaaaagaaaatactgcatcatcaaagcaagcacatgctgtgtgtcagcaagaacaacattattttaatgaaatgaaattatcacaggatcaaattggttttcagacttttgagacagtggatgtgaaatttaaagaagaatttaaaccacttagtaaagagttaggagaacatggaaaggaaattttattatcaaatagtgatccccatgatataccagaatcaaaggactgtgtgctgactatttcagaagaaatgttctccaaagataaaacatttatagttagacagtctattcatgatgagatttcagtgtcaagcatggatgcttctagacaactaatgttgaatgaagaacagttggaagatatgagacaggaacttgtacgacaataccaagaacatcaacaggcaacggaattgttaaggcaagcacatatgcggcaaatggagagacagcgagaagaccaggaacagctacaagaagagattaagagacttaatagacaattagcccagagatcctccatagataatgaaaacctggtttcagagagagagagggtgcttttagaggagctggaagcactaaagcagctgtctttagctggaagagagaagctgtgttgtgagctgcgcaacagcagtacgcaaacacagaatggaaatgaaaaccaaggagaagttgaagaacaaacatttaaagaaaaggaattagacagaaaacctgaagatgtgcctcctgagattttgtctaatgaaaggtatgcactccagaaagctaataatagacttttgaagatcctcttagaagttgtaaagacaacagcagctgttgaagaaacaattggtcgccatgtccttgggattctagatagatctagtaaaagccagtcatctgccagcctaatttggaggtcagaagcagaggcatctgtaaagtcatgtgtccatgaggaacatacaagagttacagatgaatccattccctcttattctggaagtgatatgccaagaaatgacattaacatgtggtcaaaagtaactgaggaaggaacagagctgtcacaacgacttgtgaggagtggttttgctggaactgaaatagaccctgaaaatgaagaacttatgctgaacattagctctcgactacaagcagcagttgaaaaactcctagaagccataagtgaaactagcagtcagcttgaacatgcgaaagtgacacagacagagttgatgcgtgagtcatttagacagaaacaagaagcaacagagtcccttaagtgccaagaggaacttcgagagcgccttcatgaggagtccagggccagagaacagctagctgtggagctcagtaaggctgagggcgtcattgatggctatgcagatgaaaaaactctttttgaaaggcaaattcaggaaaaaactgatataatagatcgtcttgagcaggagttgttatgtgcaagtaacaggttgcaagaattggaggcagagcaacagcagatccaagaagaaagagaattactgtccagacaaaaggaagctatgaaagcagaggcaggcccagttgaacaacaattactacaggagacagaaaaattaatgaaggaaaaactagaagtacaatgtcaagctgaaaaagtacgtgatgaccttcaaaaacaagtgaaagctctagaaatagatgtggaagaacaagtcagtaggtttatagagctggaacaagaaaaaaatactgaactaatggatttaagacagcaaaaccaagcattggaaaagcagttagaaaaaatgagaaaatttttagatgagcaagccattgacagagaacatgagagagatgtattccaacaggaaatacagaaactagaacagcaacttaaggttgttcctcgattccagcctatcagtgaacatcaaactagagaggttgaacagttagcaaatcatctgaaagaaaaaacagacaaatgcagtgagcttttgctctctaaagagcagcttcaaagggatatacaagaaaggaatgaagaaatagagaaactggagttcagagtaagagaactggagcaggcgcttcttgtgagtgcagatacttttcaaaaggtagaggaccgaaaacactttggagctgtagaagctaaaccagaattgtccctagaagtacaattgcaggctgaacgagatgccatagacagaaaggaaaaagagattacaaacttagaagagcaattagaacagtttagagaagaactggaaaataagaatgaagaagttcaacaattacatatgcaattagaaatacagaaaaaggaatctactacccgcctacaagaacttgaacaggaaaacaaattatttaaggatgacatggagaaactgggacttgccataaaggaatctgatgccatgtctactcaagaccaacatgtgctatttgggaaatttgctcaaataatacaggaaaaagaggtagaaattgaccaattaaatgaacaagttacgaaactccagcagcaacttaaaattacaacagataacaaggttattgaagaaaaaaatgaactgataagggatcttgaaacccaaatagaatgtttgatgagtgatcaagaatgtgtgaagagaaatagagaagaagaaatagagcagctcaatgaagtgattgaaaaacttcaacaggaattggcaaatattggacagaagacatcaatgaatgctcattccctctcagaagaagcagacagtttaaaacatcaattggatgtggttatagctgaaaagctggccttggaacagcaagtagaaaccgctaatgaagaaatgaccttcatgaaaaatgtacttaaagaaaccaattttaaaatgaatcagctaacacaggaattattcagcttaaagagagaacgtgaaagtgtggaaaagattcaaagcataccagagaatagtgttaacgtggctatagatcatctgagcaaagacaaacctgaactagaagtagtccttacagaggatgctcttaaatccctagaaaatcagacatacttcaaatcttttgaagaaaatggcaaaggttccataattaatttggaaacaaggttgctacaacttgagagcactgttagtgcaaaggacttagaacttacccagtgttataaacaaataaaagacatgcaagaacaaggccagtttgaaacagaaatgcttcaaaagaagattgtaaacctacagaaaatagttgaagaaaaagtggctgctgctcttgtcagtcaaatccaacttgaggcagttcaggaatatgcaaaattctgtcaagataatcaaacaatttcatcagaacctgaaagaacaaatattcagaatttaaatcaactaagagaagatgagttggggtcagatatatcagcattaaccttgagaatatcagaattagaaagccaggttgttgaaatgcatactagtttgattttagaaaaagaacaagtagaaattgcagaaaaaaatgttttagaaaaagaaaagaagctgctagaactacagaagctattggagggcaatgagaaaaaacagagagagaaagaaaagaaaagaagccctcaagatgttgaagttctcaagacaactactgagctatttcatagcaatgaagaaagtggattttttaatgaactcgaggctcttagagctgaatcagtggctaccaaagcagaacttgccagttataaagaaaaggctgaaaaacttcaagaagagcttttggtaaaagaaacaaatatgacatctcttcagaaagacttaagccaagttagggatcacctcgcagaggcaaaagagaaattgtccattttagaaaaagaagatgagactgaggtacaagaaagcaaaaaggcctgcatgtttgagccacttcctataaaactgagtaagagcattgcatcccagacagatgggactctgaagatcagtagcagcaatcagactccacaaattcttgttaaaaatgcaggaatacaaattaatttacagagtgaatgttcctcagaagaagttactgaaataatcagtcagtttactgaaaaaattgagaagatgcaagaactacatgctgctgaaattttggacatggaatccagacatatttcagaaactgaaaccttaaagagggaacactatgttgccgttcagttactgaaagaggaatgtggtaccttgaaggcagtgatacagtgtctgagaagtaaagaggtatttggtttttataatatgtgtttttcaacattgtgtgattctggatcagactggggtcagggaatttatcttacacacagtcagggatttgacatagcatcagaaggccgaggagaagaaagtgaaagtgcaacagattcctttccaaagaaaataaagggattactgagagctgtccataatgaaggcatgcaggtgctttctctcactgagtctccctatagtgatggagaggaccattctattcagcaggtttcagaaccttggctagaagagagaaaagcttacatcaatacaatctcatctctaaaggatttaattacaaagatgcaactgcaaagagaagccgaggtttatgatagttctcaatctcatgagagcttctcagactggcgaggtgaactactgcttgcccttcaacaagttttcttagaagagcgtagtgttttactagcagcatttcggacggagctgacagctctaggtactacagatgcagttggtttactaaactgtttggaacagagaatacaagaacagggtgttgaatatcaagcagctatggaatgcctccagaaagcagatagaaggagtttgttatctgaaattcaggcactgcatgcacaaatgaatggtaggaaaattactctgaaaagagaacaagagagtgagaaaccaagccaagaactcttggaatataatatacagcagaagcagtctcaaatgctggagatgcaagtggagctcagcagtatgaaagacagagcaacggaactgcaggagcagctgagttctgagaaaatggtggttgctgaactgaagagtgagcttgcacaaactaaattggaactagaaacaacactcaaggcacagcataaacacctaaaagaattggaggctttcaggttggaagttaaagataagacagatgaagtacatttgcttaatgacacattagcaagtgaacagaaaaaatcaagagagctccagtgggctttggagaaagagaaagccaagttgggacgcagtgaagaacgggataaagaagaacttgaggatctgaagttttcacttgagagtcagaaacaaaggaatcttcagctaaatctacttttggaacaacagaaacaactactgaacgaatcccagcaaaaaatagaatcacagagaatgctatatgatgcccagttgtcagaagaacaaggtcgaaacttagagcttcaggtacttcttgaatctgagaaagttcgaattcgggaaatgagtagtaccctagatagggagcgggaattgcacgcacagctgcagagcagtgatggtactggacagtctcggccacccttgccctcagaggacctactgaaagagctgcagaaacagctagaggaaaaacacagtcgcatagtagaattgttaaatgagactgaaaaatataaactggattctttgcaaacacgacagcaaatggaaaaagataggcaggttcacaggaaaacactgcagacagaacaggaggccaacactgagggacagaaaaaaatgcatgagctccagtccaaagtggaagatcttcagcgccagctggaagagaaaagacaacaagtttataagttagaccttgaaggacagcgactacaaggaatcatgcaggaattccagaagcaagaactagaacgagaagaaaaacgagaaagtagaagaattctgtatcagaaccttaatgagccaaccacgtggagcttaaccagtgatagaactagaaattgggttcttcaacagaaaatagaaggagaaacaaaagaatcaaactacgctaaattgattgaaatgaatggaggaggaaccggctgtaatcatgaattagaaatgatcagacaaaagcttcaatgtgtagcttcaaaactacaggttctaccccagaaagcctctgagagactacagtttgaaacagcagatgatgaagatttcatttgggttcaggaaaatattgatgaaattattttacaactacagaaattaactggccagcaaggtgaagagcccagcttggtgtccccaagtacttcttgtggctcattgactgaaagactactgagacaaaatgctgagctgacagggcatatcagtcaactgactgaagagaagaatgacttaaggaacatggttatgaagctggaagagcagatcaggtggtatcgacagacaggagctggtagagataattcttccaggttttcattgaatggtggtgccaacattgaagccatcattgcctctgaaaaagaagtatggaacagagaaaaattgactctccagaaatctttgaaaagggcagaggctgaagtatacaaactgaaagctgaactaagaaatgactctttacttcaaactctgagccctgattctgaacatgtcactttaaagagaatttatggtaaatacttgagggcagaaagttttcgaaaggctctcatttaccagaagaaatacctgctgctgttactgggtgggttccaggaatgtgaagatgccaccttggccctgcttgcccggatgggggggcagccagctttcacggatctagaggtgatcaccaatcgcccaaagggcttcaccaggtttcggtcggccgtcagagtatccattgcaatttccagaatgaaatttttggttcgacggtggcatcgagtcacaggttctgtttccatcaatattaacagagatggctttggactgaatcaaggtgcagaaaagactgactcattttatcattcttctggtgggctggagttatatggagaaccaagacatactacgtatcgctcaagatcagatctggactatattaggtcccctttaccatttcagaataggtacccaggcactccagctgatttcaatcctggttctttagcatgttctcagcttcagaattacgatcctgacagagccctaacagattatatcactcggctagaggcactgcaaagacgacttggaactatacagtcaggttcaactactcaatttcatgctggcatgagaagataatcctttgaaacatcattaattgaagtgattttaaatagatttccttttgtaaatcaatggttcttttgtgcttttgtattgtgaatattcaatgggaccaatatgaacacagcttatgattgtatacaaatcccttgccagcacatgaaaacaaactggaatttgtatatataagcattgtgtatgtattcatgcacaataattattgaattacctgtatatttgtggaatgctaatttaaaacattaaattataaaccttgtgtatttatcaaatgggtgaaaagattaaacttttacgcattacaatactgctgaatgtgtagctcgaggtgtcctgcacttttcttataaggctactgaagttacatgttttgcctaatatattctactggtgatgaagacagataatatcacttgtagagacctatttttgtataatggtagaagttttgaattttatggggtattttgtcaagtactgaaataaaaatgacttcaccattttcaccacact

SEQ ID NO: 879 - protein, 3911 aa, Homo sapiens
MEDEERQKKLEAGKAKIEELSLAFLVRQLAQFRQRKAQSDGQSPSKKQKKKRKTSSSKHDVSAHHDLNIDQSQCNEMYINSSQRVESTVIPESTIMRTLHSGEITSHEQGFSVELESEISTTADDCSSEVNGCSFVMRTGKPTNLLREEEFGVDDSYSEQGAQDSPTHLEMMESELAGKQHEIEELNRELEEMRVTYGTEGLQQLQEFEAAIKQRDGIITQLTANLQQARREKDETMREFLELTEQSQKLQIQFQQLQASETLRNSTHSSTAADLLQAKQQILTHQQQLEEQDHLLEDYQKKKEDFTMQISFLQEKIKVYEMEQDKKVENSNKEEIQEKETIIEELNTKIIEEEKKTLELKDKLTTADKLLGELQEQIVQKNQEIKNMKLELTNSKQKERQSSEEIKQLMGTVEELQKRNHKDSQFETDIVQRMEQETQRKLEQLRAELDEMYGQQIVQMKQELIRQHMAQMEEMKTRHKGEMENALRSYSNITVNEDQIKLMNVAINELNIKLQDTNSQKEKLKEELGLILEEKCALQRQLEDLVEELSFSREQIQRARQTIAEQESKLNEAHKSLSTVEDLKAEIVSASESRKELELKHEAEVTNYKIKLEMLEKEKNAVLDRMAESQEAELERLRTQLLFSHEEELSKLKEDLEIEHRINIEKLKDNLGIHYKQQIDGLQNEMSQKIETMQFEKDNLITKQNQLILEISKLKDLQQSLVNSKSEEMTLQINELQKEIEILRQEEKEKGTLEQEVQELQLKTELLEKQMKEKENDLQEKFAQLEAENSILKDEKKTLEDMLKIHTPVSQEERLIFLDSIKSKSKDSVWEKEIEILIEENEDLKQQCIQLNEEIEKQRNTFSFAEKNFEVNYQELQEEYACLLKVKDDLEDSKNKQELEYKSKLKALNEELHLQRINPTTVKMKSSVFDEDKTFVAETLEMGEVVEKDTTELMEKLEVTKREKLELSQRLSDLSEQLKQKHGEISFLNEEVKSLKQEKEQVSLRCRELEIIINHNRAENVQSCDTQVSSLLDGVVTMTSRGAEGSVSKVNKSFGEESKIMVEDKVSFENMTVGEESKQEQLILDHLPSVTKESSLRATQPSENDKLQKELNVLKSEQNDLRLQMEAQRICLSLVYSTHVDQVREYMENEKDKALCSLKEELIFAQEEKIKELQKIHQLELQTMKTQETGDEGKPLHLLIGKLQKAVSEECSYFLQTLCSVLGEYYTPALKCEVNAEDKENSGDYISENEDPELQDYRYEVQDFQENMHTLLNKVTEEYNKLLVLQTRLSKIWGQQTDGMKLEFGEENLPKEETEFLSIHSQMTNLEDIDVNHKSKLSSLQDLEKTKLEEQVQELESLISSLQQQLKETEQNYEAEIHCLQKRLQAVSESTVPPSLPVDSVVITESDAQRTMYPGSCVKKNIDGTIEFSGEFGVKEETNIVKLLEKQYQEQLEEEVAKVIVSMSIAFAQQTELSRISGGKENTASSKQAHAVCQQEQHYFNEMKLSQDQIGFQTFETVDVKFKEEFKPLSKELGEHGKEILLSNSDPHDIPESKDCVLTISEEMFSKDKTFIVRQSIHDEISVSSMDASRQLMLNEEQLEDMRQELVRQYQEHQQATELLRQAHMRQMERQREDQEQLQEEIKRLNRQLAQRSSIDNENLVSERERVLLEELEALKQLSLAGREKLCCELRNSSTQTQNGNENQGEVEEQTFKEKELDRKPEDVPPEILSNERYALQKANNRLLKILLEVVKTTAAVEETIGRHVLGILDRSSKSQSSASLIWRSEAEASVKSCVHEEHTRVTDESIPSYSGSDMPRNDINMWSKVTEEGTELSQRLVRSGFAGTEIDPENEELMLNISSRLQAAVEKLLEAISETSSQLEHAKVTQTELMRESFRQKQEATESLKCQEELRERLHEESRAREQLAVELSKAEGVIDGYADEKTLFERQIQEKTDIIDRLEQELLCASNRLQELEAEQQQIQEERELLSRQKEAMKAEAGPVEQQLLQETEKLMKEKLEVQCQAEKVRDDLQKQVKALEIDVEEQVSRFIELEQEKNTELMDLRQQNQALEKQLEKMRKFLDEQAIDREHERDVFQQEIQKLEQQLKVVPRFQPISEHQTREVEQLANHLKEKTDKCSELLLSKEQLQRDIQERNEEIEKLEFRVRELEQALLVSADTFQKVEDRKHFGAVEAKPELSLEVQLQAERDAIDRKEKEITNLEEQLEQFREELENKNEEVQQLHMQLEIQKKESTTRLQELEQENKLFKDDMEKLGLAIKESDAMSTQDQHVLFGKFAQIIQEKEVEIDQLNEQVTKLQQQLKITTDNKVIEEKNELIRDLETQIECLMSDQECVKRNREEEIEQLNEVIEKLQQELANIGQKTSMNAHSLSEEADSLKHQLDVVIAEKLALEQQVETANEEMTFMKNVLKETNFKMNQLTQELFSLKRERESVEKIQSIPENSVNVAIDHLSKDKPELEVVLTEDALKSLENQTYFKSFEENGKGSIINLETRLLQLESTVSAKDLELTQCYKQIKDMQEQGQFETEMLQKKIVNLQKIVEEKVAAALVSQIQLEAVQEYAKFCQDNQTISSEPERTNIQNLNQLREDELGSDISALTLRISELESQVVEMHTSLILEKEQVEIAEKNVLEKEKKLLELQKLLEGNEKKQREKEKKRSPQDVEVLKTTTELFHSNEESGFFNELEALRAESVATKAELASYKEKAEKLQEELLVKETNMTSLQKDLSQVRDHLAEAKEKLSILEKEDETEVQESKKACMFEPLPIKLSKSIASQTDGTLKISSSNQTPQILVKNAGIQINLQSECSSEEVTEIISQFTEKIEKMQELHAAEILDMESRHISETETLKREHYVAVQLLKEECGTLKAVIQCLRSKEVFGFYNMCFSTLCDSGSDWGQGIYLTHSQGFDIASEGRGEESESATDSFPKKIKGLLRAVHNEGMQVLSLTESPYSDGEDHSIQQVSEPWLEERKAYINTISSLKDLITKMQLQREAEVYDSSQSHESFSDWRGELLLALQQVFLEERSVLLAAFRTELTALGTTDAVGLLNCLEQRIQEQGVEYQAAMECLQKADRRSLLSEIQALHAQMNGRKITLKREQESEKPSQELLEYNIQQKQSQMLEMQVELSSMKDRATELQEQLSSEKMVVAELKSELAQTKLELETTLKAQHKHLKELEAFRLEVKDKTDEVHLLNDTLASEQKKSRELQWALEKEKAKLGRSEERDKEELEDLKFSLESQKQRNLQLNLLLEQQKQLLNESQQKIESQRMLYDAQLSEEQGRNLELQVLLESEKVRIREMSSTLDRERELHAQLQSSDGTGQSRPPLPSEDLLKELQKQLEEKHSRIVELLNETEKYKLDSLQTRQQMEKDRQVHRKTLQTEQEANTEGQKKMHELQSKVEDLQRQLEEKRQQVYKLDLEGQRLQGIMQEFQKQELEREEKRESRRILYQNLNEPTTWSLTSDRTRNWVLQQKIEGETKESNYAKLIEMNGGGTGCNHELEMIRQKLQCVASKLQVLPQKASERLQFETADDEDFIWVQENIDEIILQLQKLTGQQGEEPSLVSPSTSCGSLTERLLRQNAELTGHISQLTEEKNDLRNMVMKLEEQIRWYRQTGAGRDNSSRFSLNGGANIEAIIASEKEVWNREKLTLQKSLKRAEAEVYKLKAELRNDSLLQTLSPDSEHVTLKRIYGKYLRAESFRKALIYQKKYLLLLLGGFQECEDATLALLARMGGQPAFTDLEVITNRPKGFTRFRSAVRVSIAISRMKFLVRRWHRVTGSVSININRDGFGLNQGAEKTDSFYHSSGGLELYGEPRHTTYRSRSDLDYIRSPLPFQNRYPGTPADFNPGSLACSQLQNYDPDRALTDYITRLEALQRRLGTIQSGSTTQFHAGMRR

SEQ ID NO: 880 - DNA, 12450 bp, Homo sapiens
gaagatggcggcggcggcggcggtgacggcgcttcccgtgcggctgaggacgatccgccagtgagcgcggagactgcttccacttcgggcgggggagcgccggaccgaatcggctctctaggccgtggagcttgccgtcccacctccgtccaaatcgacctttcctttctatccccaaccacccctcaacccctgttttcccctgccttccttgcagaggccatggaggacgaggagagacagaagaagctggaggccggcaaagccaagcttgcccagtttcgacaaagaaaagctcagtcggatgggcagagtccttccaagaagcagaaaaaaaagagaaaaacgtcaagcagtaaacatgatgtgtcagcacaccatgatttgaatattgatcaatcacagtgtaatgaaatgtacataaatagttctcagagagtagaatcaactgtgattcctgaatctacaataatgagaactctacatagtggagaaataaccagtcatgagcagggcttctctgtggaactggaaagtgaaatttcaaccacagcagatgactgcagttcagaggtaaatggttgcagttttgtgatgagaacaggaaagcctacaaatttattaagggaagaagaatttggtgttgatgattcttattctgaacaaggagcacaagacagtccgactcatctagagatgatggaaagtgagttggctgggaagcagcatgagattgaagagctaaacagagagctggaagaaatgagggttacctatgggactgaaggactgcagcagttacaagaatttgaagctgccattaaacaaagagatggcattataacccagctcactgctaatttacaacaagcaagaagagaaaaggatgagacaatgagagaatttttagagttgacagaacagagtcaaaaattacagattcaatttcagcaattacaggctagtgaaactctgagaaacagcactcatagtagcacagctgcagacttactacaagccaaacaacagatcctcactcatcaacagcagcttgaagaacaagaccacttattagaagattatcagaaaaagaaagaagacttcacaatgcaaattagtttcttgcaagagaaaattaaagtatatgaaatggaacaagataaaaaagtagaaaactcaaataaagaagaaatacaggaaaaggagacaatcattgaagaattaaacacaaaaataatagaagaagaaaagaaaactcttgagctaaaggataaattaacaactgctgataaattactaggagaattacaagaacagattgtgcaaaagaaccaagaaataaaaaacatgaaattagagctgactaattctaagcaaaaagaaagacagtcttctgaagaaataaaacagttaatggggacagtcgaagaacttcagaagagaaatcataaagacagccagttcgaaactgatatagtacaacgaatggaacaagaaacacaaagaaagttagaacaactccgggcagagctggatgagatgtatgggcagcagatagtgcaaatgaaacaagaattaataagacaacacatggcacagatggaggaaatgaaaacacggcataagggagaaatggagaatgctttaaggtcatattcaaatattacagttaatgaagatcagataaagttaatgaatgtggcaataaatgaactgaatataaaattgcaagatactaactctcaaaaggaaaaactcaaggaagaactaggactaattttagaagaaaagtgtgctctacagagacagcttgaagaccttgttgaagaattgagcttttcaagggaacagattcagagagctagacagacaatagctgaacaagaaagtaaacttaatgaagcacataagtcccttagtacagtggaagatttgaaagctgagattgtttctgcatctgaatccagaaaggaactagaattaaaacatgaagcagaagttacaaattacaagataaaacttgaaatgttagaaaaagaaaagaatgctgtgttagacagaatggctgaatcacaagaagctgaattagagaggctgagaacacagcttctatttagtcacgaagaagagctttccaaactgaaggaagatttagaaattgaacatcgaataaatattgaaaaacttaaagataatttaggcattcactataaacagcagatagatggtttacagaatgaaatgagtcaaaagatagaaaccatgcagtttgaaaaggacaatttgataactaagcagaatcaattaattttggaaatttcaaagctaaaagatttacagcagtctcttgtaaattcaaagtcagaagaaatgactcttcaaatcaatgaacttcaaaaagaaattgaaatactcagacaagaagaaaaagaaaagggtacacttgaacaagaagttcaagaattacaacttaaaacagaattgttagaaaaacagatgaaggaaaaagagaatgatcttcaagaaaaatttgcacaacttgaagcagagaatagcattcttaaagatgaaaagaaaacccttgaagacatgttgaaaatacatactcctgttagccaagaagaaagattgattttcttagactccattaagtccaaatccaaagactctgtgtgggaaaaagaaatagaaatacttatagaggaaaatgaggacctcaaacaacaatgtattcagctaaatgaagagattgaaaagcaaaggaacactttttcatttgctgaaaaaaactttgaagttaactatcaagagttacaagaggagtatgcttgccttctcaaagtaaaagatgatttagaagacagtaaaaataaacaggaattagagtataaaagtaaacttaaagcacttaatgaagagcttcatttgcaaagaataaatccaactacagtgaaaatgaaaagttctgtctttgatgaagacaaaacttttgtagcagaaacattggaaatgggtgaggttgttgaaaaggatacaacagaactcatggaaaaacttgaggtaaccaagcgagagaaattagagctgtcacagagactgtctgatctttctgaacaattgaaacagaaacatggtgagattagttttctaaatgaagaagttaaatctttaaagcaagagaaagaacaagtttcattgagatgtagagagctagaaatcattattaaccacaacagggcagaaaatgtacagtcatgtgatactcaagtaagctctttattagatggagttgtgaccatgacaagcaggggtgctgaaggatcagtttctaaagtaaataaaagttttggtgaagaatcaaaaataatggtggaagataaagtttcttttgaaaatatgactgttggagaagaaagtaagcaagaacagttgattttggatcacttaccatctgtaacaaaggaatcatcacttagagcaactcaaccaagtgaaaatgataaacttcagaaagaactcaatgtacttaaatcagaacagaatgatttaaggctacagatggaagcccaacgcatttgcctctctctggtttattcaactcatgtggatcaggttcgtgaatatatggaaaatgaaaaagataaagctctttgcagtcttaaagaagagcttatttttgctcaagaggaaaagatcaaggaacttcagaaaatacaccagttagaactacagactatgaaaacacaagaaacaggtgatgaaggaaagcctttacatctgctcattggaaaacttcaaaaggcagtgtctgaagaatgttcttattttttacagactttatgcagtgtccttggtgaatattatactcctgctttaaaatgtgaagtaaatgcagaagacaaagagaattctggtgattacatttctgaaaatgaagatccagaattacaagattatagatatgaagttcaagactttcaagaaaatatgcacactcttctcaacaaagtaacagaagaatacaacaaactcttggtacttcaaacacgactaagcaagatctggggacagcagacagatggtatgaaacttgaatttggagaagaaaaccttccaaaagaggaaacagagtttttatcaatccattctcagatgaccaatttggaagacattgatgtcaatcataaaagcaagttatcttctctgcaagatcttgaaaaaactaaacttgaagaacaagttcaagaattagaaagcctcatatcctctttgcagcaacagttgaaagaaactgaacaaaactatgaggcagagatccactgtttacagaagaggcttcaagctgttagtgagtccacggttccgccaagcttacctgttgattcggtggtaattacagaatctgatgcacagagaacaatgtaccctggaagttgtgtgaaaaagaatattgatggtacaatagagttttctggtgaatttggagtgaaagaggaaacaaatatcgttaagttgcttgaaaaacaataccaagaacaattagaagaagaagtagctaaggttattgtgtcaatgagtatagcatttgctcaacaaactgaactgtctagaatatctgggggaaaagaaaatactgcatcatcaaagcaagcacatgctgtgtgtcagcaagaacaacattattttaatgaaatgaaattatcacaggatcaaattggttttcagacttttgagacagtggatgtgaaatttaaagaagaatttaaaccacttagtaaagagttaggagaacatggaaaggaaattttattatcaaatagtgatccccatgatataccagaatcaaaggactgtgtgctgactatttcagaagaaatgttctccaaagataaaacatttatagttagacagtctattcatgatgagatttcagtgtcaagcatggatgcttctagacaactaatgttgaatgaagaacagttggaagatatgagacaggaacttgtacgacaataccaagaacatcaacaggcaacggaattgttaaggcaagcacatatgcggcaaatggagagacagcgagaagaccaggaacagctacaagaagagattaagagacttaatagacaattagcccagagatcctccatagataatgaaaacctggtttcagagagagagagggtgcttttagaggagctggaagcactaaagcagctgtctttagctggaagagagaagctgtgttgtgagctgcgcaacagcagtacgcaaacacagaatggaaatgaaaaccaaggagaagttgaagaacaaacatttaaagaaaaggaattagacagaaaacctgaagatgtgcctcctgagattttgtctaatgaaaggtatgcactccagaaagctaataatagacttttgaagatcctcttagaagttgtaaagacaacagcagctgttgaagaaacaattggtcgccatgtccttgggattctagatagatctagtaaaagccagtcatctgccagcctaatttggaggtcagaagcagaggcatctgtaaagtcatgtgtccatgaggaacatacaagagttacagatgaatccattccctcttattctggaagtgatatgccaagaaatgacattaacatgtggtcaaaagtaactgaggaaggaacagagctgtcacaacgacttgtgaggagtggttttgctggaactgaaatagaccctgaaaatgaagaacttatgctgaacattagctctcgactacaagcagcagttgaaaaactcctagaagccataagtgaaactagcagtcagcttgaacatgcgaaagtgacacagacagagttgatgcgtgagtcatttagacagaaacaagaagcaacagagtcccttaagtgccaagaggaacttcgagagcgccttcatgaggagtccagggccagagaacagctagctgtggagctcagtaaggctgagggcgtcattgatggctatgcagatgaaaaaactctttttgaaaggcaaattcaggaaaaaactgatataatagatcgtcttgagcaggagttgttatgtgcaagtaacaggttgcaagaattggaggcagagcaacagcagatccaagaagaaagagaattactgtccagacaaaaggaagctatgaaagcagaggcaggcccagttgaacaacaattactacaggagacagaaaaattaatgaaggaaaaactagaagtacaatgtcaagctgaaaaagtacgtgatgaccttcaaaaacaagtgaaagctctagaaatagatgtggaagaacaagtcagtaggtttatagagctggaacaagaaaaaaatactgaactaatggatttaagacagcaaaaccaagcattggaaaagcagttagaaaaaatgagaaaatttttagatgagcaagccattgacagagaacatgagagagatgtattccaacaggaaatacagaaactagaacagcaacttaaggttgttcctcgattccagcctatcagtgaacatcaaactagagaggttgaacagttagcaaatcatctgaaagaaaaaacagacaaatgcagtgagcttttgctctctaaagagcagcttcaaagggatatacaagaaaggaatgaagaaatagagaaactggagttcagagtaagagaactggagcaggcgcttcttgtagaggaccgaaaacactttggagctgtagaagctaaaccagaattgtccctagaagtacaattgcaggctgaacgagatgccatagacagaaaggaaaaagagattacaaacttagaagagcaattagaacagtttagagaagaactggaaaataagaatgaagaagttcaacaattacatatgcaattagaaatacagaaaaaggaatctactacccgcctacaagaacttgaacaggaaaacaaattatttaaggatgacatggagaaactgggacttgccataaaggaatctgatgccatgtctactcaagaccaacatgtgctatttgggaaatttgctcaaataatacaggaaaaagaggtagaaattgaccaattaaatgaacaagttacgaaactccagcagcaacttaaaattacaacagataacaaggttattgaagaaaaaaatgaactgataagggatcttgaaacccaaatagaatgtttgatgagtgatcaagaatgtgtgaagagaaatagagaagaagaaatagagcagctcaatgaagtgattgaaaaacttcaacaggaattggcaaatattggacagaagacatcaatgaatgctcattccctctcagaagaagcagacagtttaaaacatcaattggatgtggttatagctgaaaagctggccttggaacagcaagtagaaaccgctaatgaagaaatgaccttcatgaaaaatgtacttaaagaaaccaattttaaaatgaatcagctaacacaggaattattcagcttaaagagagaacgtgaaagtgtggaaaagattcaaagcataccagagaatagtgttaacgtggctatagatcatctgagcaaagacaaacctgaactagaagtagtccttacagaggatgctcttaaatccctagaaaatcagacatacttcaaatcttttgaagaaaatggcaaaggttccataattaatttggaaacaaggttgctacaacttgagagcactgttagtgcaaaggacttagaacttacccagtgttataaacaaataaaagacatgcaagaacaaggccagtttgaaacagaaatgcttcaaaagaagattgtaaacctacagaaaatagttgaagaaaaagtggctgctgctcttgtcagtcaaatccaacttgaggcagttcaggaatatgcaaaattctgtcaagataatcaaacaatttcatcagaacctgaaagaacaaatattcagaatttaaatcaactaagagaagatgagttggggtcagatatatcagcattaaccttgagaatatcagaattagaaagccaggttgttgaaatgcatactagtttgattttagaaaaagaacaagtagaaattgcagaaaaaaatgttttagaaaaagaaaagaagctgctagaactacagaagctattggagggcaatgagaaaaaacagagagagaaagaaaagaaaagaagccctcaagatgttgaagttctcaagacaactactgagctatttcatagcaatgaagaaagtggattttttaatgaactcgaggctcttagagctgaatcagtggctaccaaagcagaacttgccagttataaagaaaaggctgaaaaacttcaagaagagcttttggtaaaagaaacaaatatgacatctcttcagaaagacttaagccaagttagggatcacctcgcagaggcaaaagagaaattgtccattttagaaaaagaagatgagactgaggtacaagaaagcaaaaaggcctgcatgtttgagccacttcctataaaactgagtaagagcattgcatcccagacagatgggactctgaagatcagtagcagcaatcagactccacaaattcttgttaaaaatgcaggaatacaaattaatttacagagtgaatgttcctcagaagaagttactgaaataatcagtcagtttactgaaaaaattgagaagatgcaagaactacatgctgctgaaattttggacatggaatccagacatatttcagaaactgaaaccttaaagagggaacactatgttgccgttcagttactgaaagaggaatgtggtaccttgaaggcagtgatacagtgtctgagaagtaaagagggatcctcaattcctgagctagcacattctgatgcttaccagactagagaaatatgctccagtgattctggatcagactggggtcagggaatttatcttacacacagtcagggatttgacatagcatcagaaggccgaggagaagaaagtgaaagtgcaacagattcctttccaaagaaaataaagggattactgagagctgtccataatgaaggcatgcaggtgctttctctcactgagtctccctatagtgatggagaggaccattctattcagcaggtttcagaaccttggctagaagagagaaaagcttacatcaatacaatctcatctctaaaggatttaattacaaagatgcaactgcaaagagaagccgaggtttatgatagttctcaatctcatgagagcttctcagactggcgaggtgaactactgcttgcccttcaacaagttttcttagaagagcgtagtgttttactagcagcatttcggacggagctgacagctctaggtactacagatgcagttggtttactaaactgtttggaacagagaatacaagaacagggtgttgaatatcaagcagctatggaatgcctccagaaagcagatagaaggagtttgttatctgaaattcaggcactgcatgcacaaatgaatggtaggaaaattactctgaaaagagaacaagagagtgagaaaccaagccaagaactcttggaatataatatacagcagaagcagtctcaaatgctggagatgcaagtggagctcagcagtatgaaagacagagcaacggaactgcaggagcagctgagttctgagaaaatggtggttgctgaactgaagagtgagcttgcacaaactaaattggaactagaaacaacactcaaggcacagcataaacacctaaaagaattggaggctttcaggttggaagttaaagataagacagatgaagtacatttgcttaatgacacattagcaagtgaacagaaaaaatcaagagagctccagtgggctttggagaaagagaaagccaagttgggacgcagtgaagaacgggataaagaagaacttgaggatctgaagttttcacttgagagtcagaaacaaaggaatcttcagctaaatctacttttggaacaacagaaacaactactgaacgaatcccagcaaaaaatagaatcacagagaatgctatatgatgcccagttgtcagaagaacaaggtcgaaacttagagcttcaggtacttcttgaatctgagaaagttcgaattcgggaaatgagtagtaccctagatagggagcgggaattgcacgcacagctgcagagcagtgatggtactggacagtctcggccacccttgccctcagaggacctactgaaagagctgcagaaacagctagaggaaaaacacagtcgcatagtagaattgttaaatgagactgaaaaatataaactggattctttgcaaacacgacagcaaatggaaaaagataggcaggttcacaggaaaacactgcagacagaacaggaggccaacactgagggacagaaaaaaatgcatgagctccagtccaaagtggaagatcttcagcgccagctggaagagaaaagacaacaagtttataagttagaccttgaaggacagcgactacaaggaatcatgcaggaattccagaagcaagaactagaacgagaagaaaaacgagaaagtagaagaattctgtatcagaaccttaatgagccaaccacgtggagcttaaccagtgatagaactagaaattgggttcttcaacagaaaatagaaggagaaacaaaagaatcaaactacgctaaattgattgaaatgaatggaggaggaaccggctgtaatcatgaattagaaatgatcagacaaaagcttcaatgtgtagcttcaaaactacaggttctaccccagaaagcctctgagagactacagtttgaaacagcagatgatgaagatttcatttgggttcaggaaaatattgatgaaattattttacaactacagaaattaactggccagcaaggtgaagagcccagcttggtgtccccaagtacttcttgtggctcattgactgaaagactactgagacaaaatgctgagctgacagggcatatcagtcaactgactgaagagaagaatgacttaaggaacatggttatgaagctggaagagcagatcaggtggtatcgacagacaggagctggtagagataattcttccaggttttcattgaatggtggtgccaacattgaagccatcattgcctctgaaaaagaagtatggaacagagaaaaattgactctccagaaatctttgaaaagggcagaggctgaagtatacaaactgaaagctgaactaagaaatgactctttacttcaaactctgagccctgattctgaacatgtcactttaaagagaatttatggtaaatacttgagggcagaaagttttcgaaaggctctcatttaccagaagaaatacctgctgctgttactgggtgggttccaggaatgtgaagatgccaccttggccctgcttgcccggatgggggggcagccagctttcacggatctagaggtgatcaccaatcgcccaaagggcttcaccaggtttcggtcggccgtcagagtatccattgcaatttccagaatgaaatttttggttcgacggtggcatcgagtcacaggttctgtttccatcaatattaacagagatggctttggactgaatcaaggtgcagaaaagactgactcattttatcattcttctggtgggctggagttatatggagaaccaagacatactacgtatcgctcaagatcagatctggactatattaggtcccctttaccatttcagaataggtacccaggcactccagctgatttcaatcctggttctttagcatgttctcagcttcagaattacgatcctgacagagccctaacagattatatcactcggctagaggcactgcaaagacgacttggaactatacagtcaggttcaactactcaatttcatgctggcatgagaagataatcctttgaaacatcattaattgaagtgattttaaatagatttccttttgtaaatcaatggttcttttgtgcttttgtattgtgaatattcaatgggaccaatatgaacacagcttatgattgtatacaaatcccttgccagcacatgaaaacaaactggaatttgtatatataagcattgtgtatgtattcatgcacaataattattgaattacctgtatatttgtggaatgctaatttaaaacattaaattataaaccttgtgtatttatcaaatgggtgaaaagattaaacttttacgcattacaatactgctgaatgtgtagctcgaggtgtcctgcacttttcttataaggctactgaagttacatgttttgcctaatatattctactggtgatgaagacagataatatcacttgtagagacctatttttgtataatggtagaagttttgaattttatggggtattttgtcaagtactgaaataaaaactgaaataaaaatgacttcaccattttcaccacact

SEQ ID NO: 881 - protein, 3899 aa, Homo sapiens
MEDEERQKKLEAGKAKLAQFRQRKAQSDGQSPSKKQKKKRKTSSSKHDVSAHHDLNIDQSQCNEMYINSSQRVESTVIPESTIMRTLHSGEITSHEQGFSVELESEISTTADDCSSEVNGCSFVMRTGKPTNLLREEEFGVDDSYSEQGAQDSPTHLEMMESELAGKQHEIEELNRELEEMRVTYGTEGLQQLQEFEAAIKQRDGIITQLTANLQQARREKDETMREFLELTEQSQKLQIQFQQLQASETLRNSTHSSTAADLLQAKQQILTHQQQLEEQDHLLEDYQKKKEDFTMQISFLQEKIKVYEMEQDKKVENSNKEEIQEKETIIEELNTKIIEEEKKTLELKDKLTTADKLLGELQEQIVQKNQEIKNMKLELTNSKQKERQSSEEIKQLMGTVEELQKRNHKDSQFETDIVQRMEQETQRKLEQLRAELDEMYGQQIVQMKQELIRQHMAQMEEMKTRHKGEMENALRSYSNITVNEDQIKLMNVAINELNIKLQDTNSQKEKLKEELGLILEEKCALQRQLEDLVEELSFSREQIQRARQTIAEQESKLNEAHKSLSTVEDLKAEIVSASESRKELELKHEAEVTNYKIKLEMLEKEKNAVLDRMAESQEAELERLRTQLLFSHEEELSKLKEDLEIEHRINIEKLKDNLGIHYKQQIDGLQNEMSQKIETMQFEKDNLITKQNQLILEISKLKDLQQSLVNSKSEEMTLQINELQKEIEILRQEEKEKGTLEQEVQELQLKTELLEKQMKEKENDLQEKFAQLEAENSILKDEKKTLEDMLKIHTPVSQEERLIFLDSIKSKSKDSVWEKEIEILIEENEDLKQQCIQLNEEIEKQRNTFSFAEKNFEVNYQELQEEYACLLKVKDDLEDSKNKQELEYKSKLKALNEELHLQRINPTTVKMKSSVFDEDKTFVAETLEMGEVVEKDTTELMEKLEVTKREKLELSQRLSDLSEQLKQKHGEISFLNEEVKSLKQEKEQVSLRCRELEIIINHNRAENVQSCDTQVSSLLDGVVTMTSRGAEGSVSKVNKSFGEESKIMVEDKVSFENMTVGEESKQEQLILDHLPSVTKESSLRATQPSENDKLQKELNVLKSEQNDLRLQMEAQRICLSLVYSTHVDQVREYMENEKDKALCSLKEELIFAQEEKIKELQKIHQLELQTMKTQETGDEGKPLHLLIGKLQKAVSEECSYFLQTLCSVLGEYYTPALKCEVNAEDKENSGDYISENEDPELQDYRYEVQDFQENMHTLLNKVTEEYNKLLVLQTRLSKIWGQQTDGMKLEFGEENLPKEETEFLSIHSQMTNLEDIDVNHKSKLSSLQDLEKTKLEEQVQELESLISSLQQQLKETEQNYEAEIHCLQKRLQAVSESTVPPSLPVDSVVITESDAQRTMYPGSCVKKNIDGTIEFSGEFGVKEETNIVKLLEKQYQEQLEEEVAKVIVSMSIAFAQQTELSRISGGKENTASSKQAHAVCQQEQHYFNEMKLSQDQIGFQTFETVDVKFKEEFKPLSKELGEHGKEILLSNSDPHDIPESKDCVLTISEEMFSKDKTFIVRQSIHDEISVSSMDASRQLMLNEEQLEDMRQELVRQYQEHQQATELLRQAHMRQMERQREDQEQLQEEIKRLNRQLAQRSSIDNENLVSERERVLLEELEALKQLSLAGREKLCCELRNSSTQTQNGNENQGEVEEQTFKEKELDRKPEDVPPEILSNERYALQKANNRLLKILLEVVKTTAAVEETIGRHVLGILDRSSKSQSSASLIWRSEAEASVKSCVHEEHTRVTDESIPSYSGSDMPRNDINMWSKVTEEGTELSQRLVRSGFAGTEIDPENEELMLNISSRLQAAVEKLLEAISETSSQLEHAKVTQTELMRESFRQKQEATESLKCQEELRERLHEESRAREQLAVELSKAEGVIDGYADEKTLFERQIQEKTDIIDRLEQELLCASNRLQELEAEQQQIQEERELLSRQKEAMKAEAGPVEQQLLQETEKLMKEKLEVQCQAEKVRDDLQKQVKALEIDVEEQVSRFIELEQEKNTELMDLRQQNQALEKQLEKMRKFLDEQAIDREHERDVFQQEIQKLEQQLKVVPRFQPISEHQTREVEQLANHLKEKTDKCSELLLSKEQLQRDIQERNEEIEKLEFRVRELEQALLVEDRKHFGAVEAKPELSLEVQLQAERDAIDRKEKEITNLEEQLEQFREELENKNEEVQQLHMQLEIQKKESTTRLQELEQENKLFKDDMEKLGLAIKESDAMSTQDQHVLFGKFAQIIQEKEVEIDQLNEQVTKLQQQLKITTDNKVIEEKNELIRDLETQIECLMSDQECVKRNREEEIEQLNEVIEKLQQELANIGQKTSMNAHSLSEEADSLKHQLDVVIAEKLALEQQVETANEEMTFMKNVLKETNFKMNQLTQELFSLKRERESVEKIQSIPENSVNVAIDHLSKDKPELEVVLTEDALKSLENQTYFKSFEENGKGSIINLETRLLQLESTVSAKDLELTQCYKQIKDMQEQGQFETEMLQKKIVNLQKIVEEKVAAALVSQIQLEAVQEYAKFCQDNQTISSEPERTNIQNLNQLREDELGSDISALTLRISELESQVVEMHTSLILEKEQVEIAEKNVLEKEKKLLELQKLLEGNEKKQREKEKKRSPQDVEVLKTTTELFHSNEESGFFNELEALRAESVATKAELASYKEKAEKLQEELLVKETNMTSLQKDLSQVRDHLAEAKEKLSILEKEDETEVQESKKACMFEPLPIKLSKSIASQTDGTLKISSSNQTPQILVKNAGIQINLQSECSSEEVTEIISQFTEKIEKMQELHAAEILDMESRHISETETLKREHYVAVQLLKEECGTLKAVIQCLRSKEGSSIPELAHSDAYQTREICSSDSGSDWGQGIYLTHSQGFDIASEGRGEESESATDSFPKKIKGLLRAVHNEGMQVLSLTESPYSDGEDHSIQQVSEPWLEERKAYINTISSLKDLITKMQLQREAEVYDSSQSHESFSDWRGELLLALQQVFLEERSVLLAAFRTELTALGTTDAVGLLNCLEQRIQEQGVEYQAAMECLQKADRRSLLSEIQALHAQMNGRKITLKREQESEKPSQELLEYNIQQKQSQMLEMQVELSSMKDRATELQEQLSSEKMVVAELKSELAQTKLELETTLKAQHKHLKELEAFRLEVKDKTDEVHLLNDTLASEQKKSRELQWALEKEKAKLGRSEERDKEELEDLKFSLESQKQRNLQLNLLLEQQKQLLNESQQKIESQRMLYDAQLSEEQGRNLELQVLLESEKVRIREMSSTLDRERELHAQLQSSDGTGQSRPPLPSEDLLKELQKQLEEKHSRIVELLNETEKYKLDSLQTRQQMEKDRQVHRKTLQTEQEANTEGQKKMHELQSKVEDLQRQLEEKRQQVYKLDLEGQRLQGIMQEFQKQELEREEKRESRRILYQNLNEPTTWSLTSDRTRNWVLQQKIEGETKESNYAKLIEMNGGGTGCNHELEMIRQKLQCVASKLQVLPQKASERLQFETADDEDFIWVQENIDEIILQLQKLTGQQGEEPSLVSPSTSCGSLTERLLRQNAELTGHISQLTEEKNDLRNMVMKLEEQIRWYRQTGAGRDNSSRFSLNGGANIEAIIASEKEVWNREKLTLQKSLKRAEAEVYKLKAELRNDSLLQTLSPDSEHVTLKRIYGKYLRAESFRKALIYQKKYLLLLLGGFQECEDATLALLARMGGQPAFTDLEVITNRPKGFTRFRSAVRVSIAISRMKFLVRRWHRVTGSVSININRDGFGLNQGAEKTDSFYHSSGGLELYGEPRHTTYRSRSDLDYIRSPLPFQNRYPGTPADFNPGSLACSQLQNYDPDRALTDYITRLEALQRRLGTIQSGSTTQFHAGMRR

SEQ ID NO: 882 - DNA, 3381 bp, Homo sapiens
cgcgattctcagggattgatccgcctcttcaggtaagttatcttccggccccgtaccactgtgccacaggcgcagcccgcttcctcaggtgccctatcccgcgcagaagaccacggcttcacagagtgttatttaagggcgtggccagcggaacatcccgccccattctgtgacgcacggggtggcgcgcgtgggacccgaggggtggggctgggtttagtaggagacctggggcaaggccccctgtggacgaccatctgccagcttctctcgttccgtcgattgggaggagcggtggcgacctcggccttcagtgtttccgacggagtgaatggcggcggcggctgggatgctgctgctgggcttgctgcaggcgggtgggtcggtgctgggccaggcgatggagaaggtgacaggcggcaacctcttgtccatgctgctgatcgcctgcgccttcaccctcagcctggtctacctgatccgtctggccgccggccacctggtccagctgcccgcaggggtgaaaagtcctccatacattttctccccaattccattccttgggcatgccatagcatttgggaaaagtccaattgaatttctagaaaatgcatatgagaagtatggacctgtatttagttttaccatggtaggcaagacatttacttaccttctggggagtgatgctgctgcactgctttttaatagtaaaaatgaagacctgaatgcagaagatgtctacagtcgcctgacaacacctgtgtttgggaagggagttgcatacgatgtgcctaatccagttttcttggagcagaagaaaatgttaaaaagtggccttaacatagcccactttaaacagcatgtttctataattgaaaaagaaacaaaggaatactttgagagttggggagaaagtggagaaaaaaatgtgtttgaagctctttctgagctcataattttaacagctagccattgtttgcatggaaaggaaatcagaagtcaactcaatgaaaaggtagcacagctgtatgcagatttggatggaggtttcagccatgcagcctggctcttaccaggttggctgcctttgcctagtttcagacgcagggacagagctcatcgggaaatcaaggatattttctataaggcaatccagaaacgcagacagtctcaagaaaaaattgatgacattctccaaactttactagatgctacatacaaggatgggcgtcctttgactgatgatgaagtagcagggatgcttattggattactcttggcagggcagcatacatcctcaactactagtgcttggatgggcttctttttggccagagacaaaacacttcaaaaaaaatgttatttagaacagaaaacagtctgtggagagaatctgcctcctttaacttatgaccagctcaaggatctaaatttacttgatcgctgtataaaagaaacattaagacttagacctcctataatgatcatgatgagaatggccagaactcctcagactgtggcagggtataccattcctccaggacatcaggtgtgtgtttctcccactgtcaatcaaagacttaaagactcatgggtagaacgcctggactttaatcctgatcgctacttacaggataacccagcatcaggggaaaagtttgcctatgtgccatttggagctgggcgtcatcgttgtattggggaaaattttgcctatgttcaaattaagacaatttggtccactatgcttcgtttatatgaatttgatctcattgatggatactttcccactgtgaattatacaactatgattcacacccctgagaacccagttatccgttacaaacgaagatcaaaatgaaaaaggttgcaaggaacgaatatatgtgattatcactgtaagccacaaaggcattcgaagagaatgaagtgtacaaaacaactcttgtagtttactgtttttttaagtgtgtaattctaaaagccagtttatgatttaggattttgttaactgaatggttctatcaaatataatagcatttgacacattttctaatagttatgatacttatacatgtgctttcaggaagttccttggtgaaacaattgttgaggggggatctaggtaattggcagattctaaataatataatttccagatagtaattttaagagtactcatcgctcttgccaaataagttcagggtattcaaatcttggactagtcctgcaaggtataaagaataaaaatcccagtgagatacttggaaaccacagtttattattatttatctgggcaattattgtgtgtgtgaggatggaagggtagggaataatcgaacatctaaagccttgaataagagaatactaattgttttggtatgatgatactcagaaatggagatattataggaaaaagaaatcctttggaattttaactaaaatcactgcatatgggaaattaagagatccaggaccatatttgataagagttcctaaaaataatgtaattattaatgctaaagactgctcatgtatcttgatctaattactaaataaattacatatttatttacctgataaatatgtatctagttctacaaggtcacatttatgtggaagtccaaagtcaagtccttaggggataattttgttttgggctcagttgttccctgcttccttttttttttttttttttttttgagatggagtctcgctctgttgcccaggctggagtgcagtggtgcgatctcagctcactgcatcctctgcctcccgggttcaagcaattctctgcctcagcctcccaagtagttgggattacaggcacctgccaccatgcctggctaattttttgtatttttagtagagacgggggtttcactatgttggctaggctggtcttgaactcctgagcctcgtgagtccacccgccttggcctcccaaagtgctgggattacaggcatgagccaccgcacctggccttccctgcttcctctctagaatccaattagggatgtttgttactactcatattgattaaaacagttaacaaacttttttctttttaaaatgtgagatcagtgaactctggttttaagataatctgaaacaaggtccttgggagtaataaaattggtcacattctgtaaagcacattctgtttaggaatcaacttatctcaaattgtaactcggggcctaactatatgagatggctgaaaaaataccacatcgtctgttttcactaggtgatgccaaaatattttgctttatgtatattacagttctttttaaaacactggaagactcatgttaaactctaattgtgaaggcagaatctctgctaatttttcagattaaaattctctttgaaaaaat

SEQ ID NO: 883 - protein, 509 aa, Homo sapiens
MAAAAGMLLLGLLQAGGSVLGQAMEKVTGGNLLSMLLIACAFTLSLVYLIRLAAGHLVQLPAGVKSPPYIFSPIPFLGHAIAFGKSPIEFLENAYEKYGPVFSFTMVGKTFTYLLGSDAAALLFNSKNEDLNAEDVYSRLTTPVFGKGVAYDVPNPVFLEQKKMLKSGLNIAHFKQHVSIIEKETKEYFESWGESGEKNVFEALSELIILTASHCLHGKEIRSQLNEKVAQLYADLDGGFSHAAWLLPGWLPLPSFRRRDRAHREIKDIFYKAIQKRRQSQEKIDDILQTLLDATYKDGRPLTDDEVAGMLIGLLLAGQHTSSTTSAWMGFFLARDKTLQKKCYLEQKTVCGENLPPLTYDQLKDLNLLDRCIKETLRLRPPIMIMMRMARTPQTVAGYTIPPGHQVCVSPTVNQRLKDSWVERLDFNPDRYLQDNPASGEKFAYVPFGAGRHRCIGENFAYVQIKTIWSTMLRLYEFDLIDGYFPTVNYTTMIHTPENPVIRYKRRSK

SEQ ID NO: 884 - DNA, 4231 bp, Homo sapiens
atagccacggtaacggcggggtggaaagctaaggcctttgaagacctgggaccccgtagtttcgggagagggtgaggggtgaatggtgctgaggtgcgaggagagggaaggacagtaaagagcaggtttttggctttcatcgctttttctacatgtttttagcctcaccagaagtctttcatctcggtggtccaactcaggatctcagcctcattattttcttacccttctggagtgcatatgtgcctttacagtttctgtttgcaaacgctgtctagcatactaagaggatgttagcaaacctgttccatggacactaaatggcagttgtacatctcccctcatcagtcatagtgacaaccagaaatgccctccatattttccagtgatcccagcaatgggaaatccagaaaacatagaagatgcatatgttgctgttattcgtccaaagaatactgccagtctcaattctcgggaatacagagctaagtcatatgaaattttgttgcatgaagttcccattgaaggacagaaaaaaaagagaaagaaagttttattggaaacgaaacttcaaggcaacagtgaaataacacaaggcatattggattacgtagtagaaaccaccaaaccaatttctcctgcaaaccagggtatcagaggaaaacgagttgtactaatgaaaaaatttcctctggatggagagaagatgggcagagaagcatcattatttattgttccatcagttgtcaaagataatactaaatacacatataccccaggatgcccaattttttactgcttacaagatattatgcgagtctgtagtgaatccagtactcattttgctacacttacagcaaggatgttaatagccttggataagtggttagatgaacgtcatgcacaatctcactttattccagctttattccgaccttctcctcttgagcggataaaaactaatgtcataaatcctgcatatgctactgaatcaggtcagacagaaaactcactacatatgggctatagtgcactagaaataaagagtaaaatgttagccctagagaaagcagatacctgtatttacaaccctttgtttggatcagatcttcagtatacaaatcgggtagataaagtggtaataaatccatactttggtctaggagctccagactactcaaaaatccaaatacctaaacaggaaaaatggcagagaagcatgagcagtgtcacagaagacaagtatggaaaagttgaggccactcgcatattgttagagaaaggaaagtgcaatccaaaccttttaaatggacaacttagttctcctcttcattttgctgctggaggaggacatgctgaaatagtacagattctcctaaaccacccagaaacggatagacatataacagaccaacaaggaagatctccattaaatatttgtgaagaaaacaaacaaaacaactgggaagaagctgcaaaattgttgaaggaagcaattaacaaaccatatgaaaaagttcgaatatacagaatggatgggtcatatcgttctgttgaattgaagcatggaaataataccacagtgcagcagataatggaaggaatgcgtctctctcaagaaactcagcaatatttcactatatggatttgttcagaaaacctcagccttcaactcaaaccatatcataaacccttgcaacatgttcgtgactggccagaaatacttgctgaattgactaatctggatcctcaaagggaaacacctcagctttttctaagaagagatgtgagacttcccttggaagttgaaaaacagattgaagacccactagctattcttattctctttgatgaagccagatataatttattgaagggcttttatacagctcctgatgctaagctgataacattggcaagtctgcttttgcaaatagtctatggaaattatgagagtaaaaaacacaagcaaggtttcctaaatgaagaaaatctaaaatccatcgtacctgttaccaaactgaaaagtaaggcacctcactggacaaatcgcatacttcatgaatacaagaatctcagtacaagtgaaggtgtcagtaaagaaatgcatcaccttcagcgcatgttcttacagaattgctgggaaattcctacttatggagcagcatttttcacaggacagatatttacaaaggcaagccccagcaatcataaagtcatccctgtgtatgtaggagtgaatataaaaggacttcatctcctcaacatggaaactaaggctttactcatcagtcttaagtatggttgttttatgtggcaattgggagatactgatacttgttttcagatccatagcatggaaaataaaatgagctttatagtacatacaaaacaggctggtctcgtggtaaaactgttaatgaagctaaatggacagttaatgcccactgaaagaaattcatgaaagagaagtaactgttactcaagccaccacattttgtaatgcagagttttttttccgtgaaagatttcttaaaatattacttttggccgagcatggtggctcacccctgtaattccagcactttgggaggctggggcaggcggatcacctgaagtcagagttcaagaccagcctggccaacatggtgaaaccctgtctctacaaaaatacaaaaattagctgggtgtggtggcgggcgcctataatcctagctactagggaggccaaggtgggagatcgcttaaacccaggaggtggaggttgtagtgagccaagattgcaccacggcacgctagcctgggtgacacagcaagactccatctcaaaaaaaaaaaaaaattactttcaacaaggcatatagtctcttgtaatatatatgtatactattacattgtacagaatctgtacttatgtttggtgtgtaatataccaattagttttatataatatcctcataagctattctaatttttgagagaaacacaaaaagttatagattgatagtctgtataatattagacaaaatagtaagctttataaaaagttatttttggtaaatggtaaggaatttggggtggaatgtgatgagattaaaatgtagctttggtataacttcatgtgtatttcaaaatatactgaacgtcaacatgatttgaataaagaaaatgtattttctacttgaaccacataacactgttatttaaaacagttttctgcagtctataaacatttctcaacatttttttaaaagtcttagttaaaatgtaaatctgatatacagtagtgtttctcaaagtatagttcatgaactccttgcatcataattacctagatgcctcttaaaaatgaagatttcagagacccattctaaacaagggcattcactctctggaagtagcatggccttgtgaacttaaatttggttttgttttttcttttttgctgttagaataatttcagacccaataaggaatttcgattattaaagttgagaaatttcacaaaactgcctggcacacaagcacacacatacatagacacattttaagtgataatctcttgatattagaagttgcatttgttaaatacatgctgtattttttatgagttgacttaatagtttatgtatattgactttgctttgtaggaagtaaatcaccagatatcttattgtttcatttaggaaagtagtgatatagatgaagagccaacttgatgaatgtgctattcataagctagaaactacagtttttccaaactaataaactgatgaattctaaataagttcagagatatagtcatatttaaagttgtcctacagtttgcagataatttttatattactattcttcacattaacttctgcttatttttaatggtactatatgtaggccttattaaaattaagattgtatggttaagtaaagttaacaagaaagcctgatttatctttaattctgtgctaggtacttttgattctacatgaacaatacccttttcagttcccttcattctaatgtcctcaactgttaccaaataccctgttgactcccaaacctaagattttagcctcaacttcttttctgaacttcaaatcttaatttccaagttatacttgttctaggtccatctaaatggtctacagagaacttcagttgaatcatagctggaaacagaatttatttcctctatttgcttcattctgtccttccactatattccctattt

SEQ ID NO: 885 - protein, 688 aa, Homo sapiens
MGNPENIEDAYVAVIRPKNTASLNSREYRAKSYEILLHEVPIEGQKKKRKKVLLETKLQGNSEITQGILDYVVETTKPISPANQGIRGKRVVLMKKFPLDGEKMGREASLFIVPSVVKDNTKYTYTPGCPIFYCLQDIMRVCSESSTHFATLTARMLIALDKWLDERHAQSHFIPALFRPSPLERIKTNVINPAYATESGQTENSLHMGYSALEIKSKMLALEKADTCIYNPLFGSDLQYTNRVDKVVINPYFGLGAPDYSKIQIPKQEKWQRSMSSVTEDKYGKVEATRILLEKGKCNPNLLNGQLSSPLHFAAGGGHAEIVQILLNHPETDRHITDQQGRSPLNICEENKQNNWEEAAKLLKEAINKPYEKVRIYRMDGSYRSVELKHGNNTTVQQIMEGMRLSQETQQYFTIWICSENLSLQLKPYHKPLQHVRDWPEILAELTNLDPQRETPQLFLRRDVRLPLEVEKQIEDPLAILILFDEARYNLLKGFYTAPDAKLITLASLLLQIVYGNYESKKHKQGFLNEENLKSIVPVTKLKSKAPHWTNRILHEYKNLSTSEGVSKEMHHLQRMFLQNCWEIPTYGAAFFTGQIFTKASPSNHKVIPVYVGVNIKGLHLLNMETKALLISLKYGCFMWQLGDTDTCFQIHSMENKMSFIVHTKQAGLVVKLLMKLNGQLMPTERNS

SEQ ID NO: 886 - DNA, 4870 bp, Homo sapiens
cggggtggaaagctaaggcctttgaagacctgggaccccgtagtttcgggagagggtgaggggtgaatggtgctgaggtgcgaggagagggaaggacagtaaagagcaggtgggcaggagggtctccgactccagagacctgagcttttggggcgcgggtgggagcgcgggggaaccctcaagacggctttcttttggcgactgagggtttttctgccacaggaagctgggccgggctgctgtgcctgggaggagggaaggaggaatgagaaagcggtgacggtccctgccccccctcgccaggtgactgtcccacccatttagttgaatgtagcggccagagaggcactcgcggcagcccgtacgggtgggacctctcggtgtccttcgggaaacaggaggagcaagttcgactccagcgagggaaaacggaggtgggagactgaaccatctccacatctagttgccccaggtttttggctttcatcgctttttctacatgtttttagcctcaccagaagtctttcatctcggtggtccaactcaggatctcagcctcattattttcttacccttctggagtgcatatgtgcctttacagtttctgtttgcaaacgctgtctagcatactaagaggatgttagcaaacctgttccatggacactaaatggcagttgtacatctcccctcatcagtcatagtgacaaccagaaatgccctccatattttccagtgatcccagtcttcaatgcgtctgtctcataatttgtaaacgtttattatcttgaagtcattgttaatctgtggtgaaaagtaattgctaaatagaaattctgagaagaaaaaggcctcatccttttcacatgatgtaggaaggtctgttgcatgagcaatgggaaatccagaaaacatagaagatgcatatgttgctgttattcgtccaaagaatactgccagtctcaattctcgggaatacagagctaagtcatatgaaattttgttgcatgaagttcccattgaaggacagaaaaaaaagagaaagaaagttttattggaaacgaaacttcaaggcaacagtgaaataacacaaggcatattggattacgtagtagaaaccaccaaaccaatttctcctgcaaaccagggtatcagaggaaaacgagttgtactaatgaaaaaatttcctctggatggagagaagatgggcagagaagcatcattatttattgttccatcagttgtcaaagataatactaaatacacatataccccaggatgcccaattttttactgcttacaagatattatgcgagtctgtagtgaatccagtactcattttgctacacttacagcaaggatgttaatagccttggataagtggttagatgaacgtcatgcacaatctcactttattccagctttattccgaccttctcctcttgagcggataaaaactaatgtcataaatcctgcatatgctactgaatcaggtcagacagaaaactcactacatatgggctatagtgcactagaaataaagagtaaaatgttagccctagagaaagcagatacctgtatttacaaccctttgtttggatcagatcttcagtatacaaatcgggtagataaagtggtaataaatccatactttggtctaggagctccagactactcaaaaatccaaatacctaaacaggaaaaatggcagagaagcatgagcagtgtcacagaagacaaggaacgacagtgggtagatgattttcctctccaccgaagcgcctgtgaaggagattcagaattactaagccgtcttctcagtgaaagattttcagtcaaccagttagatagtgaccactgggcacccattcattatgcatgctggtatggaaaagttgaggccactcgcatattgttagagaaaggaaagtgcaatccaaaccttttaaatggacaacttagttctcctcttcattttgctgctggaggaggacatgctgaaatagtacagattctcctaaaccacccagaaacggatagacatataacagaccaacaaggaagatctccattaaatatttgtgaagaaaacaaacaaaacaactgggaagaagctgcaaaattgttgaaggaagcaattaacaaaccatatgaaaaagttcgaatatacagaatggatgggtcatatcgttctgttgaattgaagcatggaaataataccacagtgcagcagataatggaaggaatgcgtctctctcaagaaactcagcaatatttcactatatggatttgttcagaaaacctcagccttcaactcaaaccatatcataaacccttgcaacatgttcgtgactggccagaaatacttgctgaattgactaatctggatcctcaaagggaaacacctcagctttttctaagaagagatgtgagacttcccttggaagttgaaaaacagattgaagacccactagctattcttattctctttgatgaagccagatataatttattgaagggcttttatacagctcctgatgctaagctgataacattggcaagtctgcttttgcaaatagtctatggaaattatgagagtaaaaaacacaagcaaggtttcctaaatgaagaaaatctaaaatccatcgtacctgttaccaaactgaaaagtaaggcacctcactggacaaatcgcatacttcatgaatacaagaatctcagtacaagtgaaggtgtcagtaaagaaatgcatcaccttcagcgcatgttcttacagaattgctgggaaattcctacttatggagcagcatttttcacaggacagatatttacaaaggcaagccccagcaatcataaagtcatccctgtgtatgtaggagtgaatataaaaggacttcatctcctcaacatggaaactaaggctttactcatcagtcttaagtatggttgttttatgtggcaattgggagatactgatacttgttttcagatccatagcatggaaaataaaatgagctttatagtacatacaaaacaggctggtctcgtggtaaaactgttaatgaagctaaatggacagttaatgcccactgaaagaaattcatgaaagagaagtaactgttactcaagccaccacattttgtaatgcagagttttttttccgtgaaagatttcttaaaatattacttttggccgagcatggtggctcacccctgtaattccagcactttgggaggctggggcaggcggatcacctgaagtcagagttcaagaccagcctggccaacatggtgaaaccctgtctctacaaaaatacaaaaattagctgggtgtggtggcgggcgcctataatcctagctactagggaggccaaggtgggagatcgcttaaacccaggaggtggaggttgtagtgagccaagattgcaccacggcacgctagcctgggtgacacagcaagactccatctcaaaaaaaaaaaaaaattactttcaacaaggcatatagtctcttgtaatatatatgtatactattacattgtacagaatctgtacttatgtttggtgtgtaatataccaattagttttatataatatcctcataagctattctaatttttgagagaaacacaaaaagttatagattgatagtctgtataatattagacaaaatagtaagctttataaaaagttatttttggtaaatggtaaggaatttggggtggaatgtgatgagattaaaatgtagctttggtataacttcatgtgtatttcaaaatatactgaacgtcaacatgatttgaataaagaaaatgtattttctacttgaaccacataacactgttatttaaaacagttttctgcagtctataaacatttctcaacatttttttaaaagtcttagttaaaatgtaaatctgatatacagtagtgtttctcaaagtatagttcatgaactccttgcatcataattacctagatgcctcttaaaaatgaagatttcagagacccattctaaacaagggcattcactctctggaagtagcatggccttgtgaacttaaatttggttttgttttttcttttttgctgttagaataatttcagacccaataaggaatttcgattattaaagttgagaaatttcacaaaactgcctggcacacaagcacacacatacatagacacattttaagtgataatctcttgatattagaagttgcatttgttaaatacatgctgtattttttatgagttgacttaatagtttatgtatattgactttgctttgtaggaagtaaatcaccagatatcttattgtttcatttaggaaagtagtgatatagatgaagagccaacttgatgaatgtgctattcataagctagaaactacagtttttccaaactaataaactgatgaattctaaataagttcagagatatagtcatatttaaagttgtcctacagtttgcagataatttttatattactattcttcacattaacttctgcttatttttaatggtactatatgtaggccttattaaaattaagattgtatggttaagtaaagttaacaagaaagcctgatttatctttaattctgtgctaggtacttttgattctacatgaacaatacccttttcagttcccttcattctaatgtcctcaactgttaccaaataccctgttgactcccaaacctaagattttagcctcaacttcttttctgaacttcaaatcttaatttccaagttatacttgttctaggtccatctaaatggtctacagagaacttcagttgaatcatagctggaaacagaatttatttcctctatttgcttcattctgtccttccactatattccctattt

SEQ ID NO: 887 - protein, 736 aa, Homo sapiens
MGNPENIEDAYVAVIRPKNTASLNSREYRAKSYEILLHEVPIEGQKKKRKKVLLETKLQGNSEITQGILDYVVETTKPISPANQGIRGKRVVLMKKFPLDGEKMGREASLFIVPSVVKDNTKYTYTPGCPIFYCLQDIMRVCSESSTHFATLTARMLIALDKWLDERHAQSHFIPALFRPSPLERIKTNVINPAYATESGQTENSLHMGYSALEIKSKMLALEKADTCIYNPLFGSDLQYTNRVDKVVINPYFGLGAPDYSKIQIPKQEKWQRSMSSVTEDKERQWVDDFPLHRSACEGDSELLSRLLSERFSVNQLDSDHWAPIHYACWYGKVEATRILLEKGKCNPNLLNGQLSSPLHFAAGGGHAEIVQILLNHPETDRHITDQQGRSPLNICEENKQNNWEEAAKLLKEAINKPYEKVRIYRMDGSYRSVELKHGNNTTVQQIMEGMRLSQETQQYFTIWICSENLSLQLKPYHKPLQHVRDWPEILAELTNLDPQRETPQLFLRRDVRLPLEVEKQIEDPLAILILFDEARYNLLKGFYTAPDAKLITLASLLLQIVYGNYESKKHKQGFLNEENLKSIVPVTKLKSKAPHWTNRILHEYKNLSTSEGVSKEMHHLQRMFLQNCWEIPTYGAAFFTGQIFTKASPSNHKVIPVYVGVNIKGLHLLNMETKALLISLKYGCFMWQLGDTDTCFQIHSMENKMSFIVHTKQAGLVVKLLMKLNGQLMPTERNS

SEQ ID NO: 888 - DNA, 4523 bp, Homo sapiens
atagccacggtaacggcggggtggaaagctaaggcctttgaagacctgggaccccgtagtttcgggagagggtgaggggtgaatggtgctgaggtgcgaggagagggaaggacagtaaagagcaggtttttggctttcatcgctttttctacatgtttttagcctcaccagaagtctttcatctcggtggtccaactcaggatctcagcctcattattttcttacccttctggagtgcatatgtgcctttacagtttctgtttgcaaacgctgtctagcatactaagaggatgttagcaaacctgttccatggacactaaatggcagttgtacatctcccctcatcagtcatagtgacaaccagaaatgccctccatattttccagtgatcccagtcttcaatgcgtctgtctcataatttgtaaacgtttattatcttgaagtcattgttaatctgtggtgaaaagtaattgctaaatagaaattctgagaagaaaaaggcctcatccttttcacatgatgtaggaaggtctgttgcatgagcaatgggaaatccagaaaacatagaagatgcatatgttgctgttattcgtccaaagaatactgccagtctcaattctcgggaatacagagctaagtcatatgaaattttgttgcatgaagttcccattgaaggacagaaaaaaaagagaaagaaagttttattggaaacgaaacttcaaggcaacagtgaaataacacaaggcatattggattacgtagtagaaaccaccaaaccaatttctcctgcaaaccagggtatcagaggaaaacgagttgtactaatgaaaaaatttcctctggatggagagaagatgggcagagaagcatcattatttattgttccatcagttgtcaaagataatactaaatacacatataccccaggatgcccaattttttactgcttacaagatattatgcgagtctgtagtgaatccagtactcattttgctacacttacagcaaggatgttaatagccttggataagtggttagatgaacgtcatgcacaatctcactttattccagctttattccgaccttctcctcttgagcggataaaaactaatgtcataaatcctgcatatgctactgaatcaggtcagacagaaaactcactacatatgggctatagtgcactagaaataaagagtaaaatgttagccctagagaaagcagatacctgtatttacaaccctttgtttggatcagatcttcagtatacaaatcgggtagataaagtggtaataaatccatactttggtctaggagctccagactactcaaaaatccaaatacctaaacaggaaaaatggcagagaagcatgagcagtgtcacagaagacaaggaacgacagtgggtagatgattttcctctccaccgaagcgcctgtgaaggagattcagaattactaagccgtcttctcagtgaaagattttcagtcaaccagttagatagtgaccactgggcacccattcattatgcatgctggtatggaaaagttgaggccactcgcatattgttagagaaaggaaagtgcaatccaaaccttttaaatggacaacttagttctcctcttcattttgctgctggaggaggacatgctgaaatagtacagattctcctaaaccacccagaaacggatagacatataacagaccaacaaggaagatctccattaaatatttgtgaagaaaacaaacaaaacaactgggaagaagctgcaaaattgttgaaggaagcaattaacaaaccatatgaaaaagttcgaatatacagaatggatgggtcatatcgttctgttgaattgaagcatggaaataataccacagtgcagcagataatggaaggaatgcgtctctctcaagaaactcagcaatatttcactatatggatttgttcagaaaacctcagccttcaactcaaaccatatcataaacccttgcaacatgttcgtgactggccagaaatacttgctgaattgactaatctggatcctcaaagggaaacacctcagctttttctaagaagagatgtgagacttcccttggaagttgaaaaacagattgaagacccactagctattcttattctctttgatgaagccagatataatttattgaagggcttttatacagctcctgatgctaagctgataacattggcaagtctgcttttgcaaatagtctatggaaattatgagagtaaaaaacacaagcaaggtttcctaaatgaagaaaatctaaaatccatcgtacctgttaccaaactgaaaagtaaggcacctcactggacaaatcgcatacttcatgaatacaagaatctcagtacaagtgaaggtgtcagtaaagaaatgcatcaccttcagcgcatgttcttacagaattgctgggaaattcctacttatggagcagcatttttcacaggacagatatttacaaaggcaagccccagcaatcataaagtcatccctgtgtatgtaggagtgaatataaaaggacttcatctcctcaacatggaaactaaggctttactcatcagtcttaagtatggttgttttatgtggcaattgggagatactgatacttgttttcagatccatagcatggaaaataaaatgagctttatagtacatacaaaacaggctggtctcgtggtaaaactgttaatgaagctaaatggacagttaatgcccactgaaagaaattcatgaaagagaagtaactgttactcaagccaccacattttgtaatgcagagttttttttccgtgaaagatttcttaaaatattacttttggccgagcatggtggctcacccctgtaattccagcactttgggaggctggggcaggcggatcacctgaagtcagagttcaagaccagcctggccaacatggtgaaaccctgtctctacaaaaatacaaaaattagctgggtgtggtggcgggcgcctataatcctagctactagggaggccaaggtgggagatcgcttaaacccaggaggtggaggttgtagtgagccaagattgcaccacggcacgctagcctgggtgacacagcaagactccatctcaaaaaaaaaaaaaaattactttcaacaaggcatatagtctcttgtaatatatatgtatactattacattgtacagaatctgtacttatgtttggtgtgtaatataccaattagttttatataatatcctcataagctattctaatttttgagagaaacacaaaaagttatagattgatagtctgtataatattagacaaaatagtaagctttataaaaagttatttttggtaaatggtaaggaatttggggtggaatgtgatgagattaaaatgtagctttggtataacttcatgtgtatttcaaaatatactgaacgtcaacatgatttgaataaagaaaatgtattttctacttgaaccacataacactgttatttaaaacagttttctgcagtctataaacatttctcaacatttttttaaaagtcttagttaaaatgtaaatctgatatacagtagtgtttctcaaagtatagttcatgaactccttgcatcataattacctagatgcctcttaaaaatgaagatttcagagacccattctaaacaagggcattcactctctggaagtagcatggccttgtgaacttaaatttggttttgttttttcttttttgctgttagaataatttcagacccaataaggaatttcgattattaaagttgagaaatttcacaaaactgcctggcacacaagcacacacatacatagacacattttaagtgataatctcttgatattagaagttgcatttgttaaatacatgctgtattttttatgagttgacttaatagtttatgtatattgactttgctttgtaggaagtaaatcaccagatatcttattgtttcatttaggaaagtagtgatatagatgaagagccaacttgatgaatgtgctattcataagctagaaactacagtttttccaaactaataaactgatgaattctaaataagttcagagatatagtcatatttaaagttgtcctacagtttgcagataatttttatattactattcttcacattaacttctgcttatttttaatggtactatatgtaggccttattaaaattaagattgtatggttaagtaaagttaacaagaaagcctgatttatctttaattctgtgctaggtacttttgattctacatgaacaatacccttttcagttcccttcattctaatgtcctcaactgttaccaaataccctgttgactcccaaacctaagattttagcctcaacttcttttctgaacttcaaatcttaatttccaagttatacttgttctaggtccatctaaatggtctacagagaacttcagttgaatcatagctggaaacagaatttatttcctctatttgcttcattctgtccttccactatattccctattt

SEQ ID NO: 889 - protein, 736 aa, Homo sapiens; identical to SEQ ID NO: 887

SEQ ID NO: 890 - DNA, 4997 bp, Homo sapiens
gctccggctcagccgctggcacccccaccgccaccaccctagtctcctagtcgcctgccaccagcccctgagagactgcaggtccagtgaaaaggagcaggaacggcagcagcccggccgccgacccggaagctctttcaccgccaaccgcgaggctgcaaagggtgtgaacccggaagcgatttcatagccacggtaacggcggggtggaaagctaaggcctttgaagacctgggaccccgtagtttcgggagagggtgaggggtgaatggtgctgaggtgcgaggagagggaaggacagtaaagagcaggtgggcaggagggtctccgactccagagacctgagcttttggggcgcgggtgggagcgcgggggaaccctcaagacggctttcttttggcgactgagggtttttctgccacaggaagctgggccgggctgctgtgcctgggaggagggaaggaggaatgagaaagcggtgacggtccctgccccccctcgccaggtgactgtcccacccatttagttgaatgtagcggccagagaggcactcgcggcagcccgtacgggtgggacctctcggtgtccttcgggaaacaggaggagcaagttcgactccagcgagggaaaacggagcctcaccagaagtctttcatctcggtggtccaactcaggatctcagcctcattattttcttacccttctggagtgcatatgtgcctttacagtttctgtttgcaaacgctgtctagcatactaagaggatgttagcaaacctgttccatggacactaaatggcagttgtacatctcccctcatcagtcatagtgacaaccagaaatgccctccatattttccagtgatcccagtcttcaatgcgtctgtctcataatttgtaaacgtttattatcttgaagtcattgttaatctgtggtgaaaagtaattgctaaatagaaattctgagaagaaaaaggcctcatccttttcacatgatgtaggaaggtctgttgcatgagcaatgggaaatccagaaaacatagaagatgcatatgttgctgttattcgtccaaagaatactgccagtctcaattctcgggaatacagagctaagtcatatgaaattttgttgcatgaagttcccattgaaggacagaaaaaaaagagaaagaaagttttattggaaacgaaacttcaaggcaacagtgaaataacacaaggcatattggattacgtagtagaaaccaccaaaccaatttctcctgcaaaccagggtatcagaggaaaacgagttgtactaatgaaaaaatttcctctggatggagagaagatgggcagagaagcatcattatttattgttccatcagttgtcaaagataatactaaatacacatataccccaggatgcccaattttttactgcttacaagatattatgcgagtctgtagtgaatccagtactcattttgctacacttacagcaaggatgttaatagccttggataagtggttagatgaacgtcatgcacaatctcactttattccagctttattccgaccttctcctcttgagcggataaaaactaatgtcataaatcctgcatatgctactgaatcaggtcagacagaaaactcactacatatgggctatagtgcactagaaataaagagtaaaatgttagccctagagaaagcagatacctgtatttacaaccctttgtttggatcagatcttcagtatacaaatcgggtagataaagtggtaataaatccatactttggtctaggagctccagactactcaaaaatccaaatacctaaacaggaaaaatggcagagaagcatgagcagtgtcacagaagacaaggaacgacagtgggtagatgattttcctctccaccgaagcgcctgtgaaggagattcagaattactaagccgtcttctcagtgaaagattttcagtcaaccagttagatagtgaccactgggcacccattcattatgcatgctggtatggaaaagttgaggccactcgcatattgttagagaaaggaaagtgcaatccaaaccttttaaatggacaacttagttctcctcttcattttgctgctggaggaggacatgctgaaatagtacagattctcctaaaccacccagaaacggatagacatataacagaccaacaaggaagatctccattaaatatttgtgaagaaaacaaacaaaacaactgggaagaagctgcaaaattgttgaaggaagcaattaacaaaccatatgaaaaagttcgaatatacagaatggatgggtcatatcgttctgttgaattgaagcatggaaataataccacagtgcagcagataatggaaggaatgcgtctctctcaagaaactcagcaatatttcactatatggatttgttcagaaaacctcagccttcaactcaaaccatatcataaacccttgcaacatgttcgtgactggccagaaatacttgctgaattgactaatctggatcctcaaagggaaacacctcagctttttctaagaagagatgtgagacttcccttggaagttgaaaaacagattgaagacccactagctattcttattctctttgatgaagccagatataatttattgaagggcttttatacagctcctgatgctaagctgataacattggcaagtctgcttttgcaaatagtctatggaaattatgagagtaaaaaacacaagcaaggtttcctaaatgaagaaaatctaaaatccatcgtacctgttaccaaactgaaaagtaaggcacctcactggacaaatcgcatacttcatgaatacaagaatctcagtacaagtgaaggtgtcagtaaagaaatgcatcaccttcagcgcatgttcttacagaattgctgggaaattcctacttatggagcagcatttttcacaggacagatatttacaaaggcaagccccagcaatcataaagtcatccctgtgtatgtaggagtgaatataaaaggacttcatctcctcaacatggaaactaaggctttactcatcagtcttaagtatggttgttttatgtggcaattgggagatactgatacttgttttcagatccatagcatggaaaataaaatgagctttatagtacatacaaaacaggctggtctcgtggtaaaactgttaatgaagctaaatggacagttaatgcccactgaaagaaattcatgaaagagaagtaactgttactcaagccaccacattttgtaatgcagagttttttttccgtgaaagatttcttaaaatattacttttggccgagcatggtggctcacccctgtaattccagcactttgggaggctggggcaggcggatcacctgaagtcagagttcaagaccagcctggccaacatggtgaaaccctgtctctacaaaaatacaaaaattagctgggtgtggtggcgggcgcctataatcctagctactagggaggccaaggtgggagatcgcttaaacccaggaggtggaggttgtagtgagccaagattgcaccacggcacgctagcctgggtgacacagcaagactccatctcaaaaaaaaaaaaaaattactttcaacaaggcatatagtctcttgtaatatatatgtatactattacattgtacagaatctgtacttatgtttggtgtgtaatataccaattagttttatataatatcctcataagctattctaatttttgagagaaacacaaaaagttatagattgatagtctgtataatattagacaaaatagtaagctttataaaaagttatttttggtaaatggtaaggaatttggggtggaatgtgatgagattaaaatgtagctttggtataacttcatgtgtatttcaaaatatactgaacgtcaacatgatttgaataaagaaaatgtattttctacttgaaccacataacactgttatttaaaacagttttctgcagtctataaacatttctcaacatttttttaaaagtcttagttaaaatgtaaatctgatatacagtagtgtttctcaaagtatagttcatgaactccttgcatcataattacctagatgcctcttaaaaatgaagatttcagagacccattctaaacaagggcattcactctctggaagtagcatggccttgtgaacttaaatttggttttgttttttcttttttgctgttagaataatttcagacccaataaggaatttcgattattaaagttgagaaatttcacaaaactgcctggcacacaagcacacacatacatagacacattttaagtgataatctcttgatattagaagttgcatttgttaaatacatgctgtattttttatgagttgacttaatagtttatgtatattgactttgctttgtaggaagtaaatcaccagatatcttattgtttcatttaggaaagtagtgatatagatgaagagccaacttgatgaatgtgctattcataagctagaaactacagtttttccaaactaataaactgatgaattctaaataagttcagagatatagtcatatttaaagttgtcctacagtttgcagataatttttatattactattcttcacattaacttctgcttatttttaatggtactatatgtaggccttattaaaattaagattgtatggttaagtaaagttaacaagaaagcctgatttatctttaattctgtgctaggtacttttgattctacatgaacaatacccttttcagttcccttcattctaatgtcctcaactgttaccaaataccctgttgactcccaaacctaagattttagcctcaacttcttttctgaacttcaaatcttaatttccaagttatacttgttctaggtccatctaaatggtctacagagaacttcagttgaatcatagctggaaacagaatttatttcctctatttgcttcattctgtccttccactatattccctattt

SEQ ID NO: 891 - protein, 736 aa, Homo sapiens; identical to SEQ ID NO: 887

SEQ ID NO: 892 - DNA, 4762 bp, Homo sapiens
gctccggctcagccgctggcacccccaccgccaccaccctagtctcctagtcgcctgccaccagcccctgagagactgcaggtccagtgaaaaggagcaggaacggcagcagcccggccgccgacccggaagctctttcaccgccaaccgcgaggctgcaaagggtgtgaacccggaagcgatttcatagccacggtgactgtcccacccatttagttgaatgtagcggccagagaggcactcgcggcagcccgtacgggtgggacctctcggtgtccttcgggaaacaggaggagcaagttcgactccagcgagggaaaacggaggtgggagactgaaccatctccacatctagttgccccaggtttttggctttcatcgctttttctacatgtttttagcctcaccagaagtctttcatctcggtggtccaactcaggatctcagcctcattattttcttacccttctggagtgcatatgtgcctttacagtttctgtttgcaaacgctgtctagcatactaagaggatgttagcaaacctgttccatggacactaaatggcagttgtacatctcccctcatcagtcatagtgacaaccagaaatgccctccatattttccagtgatcccagtcttcaatgcgtctgtctcataatttgtaaacgtttattatcttgaagtcattgttaatctgtggtgaaaagtaattgctaaatagaaattctgagaagaaaaaggcctcatccttttcacatgatgtaggaaggtctgttgcatgagcaatgggaaatccagaaaacatagaagatgcatatgttgctgttattcgtccaaagaatactgccagtctcaattctcgggaatacagagctaagtcatatgaaattttgttgcatgaagttcccattgaaggacagaaaaaaaagagaaagaaagttttattggaaacgaaacttcaaggcaacagtgaaataacacaaggcatattggattacgtagtagaaaccaccaaaccaatttctcctgcaaaccagggtatcagaggaaaacgagttgtactaatgaaaaaatttcctctggatggagagaagatgggcagagaagcatcattatttattgttccatcagttgtcaaagataatactaaatacacatataccccaggatgcccaattttttactgcttacaagatattatgcgagtctgtagtgaatccagtactcattttgctacacttacagcaaggatgttaatagccttggataagtggttagatgaacgtcatgcacaatctcactttattccagctttattccgaccttctcctcttgagcggataaaaactaatgtcataaatcctgcatatgctactgaatcaggtcagacagaaaactcactacatatgggctatagtgcactagaaataaagagtaaaatgttagccctagagaaagcagatacctgtatttacaaccctttgtttggatcagatcttcagtatacaaatcgggtagataaagtggtaataaatccatactttggtctaggagctccagactactcaaaaatccaaatacctaaacaggaaaaatggcagagaagcatgagcagtgtcacagaagacaaggaacgacagtgggtagatgattttcctctccaccgaagcgcctgtgaaggagattcagaattactaagccgtcttctcagtgaaagattttcagtcaaccagttagatagtgaccactgggcacccattcattatgcatgctggtatggaaaagttgaggccactcgcatattgttagagaaaggaaagtgcaatccaaaccttttaaatggacaacttagttctcctcttcattttgctgctggaggaggacatgctgaaatagtacagattctcctaaaccacccagaaacggatagacatataacagaccaacaaggaagatctccattaaatatttgtgaagaaaacaaacaaaacaactgggaagaagctgcaaaattgttgaaggaagcaattaacaaaccatatgaaaaagttcgaatatacagaatggatgggtcatatcgttctgttgaattgaagcatggaaataataccacagtgcagcagataatggaaggaatgcgtctctctcaagaaactcagcaatatttcactatatggatttgttcagaaaacctcagccttcaactcaaaccatatcataaacccttgcaacatgttcgtgactggccagaaatacttgctgaattgactaatctggatcctcaaagggaaacacctcagctttttctaagaagagatgtgagacttcccttggaagttgaaaaacagattgaagacccactagctattcttattctctttgatgaagccagatataatttattgaagggcttttatacagctcctgatgctaagctgataacattggcaagtctgcttttgcaaatagtctatggaaattatgagagtaaaaaacacaagcaaggtttcctaaatgaagaaaatctaaaatccatcgtacctgttaccaaactgaaaagtaaggcacctcactggacaaatcgcatacttcatgaatacaagaatctcagtacaagtgaaggtgtcagtaaagaaatgcatcaccttcagcgcatgttcttacagaattgctgggaaattcctacttatggagcagcatttttcacaggacagatatttacaaaggcaagccccagcaatcataaagtcatccctgtgtatgtaggagtgaatataaaaggacttcatctcctcaacatggaaactaaggctttactcatcagtcttaagtatggttgttttatgtggcaattgggagatactgatacttgttttcagatccatagcatggaaaataaaatgagctttatagtacatacaaaacaggctggtctcgtggtaaaactgttaatgaagctaaatggacagttaatgcccactgaaagaaattcatgaaagagaagtaactgttactcaagccaccacattttgtaatgcagagttttttttccgtgaaagatttcttaaaatattacttttggccgagcatggtggctcacccctgtaattccagcactttgggaggctggggcaggcggatcacctgaagtcagagttcaagaccagcctggccaacatggtgaaaccctgtctctacaaaaatacaaaaattagctgggtgtggtggcgggcgcctataatcctagctactagggaggccaaggtgggagatcgcttaaacccaggaggtggaggttgtagtgagccaagattgcaccacggcacgctagcctgggtgacacagcaagactccatctcaaaaaaaaaaaaaaattactttcaacaaggcatatagtctcttgtaatatatatgtatactattacattgtacagaatctgtacttatgtttggtgtgtaatataccaattagttttatataatatcctcataagctattctaatttttgagagaaacacaaaaagttatagattgatagtctgtataatattagacaaaatagtaagctttataaaaagttatttttggtaaatggtaaggaatttggggtggaatgtgatgagattaaaatgtagctttggtataacttcatgtgtatttcaaaatatactgaacgtcaacatgatttgaataaagaaaatgtattttctacttgaaccacataacactgttatttaaaacagttttctgcagtctataaacatttctcaacatttttttaaaagtcttagttaaaatgtaaatctgatatacagtagtgtttctcaaagtatagttcatgaactccttgcatcataattacctagatgcctcttaaaaatgaagatttcagagacccattctaaacaagggcattcactctctggaagtagcatggccttgtgaacttaaatttggttttgttttttcttttttgctgttagaataatttcagacccaataaggaatttcgattattaaagttgagaaatttcacaaaactgcctggcacacaagcacacacatacatagacacattttaagtgataatctcttgatattagaagttgcatttgttaaatacatgctgtattttttatgagttgacttaatagtttatgtatattgactttgctttgtaggaagtaaatcaccagatatcttattgtttcatttaggaaagtagtgatatagatgaagagccaacttgatgaatgtgctattcataagctagaaactacagtttttccaaactaataaactgatgaattctaaataagttcagagatatagtcatatttaaagttgtcctacagtttgcagataatttttatattactattcttcacattaacttctgcttatttttaatggtactatatgtaggccttattaaaattaagattgtatggttaagtaaagttaacaagaaagcctgatttatctttaattctgtgctaggtacttttgattctacatgaacaatacccttttcagttcccttcattctaatgtcctcaactgttaccaaataccctgttgactcccaaacctaagattttagcctcaacttcttttctgaacttcaaatcttaatttccaagttatacttgttctaggtccatctaaatggtctacagagaacttcagttgaatcatagctggaaacagaatttatttcctctatttgcttcattctgtccttccactatattccctattt

SEQ ID NO: 893 - protein, 736 aa, Homo sapiens; identical to SEQ ID NO: 887

SEQ ID NO: 894 - DNA, 6505 bp, Homo sapiens
atgtggagatggttcagtctcccacctccgttttccctcgctggagtcgaacttgctcctcctgtttcccgaaggacaccgagaggtcccacccgtacgggctgccgcgagtgcctctctggccgctacattcaactaaatgggtgggacagtcacctggcgagggggggcagggaccgtcaccgctttctcattcctccttccctcctcccaggcacagcagcccggcccagcttcctgtggcagaaaaaccctcagtcgccaaaagaaagccgtcttgagggttcccccgcgctcccacccgcgccccaaaagctcaggtctctggagtcggagaccctcctgcccacctgctctttactgtccttccctctcctcgcacctcagcaccattcacccctcaccctctcccgaaactacggggtcccagcggccggagagggatggggggcgcccacccagtctgagcctcgccgcgggcgccttcggctcacgcagcgcttcccgcgggccgccagtgcgcaccctcggccacatcagcctccgcctggcgggtgcacccgggccggcgaggaaggggcaaccgtccgggtgggtggggcgggctgggtacctgaggtcaccagctcggctgtagaggcaggggcggcggaggcggaactgcggagttgctgggtccaccgacccttaccctcagcgagagaagtaaccaatgtgaaagatgttgcagaagtgttccagaagtggctgaagatagaaggaaaaaagtgccactgcctatcagaaaaaacaaaacaaaacatgggaaatacaaccaccaaattccgtaaagcactcatcaatggtgatgaaaacctggcctgccaaatatatgaaaacaatcctcagctaaaagaatctcttgatccaaatacatcttatggggagccctaccagcacaatactccattacattatgctgctagacatggaatgaataaaatattagggacttttcttggtagagatggaaatccaaataaacggaatgtgcacaatgaaacatctatgcatttgttgtgtatgggacctcaaattatgatatctgaaggagcccttcatcctcgcttggcacgccccacagaagatgatttcagaagagcagattgtctgcagatgatcttaaaatggaaaggagcaaaacttgaccagggtgaatatgagagagcagctattgatgctgttgataacaaaaaaaacacacccttgcactatgctgctgcctcagggatgaaagcctgtgtagagcttttagtaaaacatggaggagacttgtttgctgagaatgaaaataaagatactccttgtgattgtgctgaaaagcaacaccacaaagatttggccctcaatctggaatctcaaatggtattctcacgggatcccgaggctgaagaaatagaagctgaatatgctgcattagacaaacgagagccatatgaaggattaaggcctcaggatcttcgtagactaaaagatatgcttattgtggaaactgcagacatgcttcaggctcctctctttactgctgaagctttacttcgagctcatgactgggacagggagaaattacttgaagcttggatgtccaacccggagaactgctgccaacgatcaggtgttcaaatgccaactccaccaccaagtgggtataatgcctgggacacgctcccatctccaagaactccaaggactacacgctcttctgtcacctccccagatgaaatcagcttatctcctggggatttagacaccagtttgtgtgacatttgtatgtgcagtatctctgtatttgaagaccctgtggatatgccctgtggacatgacttttgtagaggatgttgggagtcgtttttgaatctgaaaattcaagaaggtgaagctcacaacattttttgccctgcatatgattgcttccaacttgtacctgtggatatcatagaaagtgtagtttcaaaggagatggacaaacgatacctacagtttgatattaaggcctttgttgaaaataatcctgccattaaatggtgtcctactccaggctgtgacagagcagtaagactaacgaaacaagggtcaaatacatctggatctgatacactcagcttcccattgctgagagctcctgctgttgattgtggaaaaggacacctcttctgctgggagtgccttggtgaagcacatgagccttgtgactgccaaacatggaagaattggctgcaaaaaataaccgaaatgaaaccagaagaacttgtgggagttagtgaagcctacgaggatgccgccaattgtctctggttattaactaactccaagccttgtgccaactgtaagtctccaatacagaagaatgaaggctgcaatcacatgcagtgtgctaagtgcaagtatgacttttgctggatttgccttgaagagtggaaaaaacatagttcgtccactggaggttattacagatgtactcgctatgaagtcattcaacacgtggaggagcaatccaaggaaatgactgtggaggctgagaaaaaacacaaacgatttcaggaacttgacagatttatgcactattatacaagatttaaaaaccatgagcatagttatcagctagaacaacgccttcttaaaacagccaaagaaaagatggagcaattgagcagagctctcaaagaaactgaaggaggctgtccagataccactttcattgaagatgcagttcatgtgctcttaaaaactcggcgcattctcaagtgttcttatccatatggatttttcttggaacctaaaagcacaaagaaagaaatttttgaactaatgcaaacagacctagaaatggtcactgaagaccttgcccagaaagtcaataggccttaccttcgcacaccccgccacaagatcatcaaagcagcatgccttgtacagcagaagaggcaagaattcctggcatctgtggctcggggagtagctcctgcagactcaccagaagctccaaggcgcagctttgctggtggaacatgggattgggaatatttaggatttgcatcaccagaggaatatgctgaatttcagtatcggaggaggcacagacaacgtcgtcgaggagatgttcacagtctactcagtaatcctccagaccctgatgagccaagtgaaagcactttagatattccagaaggcggcagcagcagccgcaggcctggcacatccgtggtaagttctgcatctatgagtgtgctgcacagctcttccctgcgtgactacacccctgccagtcgctctgaaaaccaggactctcttcaggctctgagttccttggatgaagacgatcccaatatacttcttgcaatacagttatcactgcaagagtctgggctggccctcgatgaagaaactagagacttcctcagtaatgaagcatccttaggtgcgataggcacttctttaccttccaggctggactctgtccccagaaatacagatagccctcgggctgcattgagcagctctgagcttttggaacttggtgacagcctcatgagactaggagcagagaatgacccattttcaactgacaccctgagctcacaccctctcagtgaggcaagaagtgatttctgtccctcatctagtgatcctgactcagctggccaggaccccaacatcaatgacaatcttctcggcaacatcatggcttggtttcatgacatgaaccctcagagtattgccctgattcctccagcaactacagaaatcagtgcagattcccagctcccctgtatcaaagatgggtcagaaggtgtgaaggatgtggaactggtgctgccagaagattcaatgtttgaagatgccagtgtcagtgaaggtagaggaacccagatagaagaaaatcctttggaagaaaatattctggcgggggaagcagcatctcaagctggtgacagtggtaacgaggcagccaacagaggagatggttcagatgtttcaagtcaaacacctcaaacctcaagtgactggcttgaacaagtacatttagtgtgaactgcacacatctgggctctaaatgaattacaggtacagatggtatgctaggtggagtatgcttgatagagactttgattcacttaattccaactcagtgataaaccactgacattagggttgaatacagagaagttcccttgaatggtagcttcattttttattttaaccttacagggaatttcctttgtacttaattgaatagcttttcccctttttgctgacaaaaagaagagcaagagaaagagaaacaaaaatgaaataaataagttgtattccacactctaagaaaatgcagtcctctatttagcctaggcttgacaatacttaaattgaacatttaaactaaaggcttactccctaatctttgggtggctttcctttaaaaaaaaaaaaaaagttttcttcattctagaaatttattttggataaatccgataacatatatgtcctcaatctctttgtgctcttccataacttacttcctttttgtctgagcaatgtgaattgaagtctctttagtaccacatctaccatagtgtaattagttttaattttcacatgaatcaaaggtttcctttcatgtctatttacagtccaattgtgccaaactcttacttgtgtgctgactaacaaggcatttaggtgtgcagcatcctagagtgctccagggcagtgtcagcgttctcgggagtaaaaggtgccacttggtagcaatgatattccagaattaaatgggtttttgttgccatggagactgcatttatataaatgtagcctgtagcttaagttaactaaacctaatgctgctgttaaaaacagtttattttaatattaaaatacagttgattagcaacagcggtgctgtattttaagagacactttattggaagtgcaatcatagttatttgttttcacaattttacagtgcattctaattactgatgggtgcaattacttttaatcgtgttttataaaatagaaaaaaagtggagttttcatgagttatagtaaatcccacgattattaagaaattcagtaaaacatcctgcgcaacatgttaccgtgcctttgcctaacctaaatggatagttgccagttaaataagtgagtaattcaaatttcaatgtctcttctgaagtaactatgctatgaattgcaaagacctccataaaaccacccatggccttgcttttacactaactataacaactaaatgttcaatcagtttgtttgcctaactagcaaatgctgacatgtgtttgttctactgcgcaatactcatttgctgtgtgattactgtttagtgttgaaaaaaatcaacttcctagttatcagtgtcttactgtgaagaaaatactggtcttagttgtaattaggatacaatggtacagtgtgtaattaaaactagagtaaactgttggaatggctgttttacttaaatattatcaaaactagcataacataagcaaaatagataagtacaacactccatttagtgttttgccagattgttaccagaagtctacagataccaaactttcagttctgagtttgtacaggcaagtcctgggctgggtaaaaagttatattaatattgttatccacaagagatgtgattatgggttttgattactttttttttttccaaaccctgcttttgaaatatccttgtacttaaaattcatattgctaagacactgtattagaatatttaatattccccagatcctcttaggataaactgtgggaatcctcctatgccatggatatcaaaggtccacattagtttttatttctccagtgatcagaaacattgatatcaatccctattaaattagtggggggaatattaactttatctacagtgtattactgtatattaaactgaaatagtccattaaaggatttttttataaatttattttggattaaaaatatcaacaccaataagtttttagaccaagttgtaatttttccaatatagagtctttgcatcacactgaggcatcttgcacagctgcagttaaggtgagaaagaatgctctgtgtgaagacagtgtacacaatgggttccggtttccttgcaccttgtgcagtatcctttatttctgtgctgttctctcctgagcatgaaaaatgatcattatccaatttgtatttccttggtacatattttaaaaacaacacagtcattgactttacaattcagtaatgaagtttggcaaagcctattttgtaaacaagttaattttataatgtaaaaaaaaaaagttaatctaaccttgacttgttatttgcactttcatagtctatacttgatacattcccactttatatacagtaggattctacaaacgtgtagatgtttggccaaatgaatgctgttaataatatgtaaaattctttgattaaacatttattacttaaacta

SEQ ID NO: 895 - protein, 1356 aa, Homo sapiens
MWRWFSLPPPFSLAGVELAPPVSRRTPRGPTRTGCRECLSGRYIQLNGWDSHLARGGRDRHRFLIPPSLLPGTAARPSFLWQKNPQSPKESRLEGSPALPPAPQKLRSLESETLLPTCSLLSFPLLAPQHHSPLTLSRNYGVPAAGEGWGAPTQSEPRRGRLRLTQRFPRAASAHPRPHQPPPGGCTRAGEEGATVRVGGAGWVPEVTSSAVEAGAAEAELRSCWVHRPLPSAREVTNVKDVAEVFQKWLKIEGKKCHCLSEKTKQNMGNTTTKFRKALINGDENLACQIYENNPQLKESLDPNTSYGEPYQHNTPLHYAARHGMNKILGTFLGRDGNPNKRNVHNETSMHLLCMGPQIMISEGALHPRLARPTEDDFRRADCLQMILKWKGAKLDQGEYERAAIDAVDNKKNTPLHYAAASGMKACVELLVKHGGDLFAENENKDTPCDCAEKQHHKDLALNLESQMVFSRDPEAEEIEAEYAALDKREPYEGLRPQDLRRLKDMLIVETADMLQAPLFTAEALLRAHDWDREKLLEAWMSNPENCCQRSGVQMPTPPPSGYNAWDTLPSPRTPRTTRSSVTSPDEISLSPGDLDTSLCDICMCSISVFEDPVDMPCGHDFCRGCWESFLNLKIQEGEAHNIFCPAYDCFQLVPVDIIESVVSKEMDKRYLQFDIKAFVENNPAIKWCPTPGCDRAVRLTKQGSNTSGSDTLSFPLLRAPAVDCGKGHLFCWECLGEAHEPCDCQTWKNWLQKITEMKPEELVGVSEAYEDAANCLWLLTNSKPCANCKSPIQKNEGCNHMQCAKCKYDFCWICLEEWKKHSSSTGGYYRCTRYEVIQHVEEQSKEMTVEAEKKHKRFQELDRFMHYYTRFKNHEHSYQLEQRLLKTAKEKMEQLSRALKETEGGCPDTTFIEDAVHVLLKTRRILKCSYPYGFFLEPKSTKKEIFELMQTDLEMVTEDLAQKVNRPYLRTPRHKIIKAACLVQQKRQEFLASVARGVAPADSPEAPRRSFAGGTWDWEYLGFASPEEYAEFQYRRRHRQRRRGDVHSLLSNPPDPDEPSESTLDIPEGGSSSRRPGTSVVSSASMSVLHSSSLRDYTPASRSENQDSLQALSSLDEDDPNILLAIQLSLQESGLALDEETRDFLSNEASLGAIGTSLPSRLDSVPRNTDSPRAALSSSELLELGDSLMRLGAENDPFSTDTLSSHPLSEARSDFCPSSSDPDSAGQDPNINDNLLGNIMAWFHDMNPQSIALIPPATTEISADSQLPCIKDGSEGVKDVELVLPEDSMFEDASVSEGRGTQIEENPLEENILAGEAASQAGDSGNEAANRGDGSDVSSQTPQTSSDWLEQVHLV

SEQ ID NO: 896 - DNA, 1201 bp, Homo sapiens
agtcgccgctgggcaccccgagaccatggggaagctcgtggcgctggtcctgctgggggtcggcctgtccttagtcggggagatgttcctggcgtttagagaaagggtgaatgcctctcgagaagtggagccagtagaacctgaaaactgccaccttattgaggaacttgaaagtggctctgaagatattgatatacttcctagtgggctggcttttatctccagtggattaaaatatccaggcatgccaaactttgcgccagatgaaccaggaaaaatcttcttgatggatctgaatgaacaaaacccaagggcacaagcgctagaaatcagtggtggatttgacaaagaattatttaatccacatgggatcagtattttcatcgacaaagacaatactgtgtatctttatgttgtgaatcatccccacatgaagtccactgtggagatatttaaatttgaggaacaacaacgttctctggtatacctgaaaactataaaacatgaacttctcaaaagtgtgaatgacattgtggttcttggaccagaacagttctatgccaccagagaccactattttaccaactccctcctgtcattttttgagatgatcttggatcttcgctggacttatgttcttttctacagcccaagggaggttaaagtggtggccaaaggattttgtagtgccaatgggatcacagtctcagcagaccagaagtatgtctatgtagctgatgtagcagctaagaacattcacataatggaaaaacatgataactgggatttaactcaactgaaggtgatacagttgggcaccttagtggataacctgactgtcgatcctgccacaggagacattttggcaggatgccatcctaatcctatgaagctactgaactataaccctgaggaccctccaggatcagaagtacttcgcatccagaatgttttgtctgagaagcccagggtgagcaccgtgtatgccaacaatggctctgtgcttcagggcacctctgtggcttctgtgtaccatgggaaaattctcataggcaccgtatttcacaaaactctgtactgtgagctctagactctagatagtaaaaaaaaaaaaaaaaagtctacatattttgtaaaagtaaactgataattgtatgataagtggcactgtaagtaaatagcaaacaccaaaaaaaaaaaa

SEQ ID NO: 897 - protein, 354 aa, Homo sapiens
MGKLVALVLLGVGLSLVGEMFLAFRERVNASREVEPVEPENCHLIEELESGSEDIDILPSGLAFISSGLKYPGMPNFAPDEPGKIFLMDLNEQNPRAQALEISGGFDKELFNPHGISIFIDKDNTVYLYVVNHPHMKSTVEIFKFEEQQRSLVYLKTIKHELLKSVNDIVVLGPEQFYATRDHYFTNSLLSFFEMILDLRWTYVLFYSPREVKVVAKGFCSANGITVSADQKYVYVADVAAKNIHIMEKHDNWDLTQLKVIQLGTLVDNLTVDPATGDILAGCHPNPMKLLNYNPEDPPGSEVLRIQNVLSEKPRVSTVYANNGSVLQGTSVASVYHGKILIGTVFHKTLYCEL

SEQ ID NO: 898 - DNA, 1669 bp, Homo sapiens
ggactcggcctaggcggaggacggggcggagcgcggccggcaccatcgagccgggaagatggcaccgcccacggagctgctggccaggccggagcgaggcagcgcgcccggctcccgcgccatggggcggctggtggctgtgggcttgctggggatcgcgctggcgctcctgggcgagaggcttctggcactcagaaatcgacttaaagcctccagagaagtagaatctgtagaccttccacactgccacctgattaaaggaattgaagctggctctgaagatattgacatacttcccaatggtctggctttttttagtgtgggtctaaaattcccaggactccacagctttgcaccagataagcctggaggaatactaatgatggatctaaaagaagaaaaaccaagggcacgggaattaagaatcagtcgtgggtttgatttggcctcattcaatccacatggcatcagcactttcatagacaacgatgacacagtttatctctttgttgtaaaccacccagaattcaagaatacagtggaaatttttaaatttgaagaagcagaaaattctctgttgcatctgaaaacagtcaaacatgagcttcttccaagtgtgaatgacatcacagctgttggaccggcacatttctatgccacaaatgaccactacttctctgatcctttcttaaagtatttagaaacatacttgaacttacactgggcaaatgttgtttactacagtccaaatgaagttaaagtggtagcagaaggatttgattcagcaaatgggatcaatatttcacctgatgataagtatatctatgttgctgacatattggctcatgaaattcatgttttggaaaaacacactaatatgaatttaactcagttgaaggtacttgagctggatacactggtggataatttatctattgatccttcctcgggggacatctgggtaggctgtcatcctaatggccagaagctcttcgtgtatgacccgaacaatcctccctcgtcagaggttctccgcatccagaacattctatctgagaagcctacagtgactacagtttatgccaacaatgggtctgttctccaaggaagttctgtagcctcagtgtatgatgggaagctgctcataggcactttataccacagagccttgtattgtgaactctaaattgtacttttggcatgaaagtgcgataacttaacaattaattttctatgaattgctaattctgagggaatttaaccagcaacattgacccagaaatgtatggcatgtgtagttaattttattccagtaaggaacggcccttttagttcttagagcacttttaacaaaaaaggaaaatgaacaggttctttaaaatgccaagcaagggacagaaaagaaagctgctttcgaataaagtgaatacattttgcacaaagtaagcctcacctttgccttccaactgccagaacatggattccactgaaatagagtgaattatatttccttaaaatgtgagtgacctcacttctggcactgtgactactatggctgtttagaactactgataacgtattttgatgttttgtacttacatctttgtttaccattaaaaagttggagttatattaaagactaactaaaatcccaaaaaaaaaaaaaaaa

SEQ ID NO: 899 - protein, 354 aa, Homo sapiens
MGRLVAVGLLGIALALLGERLLALRNRLKASREVESVDLPHCHLIKGIEAGSEDIDILPNGLAFFSVGLKFPGLHSFAPDKPGGILMMDLKEEKPRARELRISRGFDLASFNPHGISTFIDNDDTVYLFVVNHPEFKNTVEIFKFEEAENSLLHLKTVKHELLPSVNDITAVGPAHFYATNDHYFSDPFLKYLETYLNLHWANVVYYSPNEVKVVAEGFDSANGINISPDDKYIYVADILAHEIHVLEKHTNMNLTQLKVLELDTLVDNLSIDPSSGDIWVGCHPNGQKLFVYDPNNPPSSEVLRIQNILSEKPTVTTVYANNGSVLQGSSVASVYDGKLLIGTLYHRALYCEL

SEQ ID NO: 900 - DNA, 1633 bp, Homo sapiens
ggactcggcctaggcggaggacggggcggagcgcggccggcaccatcgagccgggaagatggcaccgcccacggagctgctggccaggccggagcgaggcagcgcgcccggctcccgcgccatggggcggctggtggctgtgggcttgctggggatcgcgctggcgctcctgggcgagaggcttctggcactcagaaatcgacttaaagcctccagagaagtagaatctgtagaccttccacactgccacctgattaaaggaattgaagctggctctgaagatattgacatacttcccaatggtctggctttttttagtgtgggtctaaaattcccaggactccacagctttgcaccagataagcctggaggaatactaatgatggatctaaaagaagaaaaaccaagggcacgggaattaagaatcagtcgtgggtttgatttggcctcattcaatccacatggcatcagcactttcatagacaacgaattcaagaatacagtggaaatttttaaatttgaagaagcagaaaattctctgttgcatctgaaaacagtcaaacatgagcttcttccaagtgtgaatgacatcacagctgttggaccggcacatttctatgccacaaatgaccactacttctctgatcctttcttaaagtatttagaaacatacttgaacttacactgggcaaatgttgtttactacagtccaaatgaagttaaagtggtagcagaaggatttgattcagcaaatgggatcaatatttcacctgatgataagtatatctatgttgctgacatattggctcatgaaattcatgttttggaaaaacacactaatatgaatttaactcagttgaaggtacttgagctggatacactggtggataatttatctattgatccttcctcgggggacatctgggtaggctgtcatcctaatggccagaagctcttcgtgtatgacccgaacaatcctccctcgtcagaggttctccgcatccagaacattctatctgagaagcctacagtgactacagtttatgccaacaatgggtctgttctccaaggaagttctgtagcctcagtgtatgatgggaagctgctcataggcactttataccacagagccttgtattgtgaactctaaattgtacttttggcatgaaagtgcgataacttaacaattaattttctatgaattgctaattctgagggaatttaaccagcaacattgacccagaaatgtatggcatgtgtagttaattttattccagtaaggaacggcccttttagttcttagagcacttttaacaaaaaaggaaaatgaacaggttctttaaaatgccaagcaagggacagaaaagaaagctgctttcgaataaagtgaatacattttgcacaaagtaagcctcacctttgccttccaactgccagaacatggattccactgaaatagagtgaattatatttccttaaaatgtgagtgacctcacttctggcactgtgactactatggctgtttagaactactgataacgtattttgatgttttgtacttacatctttgtttaccattaaaaagttggagttatattaaagactaactaaaatcccaaaaaaaaaaaaaaaa

SEQ ID NO: 901 - protein, 342 aa, Homo sapiens
MGRLVAVGLLGIALALLGERLLALRNRLKASREVESVDLPHCHLIKGIEAGSEDIDILPNGLAFFSVGLKFPGLHSFAPDKPGGILMMDLKEEKPRARELRISRGFDLASFNPHGISTFIDNEFKNTVEIFKFEEAENSLLHLKTVKHELLPSVNDITAVGPAHFYATNDHYFSDPFLKYLETYLNLHWANVVYYSPNEVKVVAEGFDSANGINISPDDKYIYVADILAHEIHVLEKHTNMNLTQLKVLELDTLVDNLSIDPSSGDIWVGCHPNGQKLFVYDPNNPPSSEVLRIQNILSEKPTVTTVYANNGSVLQGSSVASVYDGKLLIGTLYHRALYCEL

SEQ ID NO: 902 - DNA, 1281 bp, Homo sapiens
atggacggcaccactgcccctgtcactaaatctggagctgccaagttagttaagagaaatttccttgaggcgctaaagtccaatgacttcggaaaattgaaggctattttgatccaaaggcaaatagatgtggacactgtttttgaagtcgaagatgagaatatggttttggcatcttataaacaaggttactggttgcctagctataaattgaagtcttcctgggccacaggcctccatctctctgtcttgtttggccatgtggaatgtcttctggtgctactggaccacaatgctacaatcaactgtagacccaatgggaaaacccctcttcacgtggcttgtgaaatggccaatgtggattgtgttaagatcctctgtgatcgtggggcaaagctcaattgctactccttaagtggacacacagctttgcacttttgtacaactccaagttccattctctgtgccaagcaattggtttggagaggggcgaatgtgaacatgaagaccaacaaccaagatgaggagacgcccttgcacacggctgcccacttcggcctttcggagctggtggccttctacgtggaacacggggccatagtggacagcgtgaatgcccacatggagacccccctggccatcgccgcctactgggccctccgctttaaggagcaggagtacagcacggagcaccacctggtctgccgcatgctgcttgactacaaagccgaagtcaatgcccgagatgacgactttaaatctcccctccacaaggcagcctggaactgtgaccacgtgctcatgcacatgatgctggaagctggcgccgaagccaatctcatggatatcaacggctgtgctgccatccagtacgtgctgaaggtcacctccgtgcgccctgctgcccagcctgagatctgctaccagctcctgttgaaccatggggctgcccgaatataccctccacagttccataaggtgatacaggcctgccattcttgtcctaaagcaattgaagttgtagtcaatgcctatgaacacatcagatggaacacaaagtggagaagagctatccccgatgatgacttggagaaatactgggatttttaccactctctctttactgtgtgctgtaactctccaaggactctcatgcacttatcgagatgtgccattagaagaacattacacaacagatgccatagagcaattcctttgctttccctcccattgtcattgaaaaagtacttgcttttagagccagagggaattatttattaa

SEQ ID NO: 903 - protein, 426 aa, Homo sapiens
MDGTTAPVTKSGAAKLVKRNFLEALKSNDFGKLKAILIQRQIDVDTVFEVEDENMVLASYKQGYWLPSYKLKSSWATGLHLSVLFGHVECLLVLLDHNATINCRPNGKTPLHVACEMANVDCVKILCDRGAKLNCYSLSGHTALHFCTTPSSILCAKQLVWRGANVNMKTNNQDEETPLHTAAHFGLSELVAFYVEHGAIVDSVNAHMETPLAIAAYWALRFKEQEYSTEHHLVCRMLLDYKAEVNARDDDFKSPLHKAAWNCDHVLMHMMLEAGAEANLMDINGCAAIQYVLKVTSVRPAAQPEICYQLLLNHGAARIYPPQFHKVIQACHSCPKAIEVVVNAYEHIRWNTKWRRAIPDDDLEKYWDFYHSLFTVCCNSPRTLMHLSRCAIRRTLHNRCHRAIPLLSLPLSLKKYLLLEPEGIIY

SEQ ID NO: 904 - DNA, 1494 bp, Homo sapiens
atggacggcaccactgcccctgtcactaaatctggagctgccaagttagttaagagaaatttccttgaggcgctaaagtccaatgacttcggaaaattgaaggctattttgatccaaaggcaaatagatgtggacactgtttttgaagtcgaagatgagaatatggttttggcatcttataaacaaggttactggttgcctagctataaattgaagtcttcctgggccacaggcctccatctctctgtcttgtttggccatgtggaatgtcttctggtgctactggaccacaatgctacaatcaactgtagacccaatgggaaaacccctcttcacgtggcttgtgaaatggccaatgtggattgtgttaagatcctctgtgatcgtggggcaaagctcaattgctactccttaagtggacacacagctttgcacttttgtacaactccaagttccattctctgtgccaagcaattggtttggagaggggcgaatgtgaacatgaagaccaacaaccaagatgaggagacgcccttgcacacggctgcccacttcggcctttcggagctggtggccttctacgtggaacacggggccatagtggacagcgtgaatgcccacatggagacccccctggccatcgccgcctactgggccctccgctttaaggagcaggagtacagcacggagcaccacctggtctgccgcatgctgcttgactacaaagccgaagtcaatgcccgagatgacgactttaaatctcccctccacaaggcagcctggaactgtgaccacgtgctcatgcacatgatgctggaagctggcgccgaagccaatctcatggatatcaacggctgtgctgccatccagtacgtgctgaaggtcacctccgtgcgccctgctgcccagcctgagatctgctaccagctcctgttgaaccatggggctgcccgaatataccctccacagttccataaggtgaggctctgcccagtggtcagcaggttgaggaagattcaaatggcagccttgtctgaaatctccaagtaactcaagcttgcttgaggcttgagtcctgggctaactacctctgatcctctttgaccttccattacatacctaatcctagctgtctcctcatctcatcctagtctaggtttgcttgaaattgggtgtgagagctagaatgagaaaaagagtagcaaataatttgttttgccttgtgtgaacaccagtgcactggtggcttcctgagggactgaggtaagtctgccagaaaggtgaatagtgttagacaggcatacatttgccatcttttaaacagaatgactgatctaaagatgactcagcctgctttgaaattagcttgtagccatgaaagggccacccgattttccagtttaatgaaagctaacgtttattaagtactaaaattatatttattatgtataataaataagcacactgttataagcaaaaaaaaaaaaaaaaaaa

SEQ ID NO: 905 - protein, 349 aa, Homo sapiens
MDGTTAPVTKSGAAKLVKRNFLEALKSNDFGKLKAILIQRQIDVDTVFEVEDENMVLASYKQGYWLPSYKLKSSWATGLHLSVLFGHVECLLVLLDHNATINCRPNGKTPLHVACEMANVDCVKILCDRGAKLNCYSLSGHTALHFCTTPSSILCAKQLVWRGANVNMKTNNQDEETPLHTAAHFGLSELVAFYVEHGAIVDSVNAHMETPLAIAAYWALRFKEQEYSTEHHLVCRMLLDYKAEVNARDDDFKSPLHKAAWNCDHVLMHMMLEAGAEANLMDINGCAAIQYVLKVTSVRPAAQPEICYQLLLNHGAARIYPPQFHKVRLCPVVSRLRKIQMAALSEISK

SEQ ID NO: 906 - DNA, 3710 bp, Homo sapiens
aggacgcgtttccaagttccagtgactcctcctgtttgggactcggggggagagtgcggggagacaaataaaacctcgggcggcggcggctggtgggaagacttgaacttgaatctcgaaccactgcatctccgactctgcccagactcttcactccgcggcaccctcaaaccccagcccaggccggggcgcacaagccagccagcgcacctgcagtcctcgcccggacgcgccgcgccccctcggaaccaggctctgctccgagcagccttcgcccctcaagccagccacagtccccgccaggccgggtgggcgtcaagatgaaggcggcccgcttcgtgctgcgcagcgctggctcgctcaacggcgccggcctggtgccccgagaggtggagcatttctcgcgctacagcccgtccccgctgtccatgaagcagctactggactttggttcagaaaatgcatgtgaaagaacttcttttgcatttttgcgacaagaattgcctgtgagactcgccaacattctgaaggaaattgatatcctcccgacccaattagtaaatacctcttcagtgcaattggttaaaagctggtatatacagagcctgatggatttggtggaattccatgagaaaagcccagatgaccagaaagcattatcagactttgtagatacactcatcaaagttcgaaatagacaccataatgtagtccctacaatggcacaaggaatcatagagtataaagatgcctgtacagttgacccagtcaccaatcaaaatcttcaatatttcttggatcgattttacatgaaccgtatttctactcggatgctgatgaaccagcacattcttatatttagtgactcacagacaggaaacccaagccacattggaagcattgatcctaactgtgatgtggtagcagtggtccaagatgcctttgagtgttcaaggatgctctgtgatcagtattatttatcatctccagaattaaagcttacacaagtgaatggaaaatttccagaccaaccaattcacatcgtgtatgttccttctcacctccatcatatgctctttgaactatttaagaatgcaatgcgggcaacagttgaacaccaggaaaatcagccttcccttacaccaatagaggttattgttgtcttgggaaaagaagaccttaccattaagatttcagacagaggaggtggtgttcccctgagaattattgaccgcctctttagttatacatactccactgcaccaacgcctgtgatggataattcccggaatgctcctttggctggttttggttacggcttgccaatttctcgtctgtatgcaaagtactttcaaggagatctgaatctctactctttatcaggatatggaacagatgctatcatctacttaaaggctttgtcttctgagtctatagaaaaacttccagtttttaacaagtcagccttcaaacattatcagatgagctctgaggctgatgactggtgtatcccaagcagggaaccaaagaacctggcaaaagaagtggccatgtgaagagggacactcaggacactttacgggatcaaagtgggtctacaccagtgctgcttcctgaatgtttgtgtgtgaacccttgtttcctccaaaacaaacgacagcaacgaaaactccttaatcagaacactgatccaatgaggaatggagcttgtttctgtgacccaggagaacttagtgcaagactacaggagttaacagatggccagctccttattttttaatgtagaataactcctgagtttatatcaaatcctgaagaaataagcctcagttttccatctgtttttgataagaataagaaagggagtgagtgtgaagatggtggttagcagtttcactaagactgatattttaggcctcttgttcacatcaaaagatattggtgtcagaataccagcattttcctgccatgcaaaggattaaaacttagtttacactatgtggttacaaatatatgtcaatgtacattttgaacatatttatgtgctatggaaggaaatgctggtgactaaaataaggtttactctgaaagaggaggaattttattcaaagcattcaaacattttattcaagtgtttcaaaattcaaagcattgtattcaaagttgcagtgaaggcatcaacttatgtaaaaactcagaaggaaggctcctctgataaaaacacagctcctttattatgctgcttttcttgttcactttacacactaagtaaacacttattgtcaggtgcctagtcttgagtgaattgttagatgtgcactgaactcgggatgttggggattggagagagagaattgccaaagtaacagcaaaaatatctcttactttgctttgtttataaataaattagtagattggaaaaactagtgttagggaaagaaatcacatgttcagagcctaattcagtaggaagggcttttctctaccctgaaatgaaggtaatccaaaggcatccattttctaggcttaaaagatatatttttgatatatttaattatattctctacactccagcattaatatgtctgtttaaaaattactaattctcaaatggctcaagaacattagaatttaagtaccttttagagtaattattttaagcaaatagcctggacgtaagagattctcatgccagcatgctttcatttgtcagttgttgtgactgagagataatgaatgacacctgaaatgcatatggtatttttgggagagttaaggtataatttgaaggttggcagaccagttgcgctgattactcttagagaagaagaaatggaaaaatgaaagaaggcaggaaggaaagaaaggatataggaagagagggaagcagaaggcaggcatttttctattttccccacaaattatttcaaaaaaaatctgtattttctgggatatgtcattggcaagaggaagaactggtgttttgaaagcagtatggattctttaaatgcctctcactcttacaagatagtaggctttgagataataaacttacccgtgtcaattaacatttaaactggcatatagaaaaaaaggaggatttttctgcattgtaaaataatcagtatggtttatatgttgaatttgacatttgtgtgtaatttcatggtggcctagtgttgtggtgcttctggtaatggtaatagaagctcaactatttttttgtggatttcagtttttatcatcagaagtcctagacagtgacatttcttaatggtgggagtccagctcatgcatttctgattatacaaaacagtttgcagtaggttatttgtcatttcagttttttactgaaatttgagctaaacatttttacatgtaaatacttgtatttaccaaagatttaaatcagttgattaattaattaactcaaatactgtgaactatctctaaaacactagaaaaaagaaatgttagtatctcaattacaccaactgtgcaaatgaactttgataaaatagaaataatctacattggcctttgtgaaatctggggaagagctttaggattctagtagatggatactgaatactcaggcccacttaaattattaatgtatacattgtgtttttgtctttatgctatgtacagagaaatgtgataattttttataataaatattttttatgatgataaaagaaaaaaaaaaa

SEQ ID NO: 907 - protein, 411 aa, Homo sapiens
MKAARFVLRSAGSLNGAGLVPREVEHFSRYSPSPLSMKQLLDFGSENACERTSFAFLRQELPVRLANILKEIDILPTQLVNTSSVQLVKSWYIQSLMDLVEFHEKSPDDQKALSDFVDTLIKVRNRHHNVVPTMAQGIIEYKDACTVDPVTNQNLQYFLDRFYMNRISTRMLMNQHILIFSDSQTGNPSHIGSIDPNCDVVAVVQDAFECSRMLCDQYYLSSPELKLTQVNGKFPDQPIHIVYVPSHLHHMLFELFKNAMRATVEHQENQPSLTPIEVIVVLGKEDLTIKISDRGGGVPLRIIDRLFSYTYSTAPTPVMDNSRNAPLAGFGYGLPISRLYAKYFQGDLNLYSLSGYGTDAIIYLKALSSESIEKLPVFNKSAFKHYQMSSEADDWCIPSREPKNLAKEVAM

SEQ ID NO: 908 - DNA, 2950 bp, Homo sapiens
cctgggagagaggaagtgatcgctcccggagagccgagccgagcgccggcgcacggtgagacagcacatcctgcccgcgccggccccgcaccttcgggagccgcctgcaccaacgctgccgccgccaggagccgccgccgctcggggagccagttccgccgctgccgagcgcgtccaggaaaccaacatgtctgacaaaagtgacttaaaagctgagctagagcgcaaaaagcagcgcttagcacagataagagaagagaagaaacggaaggaagaggagaggaaaaagaaagaggctgatatgcagcagaagaaagaacccgttcaggacgactctgatctggatcgcaaacgacgagagacagaggctttgctgcaaagcattggtatctcaccggagccgcctctagtgcagccgctgcattttttaacatgggatacctgttattttcattatttagtcccaacccctatgtctccctcctcgaaatcagtgagcactcccagtgaagctggaagccaagactcaggcgatctggggccattaacaaggaccctgcagtgggacacagacccctcagtgctccagctgcagtcagactcagaacttggaagaagactgcataaactgggcgtgtcaaaggtcacccaagtggatttcctgccaagggaagtagtgtcctactcaaaggagacccagactcctcttgccacgcatcagtctgaagaggatgaggaagatgaggaaatggtggaatctaaagttggccaggactcagaactggaaaatcaggacaaaaaacaggaagtgaaggaagcccctccaagagagttgacagaggaagaaaaacagcagatccttcattcagaggaatttctcatcttttttgaccggacaatacgggtaattgaaagagccctggctgaagattccgacatcttttttgactacagcggccgagagttagaggaaaaagatggggatgttcaggctggagccaatctttctttcaatcgtcagttctatgatgaacattggtccaagcatcgagtggtcacttgtatggactggtccctccagtaccctgagctgatggtggcttcttacaacaacaatgaagatgctccccatgaaccagatggagtggccttggtttggaacatgaagtttaagaaaaccacaccagaatacgtcttccactgtcagtcctctgtgatgtcggtctgcttcgcccgtttccatcctaacttggtggttggtgggacttactcgggccagattgtcctctgggacaatcgcagtcatcgaaggactccagtgcagcggacacccttatcagctgctgcacacacgcatcccgtgtactgtgtaaatgttgttgggacccagaatgctcataacctcatcactgtctccactgatggcaaaatgtgttcctggagcctggacatgctctcaactccacaggagagcatggagctggtgtacaataagtccaagcctgtcgctgttaccggaatggctttcccaacgggagacgtcaataacttcgtggttggcagtgaggaaggtacagtctacacggcttgtcgtcatggaagcaaagcaggtattggtgaggtctttgaaggtcaccaagggccagtgacaggaattaactgccacatggcagtgggaccaatcgacttttctcacctgtttgtcacatcatcatttgactggactgtcaaactgtggaccaccaagcacaacaagccgctctactcctttgaagacaatgcagactatgtgtacgatgtcatgtggtcccccgtgcatcctgcgctttttgcctgcgtggacgggatggggcgcttggacctctggaacctcaacaatgacaccgaggtgccaacagcaagtgtggccattgagggggcatccgccctaaaccgtgttcgttgggcccaagctggcaaagaagttgctgttggggactcggaaggccgtatttgggtctatgacgttggagagcttgcagttccccacaatgatgaatggacccgatttgccaggacccttgtggaaattcgtgctaacagagctgatagcgaggaggaaggcactgttgagttatctgcctagtggaaatgagccacccccactgcagcccccacctttgtgtcctagagctcagcgtctgcagtcaagtctcttgtattcggtgtccattcagtatcagtattgctgtgacattttgggtgccatattgtgccagctttgctccaagtattctaaatgtgtcccatcatgctttccactgacccaaaattcaccacagcatttctatctttattatttctgtctcaaaaatgaagagaagggggttatgggttaagttgctgccttttaactactttgtagctgtatttaatagctggaaacctctggttgaatttgtgcttacatgcactcctggcatagtcctattaaatccatatgaagccagatatgattgggtgcagatgtggtgttcctcatattatggtacagggccaaagacttgagacgtggtgttttacatggtgactcacattatgaatggatttactagaagaacattgctgctccttatttattgtagtgtgctgcatggaacgtatttatttgaaagcattaaaataaatgatcctagagcatgtgcataatgagaggactgtattctctctgctgctgttgaggttatattaagttccacatagcaattacagtatgccagttccactgaagacatgaaatctttagaggtttcttgcagtgaacgaaatgaattttaagtccttattatcgggtactttaacaatatttcaaatatcattgaccactaatacttctcactgaagctaacacagtctgagaaaagtctatggttcctaaatatgacatcagtgttgccaataaaaccaaaaa

SEQ ID NO: 909 - protein, 645 aa, Homo sapiens
MSDKSDLKAELERKKQRLAQIREEKKRKEEERKKKEADMQQKKEPVQDDSDLDRKRRETEALLQSIGISPEPPLVQPLHFLTWDTCYFHYLVPTPMSPSSKSVSTPSEAGSQDSGDLGPLTRTLQWDTDPSVLQLQSDSELGRRLHKLGVSKVTQVDFLPREVVSYSKETQTPLATHQSEEDEEDEEMVESKVGQDSELENQDKKQEVKEAPPRELTEEEKQQILHSEEFLIFFDRTIRVIERALAEDSDIFFDYSGRELEEKDGDVQAGANLSFNRQFYDEHWSKHRVVTCMDWSLQYPELMVASYNNNEDAPHEPDGVALVWNMKFKKTTPEYVFHCQSSVMSVCFARFHPNLVVGGTYSGQIVLWDNRSHRRTPVQRTPLSAAAHTHPVYCVNVVGTQNAHNLITVSTDGKMCSWSLDMLSTPQESMELVYNKSKPVAVTGMAFPTGDVNNFVVGSEEGTVYTACRHGSKAGIGEVFEGHQGPVTGINCHMAVGPIDFSHLFVTSSFDWTVKLWTTKHNKPLYSFEDNADYVYDVMWSPVHPALFACVDGMGRLDLWNLNNDTEVPTASVAIEGASALNRVRWAQAGKEVAVGDSEGRIWVYDVGELAVPHNDEWTRFARTLVEIRANRADSEEEGTVELSA

SEQ ID NO: 910 - DNA, 1102 bp, Homo sapiens
gcgccgcaaggcactgagcaggcgaaagagcgcgctcggacctccttcccggcggcagctaccgagagtgcggagcgaccagcgtgcgctcggaggaaccagagaaactcagcaccccgcgggactgtccgtcgcaaaatccaacatgaaaatcctcgtggccttggcagtcttttttcttgtctccactcagctgtttgcagaagaaataggagccaatgatgatctgaattactggtccgactggtacgacagcgaccagatcaaggaggaactgccggagccctttgagcatcttctgcagagaatcgcccggagacccaagcctcagcagttctttggattaatgggcaaacgggatgctgattcctcaattgaaaaacaagtggccctgttaaaggctctttatggacatggccagatctctcacaaaagacataaaacagattcctttgttggactaatgggcaaaagagctttaaattctgtggcttatgaaaggagtgcaatgcagaattatgaaagaagacgttaataaactacctaacattatttattcagcttcatttgtgtcaatgggcaatgacaggtaaattaagacatgcactatgaggaataattatttatttaataacaattgtttggggttgaaaattcaaaaagtgtttatttttcatattgtgccaatatgtattgtaaacatgtgttttaattccaatatgatgactcccttaaaatagaaataagtggttatttctcaacaaagcacagtgttaaatgaaattgtaaaacctgtcaatgatacagtccctaaagaaaaaaaatcattgctttgaagcagttgtgtcagctactgcggaaaaggaaggaaactcctgacagtcttgtgcttttcctatttgttttcatggtgaaaatgtactgagattttggtattacactgtatttgtatctctgaagcatgtttcatgttttgtgactatatagagatgtttttaaaagtttcaatgtgattctaatgtcttcatttcattgtatgatgtgttgtgatagctaacattttaaataaaagaaaaaatatcttgaaaaaaaaaaaaaaaaa

SEQ ID NO: 911 - protein, 129 aa, Homo sapiens
MKILVALAVFFLVSTQLFAEEIGANDDLNYWSDWYDSDQIKEELPEPFEHLLQRIARRPKPQQFFGLMGKRDADSSIEKQVALLKALYGHGQISHKRHKTDSFVGLMGKRALNSVAYERSAMQNYERRR

SEQ ID NO: 912 - DNA, 1048 bp, Homo sapiens
gcgccgcaaggcactgagcaggcgaaagagcgcgctcggacctccttcccggcggcagctaccgagagtgcggagcgaccagcgtgcgctcggaggaaccagagaaactcagcaccccgcgggactgtccgtcgcaaaatccaacatgaaaatcctcgtggccttggcagtcttttttcttgtctccactcagctgtttgcagaagaaataggagccaatgatgatctgaattactggtccgactggtacgacagcgaccagatcaaggaggaactgccggagccctttgagcatcttctgcagagaatcgcccggagacccaagcctcagcagttctttggattaatgggcaaacgggatgctgattcctcaattgaaaaacaagtggccctgttaaaggctctttatggacatggccagatctctcacaaaatggcttatgaaaggagtgcaatgcagaattatgaaagaagacgttaataaactacctaacattatttattcagcttcatttgtgtcaatgggcaatgacaggtaaattaagacatgcactatgaggaataattatttatttaataacaattgtttggggttgaaaattcaaaaagtgtttatttttcatattgtgccaatatgtattgtaaacatgtgttttaattccaatatgatgactcccttaaaatagaaataagtggttatttctcaacaaagcacagtgttaaatgaaattgtaaaacctgtcaatgatacagtccctaaagaaaaaaaatcattgctttgaagcagttgtgtcagctactgcggaaaaggaaggaaactcctgacagtcttgtgcttttcctatttgttttcatggtgaaaatgtactgagattttggtattacactgtatttgtatctctgaagcatgtttcatgttttgtgactatatagagatgtttttaaaagtttcaatgtgattctaatgtcttcatttcattgtatgatgtgttgtgatagctaacattttaaataaaagaaaaaatatcttgaaaaaaaaaaaaaaaaa

SEQ ID NO: 913 - protein, 111 aa, Homo sapiens
MKILVALAVFFLVSTQLFAEEIGANDDLNYWSDWYDSDQIKEELPEPFEHLLQRIARRPKPQQFFGLMGKRDADSSIEKQVALLKALYGHGQISHKMAYERSAMQNYERRR

SEQ ID NO: 914 - DNA, 1057 bp, Homo sapiens
gcgccgcaaggcactgagcaggcgaaagagcgcgctcggacctccttcccggcggcagctaccgagagtgcggagcgaccagcgtgcgctcggaggaaccagagaaactcagcaccccgcgggactgtccgtcgcaaaatccaacatgaaaatcctcgtggccttggcagtcttttttcttgtctccactcagctgtttgcagaagaaataggagccaatgatgatctgaattactggtccgactggtacgacagcgaccagatcaaggaggaactgccggagccctttgagcatcttctgcagagaatcgcccggagacccaagcctcagcagttctttggattaatgggcaaacgggatgctggacatggccagatctctcacaaaagacataaaacagattcctttgttggactaatgggcaaaagagctttaaattctgtggcttatgaaaggagtgcaatgcagaattatgaaagaagacgttaataaactacctaacattatttattcagcttcatttgtgtcaatgggcaatgacaggtaaattaagacatgcactatgaggaataattatttatttaataacaattgtttggggttgaaaattcaaaaagtgtttatttttcatattgtgccaatatgtattgtaaacatgtgttttaattccaatatgatgactcccttaaaatagaaataagtggttatttctcaacaaagcacagtgttaaatgaaattgtaaaacctgtcaatgatacagtccctaaagaaaaaaaatcattgctttgaagcagttgtgtcagctactgcggaaaaggaaggaaactcctgacagtcttgtgcttttcctatttgttttcatggtgaaaatgtactgagattttggtattacactgtatttgtatctctgaagcatgtttcatgttttgtgactatatagagatgtttttaaaagtttcaatgtgattctaatgtcttcatttcattgtatgatgtgttgtgatagctaacattttaaataaaagaaaaaatatcttgaaaaaaaaaaaaaaaaa

SEQ ID NO: 915 - protein, 114 aa, Homo sapiens
MKILVALAVFFLVSTQLFAEEIGANDDLNYWSDWYDSDQIKEELPEPFEHLLQRIARRPKPQQFFGLMGKRDAGHGQISHKRHKTDSFVGLMGKRALNSVAYERSAMQNYERRR

SEQ ID NO: 916 - DNA, 1003 bp, Homo sapiens
gcgccgcaaggcactgagcaggcgaaagagcgcgctcggacctccttcccggcggcagctaccgagagtgcggagcgaccagcgtgcgctcggaggaaccagagaaactcagcaccccgcgggactgtccgtcgcaaaatccaacatgaaaatcctcgtggccttggcagtcttttttcttgtctccactcagctgtttgcagaagaaataggagccaatgatgatctgaattactggtccgactggtacgacagcgaccagatcaaggaggaactgccggagccctttgagcatcttctgcagagaatcgcccggagacccaagcctcagcagttctttggattaatgggcaaacgggatgctggacatggccagatctctcacaaaatggcttatgaaaggagtgcaatgcagaattatgaaagaagacgttaataaactacctaacattatttattcagcttcatttgtgtcaatgggcaatgacaggtaaattaagacatgcactatgaggaataattatttatttaataacaattgtttggggttgaaaattcaaaaagtgtttatttttcatattgtgccaatatgtattgtaaacatgtgttttaattccaatatgatgactcccttaaaatagaaataagtggttatttctcaacaaagcacagtgttaaatgaaattgtaaaacctgtcaatgatacagtccctaaagaaaaaaaatcattgctttgaagcagttgtgtcagctactgcggaaaaggaaggaaactcctgacagtcttgtgcttttcctatttgttttcatggtgaaaatgtactgagattttggtattacactgtatttgtatctctgaagcatgtttcatgttttgtgactatatagagatgtttttaaaagtttcaatgtgattctaatgtcttcatttcattgtatgatgtgttgtgatagctaacattttaaataaaagaaaaaatatcttgaaaaaaaaaaaaaaaaa

SEQ ID NO: 917 - protein, 96 aa, Homo sapiens
MKILVALAVFFLVSTQLFAEEIGANDDLNYWSDWYDSDQIKEELPEPFEHLLQRIARRPKPQQFFGLMGKRDAGHGQISHKMAYERSAMQNYERRR

SEQ ID NO: 918 - DNA, 1994 bp, Homo sapiens
aaacttcccgcacgcgttacaggagccaggtcggtataagcgccagcggcctcgccgcccgtcaagctgtccacatccctggcctcagcccgccacatcaccctgacctgcttacgcccagattttcttcaatcacatctgaataaatcacttgaagaaagcttatagcttcattgcaccatgtgtggcatttgggcgctgtttggcagtgatgattgcctttctgttcagtgtctgagtgctatgaagattgcacacagaggtccagatgcattccgttttgagaatgtcaatggatacaccaactgctgctttggatttcaccggttggcggtagttgacccgctgtttggaatgcagccaattcgagtgaagaaatatccgtatttgtggctctgttacaatggtgaaatctacaaccataagaagatgcaacagcattttgaatttgaataccagaccaaagtggatggtgagataatccttcatctttatgacaaaggaggaattgagcaaacaatttgtatgttggatggtgtgtttgcatttgttttactggatactgccaataagaaagtgttcctgggtagagatacatatggagtcagacctttgtttaaagcaatgacagaagatggatttttggctgtatgttcagaagctaaaggtcttgttacattgaagcactccgcgactccctttttaaaagtggagccttttcttcctggacactatgaagttttggatttaaagccaaatggcaaagttgcatccgtggaaatggttaaatatcatcactgtcgggatgaacccctgcacgccctctatgacaatgtggagaaactctttccaggttttgagatagaaactgtgaagaacaacctcaggatcctttttaataatgctgtaaagaaacgtttgatgacagacagaaggattggctgccttttatcagggggcttggactccagcttggttgctgccactctgttgaagcagctgaaagaagcccaagtacagtatcctctccagacatttgcaattggcatggaagacagccccgatttactggctgctagaaaggtggcagatcatattggaagtgaacattatgaagtcctttttaactctgaggaaggcattcaggctctggatgaagtcatattttccttggaaacttatgacattacaacagttcgtgcttcagtaggtatgtatttaatttccaagtatattcggaagaacacagatagcgtggtgatcttctctggagaaggatcagatgaacttacgcagggttacatatattttcacaaggctccttctcctgaaaaagccgaggaggagagtgagaggcttctgagggaactctatttgtttgatgttctccgcgcagatcgaactactgctgcccatggtcttgaactgagagtcccatttctagatcatcgattttcttcctattacttgtctctgccaccagaaatgagaattccaaagaatgggatagaaaaacatctcctgagagagacgtttgaggattccaatctgatacccaaagagattctctggcgaccaaaagaagccttcagtgatggaataacttcagttaagaattcctggtttaagattttacaggaatacgttgaacatcaggttgatgatgcaatgatggcaaatgcagcccagaaatttcccttcaatactcctaaaaccaaagaaggatattactaccgtcaagtctttgaacgccattacccaggccgggctgactggctgagccattactggatgcccaagtggatcaatgccactgacccttctgcccgcacgctgacccactacaagtcagctgtcaaagcttaggtggtctttatgctgtaatgtgaaagcaaatatttcttcgtgttggatggggactgtgggtagataggggaacaatgagagtcaactcaggctaacttgggtgtgaaaaaaataaaagtcctaaatct

SEQ ID NO: 919 - protein, 561 aa, Homo sapiens
MCGIWALFGSDDCLSVQCLSAMKIAHRGPDAFRFENVNGYTNCCFGFHRLAVVDPLFGMQPIRVKKYPYLWLCYNGEIYNHKKMQQHFEFEYQTKVDGEIILHLYDKGGIEQTICMLDGVFAFVLLDTANKKVFLGRDTYGVRPLFKAMTEDGFLAVCSEAKGLVTLKHSATPFLKVEPFLPGHYEVLDLKPNGKVASVEMVKYHHCRDEPLHALYDNVEKLFPGFEIETVKNNLRILFNNAVKKRLMTDRRIGCLLSGGLDSSLVAATLLKQLKEAQVQYPLQTFAIGMEDSPDLLAARKVADHIGSEHYEVLFNSEEGIQALDEVIFSLETYDITTVRASVGMYLISKYIRKNTDSVVIFSGEGSDELTQGYIYFHKAPSPEKAEEESERLLRELYLFDVLRADRTTAAHGLELRVPFLDHRFSSYYLSLPPEMRIPKNGIEKHLLRETFEDSNLIPKEILWRPKEAFSDGITSVKNSWFKILQEYVEHQVDDAMMANAAQKFPFNTPKTKEGYYYRQVFERHYPGRADWLSHYWMPKWINATDPSARTLTHYKSAVKA

SEQ ID NO: 920 - DNA, 2348 bp, Homo sapiens
cctttctgtcctggttccctgaagcatcgagagggaaccgcggccggcaggccggaccgctccggagaggaggcagcggcagtttgagcccctgtaaatgttatatgtgtacttttttttactatgtggcgtcgaagcctgtggacattttcgcggtccgggtccctgcggcggacgggtcggatcgtgctcgtggccagggcgcagtcaggtgtcgcgtggtcctgatctaggaagagactgcggccttatcaccgtctcggtgtctgctttcaccttcaactgcccccctcctcacctggaccgctcaccctcctcctcccctctcaccccgccatccccaccagtccccacctgtctctgtagactgcaagactcatcaagtgacttgctgagcaaaccctgccgagaagagattttcttcaatcacatctgaataaatcacttgaagaaagcttatagcttcattgcaccatgtgtggcatttgggcgctgtttggcagtgatgattgcctttctgttcagtgtctgagtgctatgaagattgcacacagaggtccagatgcattccgttttgagaatgtcaatggatacaccaactgctgctttggatttcaccggttggcggtagttgacccgctgtttggaatgcagccaattcgagtgaagaaatatccgtatttgtggctctgttacaatggtgaaatctacaaccataagaagatgcaacagcattttgaatttgaataccagaccaaagtggatggtgagataatccttcatctttatgacaaaggaggaattgagcaaacaatttgtatgttggatggtgtgtttgcatttgttttactggatactgccaataagaaagtgttcctgggtagagatacatatggagtcagacctttgtttaaagcaatgacagaagatggatttttggctgtatgttcagaagctaaaggtcttgttacattgaagcactccgcgactccctttttaaaagtggagccttttcttcctggacactatgaagttttggatttaaagccaaatggcaaagttgcatccgtggaaatggttaaatatcatcactgtcgggatgaacccctgcacgccctctatgacaatgtggagaaactctttccaggttttgagatagaaactgtgaagaacaacctcaggatcctttttaataatgctgtaaagaaacgtttgatgacagacagaaggattggctgccttttatcagggggcttggactccagcttggttgctgccactctgttgaagcagctgaaagaagcccaagtacagtatcctctccagacatttgcaattggcatggaagacagccccgatttactggctgctagaaaggtggcagatcatattggaagtgaacattatgaagtcctttttaactctgaggaaggcattcaggctctggatgaagtcatattttccttggaaacttatgacattacaacagttcgtgcttcagtaggtatgtatttaatttccaagtatattcggaagaacacagatagcgtggtgatcttctctggagaaggatcagatgaacttacgcagggttacatatattttcacaaggctccttctcctgaaaaagccgaggaggagagtgagaggcttctgagggaactctatttgtttgatgttctccgcgcagatcgaactactgctgcccatggtcttgaactgagagtcccatttctagatcatcgattttcttcctattacttgtctctgccaccagaaatgagaattccaaagaatgggatagaaaaacatctcctgagagagacgtttgaggattccaatctgatacccaaagagattctctggcgaccaaaagaagccttcagtgatggaataacttcagttaagaattcctggtttaagattttacaggaatacgttgaacatcaggttgatgatgcaatgatggcaaatgcagcccagaaatttcccttcaatactcctaaaaccaaagaaggatattactaccgtcaagtctttgaacgccattacccaggccgggctgactggctgagccattactggatgcccaagtggatcaatgccactgacccttctgcccgcacgctgacccactacaagtcagctgtcaaagcttaggtggtctttatgctgtaatgtgaaagcaaatatttcttcgtgttggatggggactgtgggtagataggggaacaatgagagtcaactcaggctaacttgggtgtgaaaaaaataaaagtcctaaatctaaaaaaaaaaaaaaaaaaaaaaaaaaaaaaaaaaaaaaaaaaaaaaaaaaaaaaaaaaaa

SEQ ID NO: 921 - protein, 561 aa, Homo sapiens; identical to SEQ ID NO: 919

SEQ ID NO: 922 - DNA, 2345 bp, Homo sapiens
cgcaggcatgatgaaacttcccgcacgcgttacaggagccaggtcggtataagcgccagcggcctcgccgcccgtcaagctgtccacatccctggcctcagcccgccacatcaccctgacctgcttacgcccagcctgtggacattttcgcggtccgggtccctgcggcggacgggtcggatcgtgctcgtggccagggcgcagtcaggtgtcgcgtggtcctgatctaggaagagactgcggccttatcaccgtctcggtgtctgctttcaccttcaactgcccccctcctcacctggaccgctcaccctcctcctcccctctcaccccgccatccccaccagtccccacctgtctctgtagactgcaagactcatcaagtgacttgctgagcaaaccctgccgagaagagattttcttcaatcacatctgaataaatcacttgaagaaagcttatagcttcattgcaccatgtgtggcatttgggcgctgtttggcagtgatgattgcctttctgttcagtgtctgagtgctatgaagattgcacacagaggtccagatgcattccgttttgagaatgtcaatggatacaccaactgctgctttggatttcaccggttggcggtagttgacccgctgtttggaatgcagccaattcgagtgaagaaatatccgtatttgtggctctgttacaatggtgaaatctacaaccataagaagatgcaacagcattttgaatttgaataccagaccaaagtggatggtgagataatccttcatctttatgacaaaggaggaattgagcaaacaatttgtatgttggatggtgtgtttgcatttgttttactggatactgccaataagaaagtgttcctgggtagagatacatatggagtcagacctttgtttaaagcaatgacagaagatggatttttggctgtatgttcagaagctaaaggtcttgttacattgaagcactccgcgactccctttttaaaagtggagccttttcttcctggacactatgaagttttggatttaaagccaaatggcaaagttgcatccgtggaaatggttaaatatcatcactgtcgggatgaacccctgcacgccctctatgacaatgtggagaaactctttccaggttttgagatagaaactgtgaagaacaacctcaggatcctttttaataatgctgtaaagaaacgtttgatgacagacagaaggattggctgccttttatcagggggcttggactccagcttggttgctgccactctgttgaagcagctgaaagaagcccaagtacagtatcctctccagacatttgcaattggcatggaagacagccccgatttactggctgctagaaaggtggcagatcatattggaagtgaacattatgaagtcctttttaactctgaggaaggcattcaggctctggatgaagtcatattttccttggaaacttatgacattacaacagttcgtgcttcagtaggtatgtatttaatttccaagtatattcggaagaacacagatagcgtggtgatcttctctggagaaggatcagatgaacttacgcagggttacatatattttcacaaggctccttctcctgaaaaagccgaggaggagagtgagaggcttctgagggaactctatttgtttgatgttctccgcgcagatcgaactactgctgcccatggtcttgaactgagagtcccatttctagatcatcgattttcttcctattacttgtctctgccaccagaaatgagaattccaaagaatgggatagaaaaacatctcctgagagagacgtttgaggattccaatctgatacccaaagagattctctggcgaccaaaagaagccttcagtgatggaataacttcagttaagaattcctggtttaagattttacaggaatacgttgaacatcaggttgatgatgcaatgatggcaaatgcagcccagaaatttcccttcaatactcctaaaaccaaagaaggatattactaccgtcaagtctttgaacgccattacccaggccgggctgactggctgagccattactggatgcccaagtggatcaatgccactgacccttctgcccgcacgctgacccactacaagtcagctgtcaaagcttaggtggtctttatgctgtaatgtgaaagcaaatatttcttcgtgttggatggggactgtgggtagataggggaacaatgagagtcaactcaggctaacttgggtgtgaaaaaaataaaagtcctaaatctaaaaaaaaaaaaaaaaaaaaaaaaaaaaaaaaaaaaaaaaaaaaaaaaaaaaaaaaaaaa

SEQ ID NO: 923 - protein, 561 aa, Homo sapiens; identical to SEQ ID NO: 919

SEQ ID NO: 924 - DNA, 2212 bp, Homo sapiens
agccggatctcagtcagtatagaactaggttaccgcacacgttggcgggggtgggagggtgtgagactggcctccacaccacgaaagatccatcccggaagtgcttactggtcgtctccatgcgccggttcctgggcgtcttagagccaaggcgcgaggctcggagtgagaggtagagctggaggggaccctaagcgccctccgcccgggacgtgagccgctgcgcccaccgggctagacccggcgccatcatgctgcttctgccaagcgccgcggacggccggggcaccgccatcacccacgctctgacctctgcctctacactctgtcaagttgaacctgtgggaagatggtttgaagcttttgttaagaggagaaacagaaatgcttctgcctcttttcaggaactggaggataagaaagagttatccgaggaatcagaagatgaagaattgcagttggaagagtttcccatgctgaaaacacttgatcccaaagactggaagaaccaagatcattatgcagttcttggacttggccatgtgagatacaaggctacacagagacagatcaaagcagctcataaagcaatggttttaaaacatcacccagacaaacggaaagcagctggtgaaccaataaaagaaggagataatgactacttcacttgcataactaaagcttatgaaatgttatctgatccagtgaaaagacgagcatttaacagtgtagatcctacttttgataactcagttccttctaaaagtgaagcaaaggataatttcttcgaagtgtttaccccagtgtttgaaaggaattccagatggtcaaataaaaaaaatgttcctaaacttggtgatatgaattcatcatttgaagatgtagatatattttattctttctggtataattttgattcttggagagaattttcttatttagatgaagaagaaaaagaaaaagcagaatgtcgtgatgagaggagatggattgaaaagcagaacagagcaacaagagcacaaagaaaaaaagaagaaatgaacagaataagaacattagttgacaatgcatacagctgtgatccaaggataaaaaagttcaaggaagaagaaaaagccaagaaagaagcagaaaagaaagcaaaagcagaagctaaacggaaggagcaagaagctaaagaaaaacaaagacaagctgaattagaagctgctcggttagctaaggagaaagaagaggaggaagtcagacagcaagcattgctggcaaagaaggaaaaagatatccagaaaaaagccattaagaaggaaaggcaaaaacttcgaaactcatgcaagacctggaatcatttttctgataatgaggcagagcgggttaaaatgatggaagaagtggaaaaactttgtgatcggcttgaactggcaagcttacagtgcttgaatgaaacactcacatcatgcacaaaagaagtaggaaaggctgctttggaaaaacagatagaagaaataaatgagcaaatcagaaaagagaaagaggaagctgaggctcgtatgcgacaagcatctaagaacacagagaaatcaactggtggaggtggaaatggaagtaaaaattggtcagaagatgatctacaattactaattaaagctgtgaatctgttccctgctggaacaaattcaagatgggaagttattgctaattacatgaacatacattcttcctctggagtcaaaagaactgccaaagatgttattggcaaagcaaagagtctccaaaaacttgaccctcatcaaaaagatgacataaataaaaaggcatttgataagttcaaaaaagaacatggagtggtacctcaagcagacaacgcaacgccttcagaacgatttgaaggtccatatacagacttcaccccttggacaacagaagaacagaagcttttggaacaagctttgaaaacatacccagtaaatacacctgaaagatgggaaaaaatagcagaagcggtgcctggcaggacaaagaaggactgcatgaaacgatacaaggaacttgtcgagatggtaaaagcaaagaaagctgctcaagaacaagtgctgaatgcaagtagagccaagaaatgacaatctttgttgtgtgtgcatttttataataaaactgaaaatactgtaaacattttcattcttaaaattatactcatggtaataatttgaaagta

SEQ ID NO: 925 - protein, 621 aa, Homo sapiens
MLLLPSAADGRGTAITHALTSASTLCQVEPVGRWFEAFVKRRNRNASASFQELEDKKELSEESEDEELQLEEFPMLKTLDPKDWKNQDHYAVLGLGHVRYKATQRQIKAAHKAMVLKHHPDKRKAAGEPIKEGDNDYFTCITKAYEMLSDPVKRRAFNSVDPTFDNSVPSKSEAKDNFFEVFTPVFERNSRWSNKKNVPKLGDMNSSFEDVDIFYSFWYNFDSWREFSYLDEEEKEKAECRDERRWIEKQNRATRAQRKKEEMNRIRTLVDNAYSCDPRIKKFKEEEKAKKEAEKKAKAEAKRKEQEAKEKQRQAELEAARLAKEKEEEEVRQQALLAKKEKDIQKKAIKKERQKLRNSCKTWNHFSDNEAERVKMMEEVEKLCDRLELASLQCLNETLTSCTKEVGKAALEKQIEEINEQIRKEKEEAEARMRQASKNTEKSTGGGGNGSKNWSEDDLQLLIKAVNLFPAGTNSRWEVIANYMNIHSSSGVKRTAKDVIGKAKSLQKLDPHQKDDINKKAFDKFKKEHGVVPQADNATPSERFEGPYTDFTPWTTEEQKLLEQALKTYPVNTPERWEKIAEAVPGRTKKDCMKRYKELVEMVKAKKAAQEQVLNASRAKK

SEQ ID NO: 926 - DNA, 1545 bp, Homo sapiens
gaagacaccaccggaagcaaggaaggtgctgtgtaatcattaaggagcggaggcttttggagctgctaaaatgccggattacctcggtgccgatcagcggaagaccaaagaggatgagaaggacgacaagcccatccgagctctggatgagggggatattgccttgttgaaaacttatggtcagagcacttactctaggcagatcaagcaagttgaagatgacattcagcaacttctcaagaaaattaatgagctcactggtattaaagaatctgacactggcctggccccaccagcactctgggatttggctgcagataagcagacactccagagtgaacagcctttacaggttgccaggtgtacaaagataatcaatgctgattcggaggacccaaaatacattatcaacgtaaagcagtttgccaagtttgtggtggaccttagtgatcaggtggcacctactgacattgaagaagggatgagagtgggcgtggatagaaataaatatcaaattcacattccattgcctcctaagattgacccaacagttaccatgatgcaggtggaagagaaacctgatgtcacatacagtgatgttggtggctgtaaggaacagattgagaaactgcgagaagtagttgaaaccccattacttcatccagagaggtttgtgaaccttggcattgagcctcccaagggcgtgctgctctttggtccacccggtacaggcaagacactctgtgcgcgggcagttgctaatcggactgatgcgtgcttcattcgagttattggatctgagcttgtacagaaatacgtcggtgagggggctcgaatggttcgtgaactctttgaaatggccagaacaaaaaaagcctgccttatcttctttgatgaaattgatgctattggaggggctcgttttgatgatggtgctggaggtgacaatgaagtgcagagaacaatgttggaactgatcaatcagcttgatggttttgatcctcgaggcaatattaaagtgctgatggccactaacagacctgatactttggatccagcactgatgaggccagggagattggatagaaaaattgaatttagcttgcccgatctagagggtcggacccacatatttaagattcacgctcgttcaatgagtgttgaaagagatatcagatttgaactgttagcacgactgtgtccaaatagcactggtgctgagattagaagcgtctgcacagaggctggtatgtttgccatcagagcacggcgaaaaattgctaccgagaaggatttcttggaagctgtaaataaggtcattaagtcttatgccaaattcagtgctactcctcgttacatgacatacaactgaaccctgaaggctttcaagtgaaaactttaaattggaatcctaaccttatatagacttgttaataaccaattcataaacaaataaatggcttcaaaattgtatgcttttttccatatctcttcttgtaatataataaaaggtgatttctaatgttaaaaaaaaaaaaaaaaaaa

SEQ ID NO: 927 - protein, 433 aa, Homo sapiens
MPDYLGADQRKTKEDEKDDKPIRALDEGDIALLKTYGQSTYSRQIKQVEDDIQQLLKKINELTGIKESDTGLAPPALWDLAADKQTLQSEQPLQVARCTKIINADSEDPKYIINVKQFAKFVVDLSDQVAPTDIEEGMRVGVDRNKYQIHIPLPPKIDPTVTMMQVEEKPDVTYSDVGGCKEQIEKLREVVETPLLHPERFVNLGIEPPKGVLLFGPPGTGKTLCARAVANRTDACFIRVIGSELVQKYVGEGARMVRELFEMARTKKACLIFFDEIDAIGGARFDDGAGGDNEVQRTMLELINQLDGFDPRGNIKVLMATNRPDTLDPALMRPGRLDRKIEFSLPDLEGRTHIFKIHARSMSVERDIRFELLARLCPNSTGAEIRSVCTEAGMFAIRARRKIATEKDFLEAVNKVIKSYAKFSATPRYMTYN

SEQ ID NO: 928 - DNA, 2671 bp, Homo sapiens
aggcagcggctgtggagcgcggcggggcggctccgcccagggcagcccgggctgggccaaggagcgagctctcccttctcctgctctcagcctcagtgatcaaggcttcagtgaactgcactggagctcccagcgggggatcttgtcccctgtcccgacttttgtgctgcacattggatctggtgacactcaggaaatgcttgtctccggctgttaaggaataatttcagagtactatggatcatgctgaagaaaatgaaatccttgcagcaacccagaggtactatgtggaaaggcctatctttagtcatccggtcctccaggaaagactacacacaaaggacaaggttcctgattccattgcggataagctgaaacaggcattcacatgtactcctaaaaaaataagaaatatcatttatatgttcctacccataactaaatggctgccagcatacaaattcaaggaatatgtgttgggtgacttggtctcaggcataagcacaggggtgcttcagcttcctcaaggcttagcctttgcaatgctggcagctgtgcctccaatatttggcctgtactcttcattttaccctgttatcatgtattgttttcttggaacctccagacacatatccataggtccttttgctgttattagcctgatgattggtggtgtagctgttcgattagtaccagatgatatagtcattccaggaggagtaaatgcaaccaatggcacagaggccagagatgccttgagagtgaaagtcgccatgtctgtgaccttactttcaggaatcattcagttttgcctaggtgtctgtaggtttggatttgtggccatatatctcacagagcctctggtccgtgggtttaccaccgcagcagctgtgcatgtcttcacctccatgttaaaatatctgtttggagttaaaacaaagcggtacagtggaatcttttccgtggtgtatagtacagttgctgtgttgcagaatgttaaaaacctcaacgtgtgttccctaggcgtcgggctgatggtttttggtttgctgttgggtggcaaggagtttaatgagagatttaaagagaaattgccggcgcctattcctttagagttctttgcggtcgtaatgggaactggcatttcagctgggtttaacttgaaagaatcatacaatgtggatgtcgttggaacacttcctctagggctgctacctccagccaatccggacaccagcctcttccaccttgtgtacgtagatgccattgccatagccatcgttggattttcagtgaccatctccatggccaagaccttagcaaataaacatggctaccaggttgacggcaatcaggagctcattgccctgggactgtgcaattccattggctcactcttccagaccttttcaatttcatgctccttgtctcgaagccttgttcaggagggaaccggtgggaagacacagcttgcaggttgtttggcctcattaatgattctgctggtcatattagcaactggattcctctttgaatcattgccccaggctgtgctgtcggccattgtgattgtcaacctgaagggaatgtttatgcagttctcagatctcccctttttctggagaaccagcaaaatagagctgaccatctggcttaccacttttgtgtcctccttgttcctgggattggactatggtttgatcactgctgtgatcattgctctgctgactgtgatttacagaacacagagtccaagctacaaagtccttggaaagcttcctgaaactgatgtgtatattgatatagacgcatatgaggaggtgaaagaaattcctggaataaaaatatttcaaataaatgcaccaatttactatgcaaatagcgacttgtatagcaatgcattaaaacgaaagactggagtgaacccagcagtcatcatgggagcaaggagaaaggccatgcggaagtacgctaaggaagtcggaaatgcaaatatggccaacgcaactgttgtcaaagcagatgcagaagtagatggagaggatgctaccaagcctgaagaagaggatggtgaagtaaaatatcccccaatagtgatcaaaagcacatttcctgaggaaatgcaaagatttatgcccccaggggataacgtccacactgtcattttggatttcactcaagtcaattttattgattctgttggagtgaaaactctggcagggattgtaaaagaatatggagacgtcggtatatatgtatacttagcaggatgcagtgcacaagttgtgaatgacctcactcggaatagattttttgaaaatcctgccctatgggagctgctgttccacagcattcatgatgcagttttaggcagccaacttagagaggcacttgctgaacaggaagcctcggctcccccttcccaggaggacttggagcccaatgccactcctgccactcctgaggcatagatgaggacctcaccctaggatggggttataagcctctcatgaagttcataatttacacgttttaaatactagacgctagatttttttttctaagggtgaatactagtagtccaggcttgatttggagggtgaatgacgcctagcaagatgtattgtacttgtgtttttttaattgaatacttcaaagataaaaaaaaaaa

SEQ ID NO: 929 - protein, 744 aa, Homo sapiens
MDHAEENEILAATQRYYVERPIFSHPVLQERLHTKDKVPDSIADKLKQAFTCTPKKIRNIIYMFLPITKWLPAYKFKEYVLGDLVSGISTGVLQLPQGLAFAMLAAVPPIFGLYSSFYPVIMYCFLGTSRHISIGPFAVISLMIGGVAVRLVPDDIVIPGGVNATNGTEARDALRVKVAMSVTLLSGIIQFCLGVCRFGFVAIYLTEPLVRGFTTAAAVHVFTSMLKYLFGVKTKRYSGIFSVVYSTVAVLQNVKNLNVCSLGVGLMVFGLLLGGKEFNERFKEKLPAPIPLEFFAVVMGTGISAGFNLKESYNVDVVGTLPLGLLPPANPDTSLFHLVYVDAIAIAIVGFSVTISMAKTLANKHGYQVDGNQELIALGLCNSIGSLFQTFSISCSLSRSLVQEGTGGKTQLAGCLASLMILLVILATGFLFESLPQAVLSAIVIVNLKGMFMQFSDLPFFWRTSKIELTIWLTTFVSSLFLGLDYGLITAVIIALLTVIYRTQSPSYKVLGKLPETDVYIDIDAYEEVKEIPGIKIFQINAPIYYANSDLYSNALKRKTGVNPAVIMGARRKAMRKYAKEVGNANMANATVVKADAEVDGEDATKPEEEDGEVKYPPIVIKSTFPEEMQRFMPPGDNVHTVILDFTQVNFIDSVGVKTLAGIVKEYGDVGIYVYLAGCSAQVVNDLTRNRFFENPALWELLFHSIHDAVLGSQLREALAEQEASAPPSQEDLEPNATPATPEA

SEQ ID NO: 930 - DNA, 2492 bp, Homo sapiens
aggcagcggctgtggagcgcggcggggcggctccgcccagggcagcccgggctgggccaaggagcgagctctcccttctcctgctctcagcctcagtgatcaaggcttcagtgaactgcactggagctcccagcgggggatcttgtcccctgtcccgacttttgtgctgcacattggatctggtgacactcaggaaatgcttgtctccggctgttaaggaataatttcagagtactatggatcatgctgaagaaaatgaaatccttgcagcaacccagaggtactatgtggaaaggcctatctttagtcatccggtcctccaggaaagactacacacaaaggacaaggttcctgattccattgcggataagctgaaacaggcattcacatgtactcctaaaaaaataagaaatatcatttatatgttcctacccataactaaatggctgccagcatacaaattcaaggaatatgtgttgggtgacttggtctcaggcataagcacaggggtgcttcagcttcctcaaggcttagcctttgcaatgctggcagctgtgcctccaatatttggcctgtactcttcattttaccctgttatcatgtattgttttcttggaacctccagacacatatccataggtccttttgctgttattagcctgatgattggtggtgtagctgttcgattagtaccagatgatatagtcattccaggaggagtaaatgcaaccaatggcacagaggccagagatgccttgagagtgaaagtcgccatgtctgtgaccttactttcaggaatcattcagttttgcctaggtgtctgtaggtttggatttgtggccatatatctcacagagcctctggtccgtgggtttaccaccgcagcagctgtgcatgtcttcacctccatgttaaaatatctgtttggagttaaaacaaagcggtacagtggaatcttttccgtggtgtatagtacagttgctgtgttgcagaatgttaaaaacctcaacgtgtgttccctaggcgtcgggctgatggtttttggtttgctgttgggtggcaaggagtttaatgagagatttaaagagaaattgccggcgcctattcctttagagttctttgcggtcgtaatgggaactggcatttcagctgggtttaacttgaaagaatcatacaatgtggatgtcgttggaacacttcctctagggctgctacctccagccaatccggacaccagcctcttccaccttgtgtacgtagatgccattgccatagccatcgttggattttcagtgaccatctccatggccaagaccttagcaaataaacatggctaccaggttgacggcaatcaggagctcattgccctgggactgtgcaattccattggctcactcttccagaccttttcaatttcatgctccttgtctcgaagccttgttcaggagggaaccggtgggaagacacagcttgcaggttgtttggcctcattaatgattctgctggtcatattagcaactggattcctctttgaatcattgccccaggctgtgctgtcggccattgtgattgtcaacctgaagggaatgtttatgcagttctcagatctcccctttttctggagaaccagcaaaatagagctgaccatctggcttaccacttttgtgtcctccttgttcctgggattggactatggtttgatcactgctgtgatcattgctctgctgactgtgatttacagaacacagagtccaagctacaaagtccttggaaagcttcctgaaactgatgtgtatattgatatagacgcatatgaggaggtgaaagaaattcctggaataaaaatatttcaaataaatgcaccaatttactatgcaaatagcgacttgtatagcaatgcattaaaacgaaagactggagtgaacccagcagtcatcatgggagcaaggagaaaggccatgcggaagtacgctaaggaagtcggaaatgcaaatatggccaacgcaactgttgtcaaagcagatgcagaagtagatggagaggatgctaccaagcctgaagaagaggatggtgaagtaaaatatcccccaatagtgatcaaaagcacatttcctgaggaaatgcaaagatttatgcccccaggggataacgtccacactgtcattttggatttcactcaagtcaattttattgattctgttggagtgaaaactctggcagggattgtaaaagaatatggagacgtcggtatatatgtatacttagcaggatgcagtgctttcatacagagatgaccagaagatggagaccgtaggggaaatgccgtgtaatccaagcagttcaggctttggggccaggtggacagggtttgaatgccagctctggaatctgttagtggggtgacctcagccaagtcacttaacacttctgaactttgttttctcttttgtgaaataaagaaaaaatgaatctacaaaaaaaaaaaaaaaaaa

SEQ ID NO: 931 - protein, 685 aa, Homo sapiens
MDHAEENEILAATQRYYVERPIFSHPVLQERLHTKDKVPDSIADKLKQAFTCTPKKIRNIIYMFLPITKWLPAYKFKEYVLGDLVSGISTGVLQLPQGLAFAMLAAVPPIFGLYSSFYPVIMYCFLGTSRHISIGPFAVISLMIGGVAVRLVPDDIVIPGGVNATNGTEARDALRVKVAMSVTLLSGIIQFCLGVCRFGFVAIYLTEPLVRGFTTAAAVHVFTSMLKYLFGVKTKRYSGIFSVVYSTVAVLQNVKNLNVCSLGVGLMVFGLLLGGKEFNERFKEKLPAPIPLEFFAVVMGTGISAGFNLKESYNVDVVGTLPLGLLPPANPDTSLFHLVYVDAIAIAIVGFSVTISMAKTLANKHGYQVDGNQELIALGLCNSIGSLFQTFSISCSLSRSLVQEGTGGKTQLAGCLASLMILLVILATGFLFESLPQAVLSAIVIVNLKGMFMQFSDLPFFWRTSKIELTIWLTTFVSSLFLGLDYGLITAVIIALLTVIYRTQSPSYKVLGKLPETDVYIDIDAYEEVKEIPGIKIFQINAPIYYANSDLYSNALKRKTGVNPAVIMGARRKAMRKYAKEVGNANMANATVVKADAEVDGEDATKPEEEDGEVKYPPIVIKSTFPEEMQRFMPPGDNVHTVILDFTQVNFIDSVGVKTLAGIVKEYGDVGIYVYLAGCSAFIQR

SEQ ID NO: 932 - DNA, 1965 bp, Homo sapiens
aggcagcggctgtggagcgcggcggggcggctccgcccagggcagcccgggctgggccaaggagcgagctctcccttctcctgctctcagcctcagtgatcaaggcttcagtgaactgcactggagctcccagcgggggatcttgtcccctgtcccgacttttgtgctgcacattggatctggtgacactcaggaaatgcttgtctccggctgttaaggaataatttcagagtactatggatcatgctgaagaaaatgaaatccttgcagcaacccagaggtactatgtggaaaggcctatctttagtcatccggtcctccaggaaagactacacacaaaggacaaggttcctgattccattgcggataagctgaaacaggcattcacatgtactcctaaaaaaataagaaatatcatttatatgttcctacccataactaaatggctgccagcatacaaattcaaggaatatgtgttgggtgacttggtctcaggcataagcacaggggtgcttcagcttcctcaaggcttagcctttgcaatgctggcagctgtgcctccaatatttggcctgtactcttcattttaccctgttatcatgtattgttttcttggaacctccagacacatatccataggtccttttgctgttattagcctgatgattggtggtgtagctgttcgattagtaccagatgatatagtcattccaggaggagtaaatgcaaccaatggcacagaggccagagatgccttgagagtgaaagtcgccatgtctgtgaccttactttcaggaatcattcagttttgcctaggtgtctgtaggtttggatttgtggccatatatctcacagagcctctggtccgtgggtttaccaccgcagcagctgtgcatgtcttcacctccatgttaaaatatctgtttggagttaaaacaaagcggtacagtggaatcttttccgtggtgtatagtacagttgctgtgttgcagaatgttaaaaacctcaacgtgtgttccctaggcgtcgggctgatggtttttggtttgctgttgggtggcaaggagtttaatgagagatttaaagagaaattgccggcgcctattcctttagagttctttgcggtcgtaatgggaactggcatttcagctgggtttaacttgaaagaatcatacaatgtggatgtcgttggaacacttcctctagggctgctacctccagccaatccggacaccagcctcttccaccttgtgtacgtagatgccattgccatagccatcgttggattttcagtgaccatctccatggccaagaccttagcaaataaacatggctaccaggttgacggcaatcaggagctcattgccctgggactgtgcaattccattggctcactcttccagaccttttcaatttcatgctccttgtctcgaagccttgttcaggagggaaccggtgggaagacacagcttgcaggttgtttggcctcattaatgattctgctggtcatattagcaactggattcctctttgaatcattgccccaggctgtgctgtcggccattgtgattgtcaacctgaagggaatgtttatgcagttctcagatctcccctttttctggagaaccagcaaaatagagctgaccatctggcttaccacttttgtgtcctccttgttcctgggattggactatggtttgatcactgctgtgatcattgctctgctgactgtgatttacagaacacagagctttcatacagagatgaccagaagatggagaccgtaggggaaatgccgtgtaatccaagcagttcaggctttggggccaggtggacagggtttgaatgccagctctggaatctgttagtggggtgacctcagccaagtcacttaacacttctgaactttgttttctcttttgtgaaataaagaaaaaatgaatctacaaaaaaaaaaaaaaaaaa

SEQ ID NO: 933 - protein, 516 aa, Homo sapiens
MDHAEENEILAATQRYYVERPIFSHPVLQERLHTKDKVPDSIADKLKQAFTCTPKKIRNIIYMFLPITKWLPAYKFKEYVLGDLVSGISTGVLQLPQGLAFAMLAAVPPIFGLYSSFYPVIMYCFLGTSRHISIGPFAVISLMIGGVAVRLVPDDIVIPGGVNATNGTEARDALRVKVAMSVTLLSGIIQFCLGVCRFGFVAIYLTEPLVRGFTTAAAVHVFTSMLKYLFGVKTKRYSGIFSVVYSTVAVLQNVKNLNVCSLGVGLMVFGLLLGGKEFNERFKEKLPAPIPLEFFAVVMGTGISAGFNLKESYNVDVVGTLPLGLLPPANPDTSLFHLVYVDAIAIAIVGFSVTISMAKTLANKHGYQVDGNQELIALGLCNSIGSLFQTFSISCSLSRSLVQEGTGGKTQLAGCLASLMILLVILATGFLFESLPQAVLSAIVIVNLKGMFMQFSDLPFFWRTSKIELTIWLTTFVSSLFLGLDYGLITAVIIALLTVIYRTQSFHTEMTRRWRP

SEQ ID NO: 934 - DNA, 1422 bp, Homo sapiens
aggcagcggctgtggagcgcggcggggcggctccgcccagggcagcccgggctgggccaaggagcgagctctcccttctcctgctctcagcctcagtgatcaaggcttcagtgaactgcactggagctcccagcgggggatcttgtcccctgtcccgacttttgtgctgcacattggatctggtgacactcaggaaatgcttgtctccggctgttaaggaataatttcagagtactatggatcatgctgaagaaaatgaaatccttgcagcaacccagaggtactatgtggaaaggcctatctttagtcatccggtcctccaggaaagactacacacaaaggacaaggttcctgattccattgcggataagctgaaacaggcattcacatgtactcctaaaaaaataagaaatatcatttatatgttcctacccataactaaatggctgccagcatacaaattcaaggaatatgtgttgggtgacttggtctcaggcataagcacaggggtgcttcagcttcctcaaggcttagcctttgcaatgctggcagctgtgcctccaatatttggcctgtactcttcattttaccctgttatcatgtattgttttcttggaacctccagacacatatccataggtccttttgctgttattagcctgatgattggtggtgtagctgttcgattagtaccagatgatatagtcattccaggaggagtaaatgcaaccaatggcacagaggccagagatgccttgagagtgaaagtcgccatgtctgtgaccttactttcaggaatcattcagttttgcctaggtgtctgtaggtttggatttgtggccatatatctcacagagcctctggtccgtgggtttaccaccgcagcagctgtgcatgtcttcacctccatgttaaaatatctgtttggagttaaaacaaagcggtacagtggaatcttttccgtggtgtatagtacagttgctgtgttgcagaatgttaaaaacctcaacgtgtgttccctaggcgtcgggctgatggtttttggtttgctgttgggtggcaaggagtttaatgagagatttaaagagaaattgccggcgcctattcctttagagttctttgcggtcgtaatgggaactggcatttcagctgggtttaacttgaaagaatcatacaatgtggatgtcgttggaacacttcctctaggctttcatacagagatgaccagaagatggagaccgtaggggaaatgccgtgtaatccaagcagttcaggctttggggccaggtggacagggtttgaatgccagctctggaatctgttagtggggtgacctcagccaagtcacttaacacttctgaactttgttttctcttttgtgaaataaagaaaaaatgaatctacaaaaaaaaaaaaaaaaaa

SEQ ID NO: 935 - protein, 335 aa, Homo sapiens
MDHAEENEILAATQRYYVERPIFSHPVLQERLHTKDKVPDSIADKLKQAFTCTPKKIRNIIYMFLPITKWLPAYKFKEYVLGDLVSGISTGVLQLPQGLAFAMLAAVPPIFGLYSSFYPVIMYCFLGTSRHISIGPFAVISLMIGGVAVRLVPDDIVIPGGVNATNGTEARDALRVKVAMSVTLLSGIIQFCLGVCRFGFVAIYLTEPLVRGFTTAAAVHVFTSMLKYLFGVKTKRYSGIFSVVYSTVAVLQNVKNLNVCSLGVGLMVFGLLLGGKEFNERFKEKLPAPIPLEFFAVVMGTGISAGFNLKESYNVDVVGTLPLGFHTEMTRRWRP

SEQ ID NO: 936 - DNA, 11564 bp, Homo sapiens
tcggcgggggcccgctcccaggcccgctcccgagcccgttccgctcccgtccgccttcttctcgccttctctccgcgtggctcctccgtcccggcgtctccaaaactgaatgagcgagcggcgcgtagggcgcgcggcggcggcggcggcggcggcggcatggagcgcagtggctgggcccggcagactttcctcctagcgctgttgctgggggcgacgctgagggcgcgcgcggcggctggctattacccccgcttttcgcccttctttttcctgtgcacccaccacggggagctggaaggggatggggagcagggcgaggtgctcatttccctgcatattgcgggcaaccccacctactacgttccgggacaagaataccatgtgacaatttcaacaagcaccttttttgacggcttgctggtgacaggactatacacatctacaagtgttcaggcatcacagagcattggaggttccagtgctttcggatttgggatcatgtctgaccaccagtttggtaaccagtttatgtgcagtgtggtagcctctcacgtgagtcacctgcccacaaccaacctcagtttcatctggattgctccacctgcgggcacaggctgtgtgaatttcatggctacagcaacacaccggggccaggttattttcaaagatgctttagcccagcagttgtgtgaacaaggagctccaacagatgtcactgtgcacccacatctagctgaaatacatagtgacagcattatcctgagagatgactttgactcctaccaccaactgcaattaaatccaaatatatgggttgaatgtaacaactgtgagactggagaacagtgtggcgcgattatgcatggcaatgccgtcaccttctgtgaaccatatggcccacgagaactgattaccacaggccttaatacaacaacagcttctgtcctccaattttccattgggtcaggttcatgtcgctttagttattcagaccccagcatcatcgtgttatatgccaagaataactctgcggactggattcagctagagaaaattagagccccttccaatgtcagcacaatcatccatatcctctaccttcctgaggacgccaaaggggagaatgtccaatttcagtggaagcaggaaaatcttcgtgtaggtgaagtgtatgaagcctgctgggccttagataacatcttgatcatcaattcagctcacagacaagtcgttttagaagatagtctcgacccagtggacacaggcaactggcttttcttcccaggagctacagttaagcatagctgtcagtcagatgggaactccatttatttccatggaaatgaaggcagcgagttcaattttgccaccaccagggatgtagatctttccacagaagatattcaagagcaatggtcagaagaatttgagagccagcctacaggatgggatgtcttgggagctgtcattggtacagaatgtggaacgatagaatcaggcttatcaatggtcttcctcaaagatggagagaggaaattatgcactccatccatggacactaccggttatgggaacctgaggttttactttgtgatgggaggaatttgtgaccctggaaattctcatgaaaatgacataatcctgtatgcaaaaattgaaggaagaaaagagcatataacactggataccctttcctattcctcatataaggttccgtctttggtttctgtggtcatcaatcctgaacttcagactcctgctaccaaattttgtctcaggcaaaagaaccatcaaggacataataggaatgtctgggctgtagactttttccatgtcttgcctgttctcccttctacaatgtctcacatgatacagttttccatcaatctgggatgtggaacgcatcagcctggtaacagtgtcagcttggaattttctaccaaccatgggcgctcctggtccctccttcacactgaatgcttacctgagatctgtgctggaccccacctcccccacagcactgtctactcctctgaaaactacagtgggtggaaccgaataacaattccccttcctaacgcagcactaacccggaacaccaggattcgctggagacaaacaggaccaatccttggaaacatgtgggcaattgataatgtttatattggcccgtcatgtctcaaattctgttctggcagaggacagtgcactagacatggttgcaagtgtgaccctggattttctggcccagcttgtgagatggcatcccagacattcccaatgtttatttctgaaagctttggcagttccaggctctcctcttaccataacttttactctatccgtggtgctgaagtcagctttggttgtggtgtcttggccagtggtaaggccctggttttcaacaaagatgggcggcgtcagctaattacatctttccttgacagctcacaatccaggtttctccagttcacactgagactggggagcaaatctgttctgagcacgtgcagagcccctgatcagcctggtgaaggagttttgttgcattattcttatgataatgggataacttggaaactcctggagcattattcatatctcagctatcatgagcccagaataatctccgtagaactaccaggtgatgcaaagcagtttggaattcagttcagatggtggcaaccgtatcattcttcccagagagaagatgtatgggctattgatgagattatcatgacatctgtgcttttcaacagcattagtcttgactttaccaatcttgtggaggtcactcagtctctgggattctaccttggaaatgttcagccatactgtggccacgactggaccctttgttttacaggagattctaaacttgcctcaagtatgcgctatgtggaaacacaatcaatgcagataggagcatcctatatgattcagttcagtttggtgatgggatgtggccagaaatacaccccacacatggacaaccaggtgaagctggagtactcaaccaaccacggccttacctggcacctcgtccaagaagaatgccttccaagtatgccaagttgtcaggaatttacatcagcaagtatttaccatgccagtgagtttacacagtggaggagagtcatagtgcttcttccccagaaaacttggtccagtgctacccgtttccgctggagccagagctattacacagctcaagacgagtgggctttggacagcatttacattgggcagcagtgccccaacatgtgcagtgggcatggctcatgcgatcatggcatatgcaggtgtgaccaggggtaccaaggcactgaatgccacccagaagctgcccttccgtccacaattatgtcagattttgagaaccagaatggctgggagtctgactggcaagaagttattgggggagaaattgtaaaaccagaacaagggtgtggtgtcatctcttctggatcatctctgtacttcagcaaggctgggaaaagacagctggtgagttgggacctggatacttcttgggtggactttgtccagttctacatccagataggcggagagagtgcttcatgcaacaagcctgacagcagagaggagggcgtcctccttcagtacagcaacaatgggggcatccagtggcacctgctagcagagatgtacttttcagacttcagcaaacccagatttgtctatctggagcttccagctgctgccaagaccccttgcaccaggttccgctggtggcagcccgtgttctcaggggaggactatgaccagtgggcagtcgatgacatcatcattctgtccgagaagcagaagcagatcatcccagttatcaatccaactttacctcagaacttttatgagaagccagcttttgattaccctatgaatcagatgagtgtgtggttgatgttggctaatgaaggaatggttaaaaatgaaaccttctgtgctgccacaccatcagcaatgatatttggaaaatcagatggagatcgatttgcagtaactcgagatttgaccctgaaacctggatatgtgctacagttcaagctaaacataggttgtgccaatcaattcagcagtactgctccagttcttcttcagtactctcatgatgctggtatgtcctggtttctggtgaaagaaggctgttacccggcttctgcaggcaaaggatgcgaaggaaactccagagaactaagtgagcccaccatgtatcacacaggggactttgaagaatggacaagaatcaccattgttattccaaggtctcttgcatccagcaagaccagattccgatggatccaggagagcagctcacagaaaaacgtgcctccatttggtttagatggagtgtacatatccgagccttgtcccagttactgcagtggccatggggactgcatttcaggagtgtgtttctgtgacctgggatatactgctgcacaaggaacctgtgtgtcaaatgtccccaatcacaatgagatgttcgataggtttgaggggaagctcagccctctgtggtacaagataacaggtgcccaggttggaactggctgtggaacacttaacgatggcaaatctctctacttcaatggccctgggaaaagggaagcccggacggtccctctggacaccaggaatatcagacttgttcaattttatatacaaattggaagcaaaacttcaggcattacctgcatcaaaccaagaactagaaatgaagggcttattgttcagtattcaaatgacaatgggatactctggcatttgcttcgagagttggacttcatgtccttcctggaaccacagatcatttccattgacctgccacaggacgcgaagacacctgcaacggcatttcgatggtggcaaccgcaacatgggaagcattcagcccagtgggctttggatgatgttcttataggaatgaatgacagctctcaaactggatttcaagacaaatttgatggctctatagatttgcaagccaactggtatcgaatccaaggaggtcaagttgatattgactgtctctctatggatactgctctgatattcactgaaaacataggaaaacctcgttatgctgagacctgggattttcatgtgtcagcatctacctttttgcagtttgaaatgagcatgggctgtagcaagcccttcagcaactcccacagtgtacagctccagtattctctgaacaatggcaaggactggcatcttgtcaccgaagagtgtgttcctccaaccattggctgtctgcattacacggaaagttcaatttacacctcggaaagattccagaattggaagcggatcactgtctaccttccactctccaccatttctcccaggacccggttcagatggattcaggccaactacactgtgggggctgattcctgggcgattgataatgttgtactggcctcagggtgcccttggatgtgctcaggacgagggatttgtgatgctggacgctgtgtgtgtgaccggggctttggtggaccctattgtgttcctgttgttcctctgccctcgattcttaaagacgatttcaatgggaatttacatcctgacctttggcctgaagtgtatggtgcagagagggggaatctgaatggtgaaaccatcaaatctggaacatctctaatttttaaaggggaaggactaaggatgcttatttcaagagatctagattgtacaaatacaatgtatgtccagttttcacttagatttatagcaaaaagtaccccagagagatctcactctattctgttacaattctccatcagtggaggaatcacttggcacctgatggatgaattttactttcctcaaacaacgaatatacttttcatcaatgttcccttgccatacactgcccaaaccaatgctacaagattcagactctggcaaccttataataacggtaagaaagaagaaatctggattgttgatgacttcattatcgatggaaataatgtaaacaaccctgtgatgctcttggatacatttgattttgggcccagagaagacaattggtttttctatcctggtggtaacatcggtctttattgtccatattcttcaaagggggcacctgaagaagattcagctatggtgtttgtttcaaatgaagttggtgagcattccattaccacccgtgacctaaatgtgaatgagaacaccatcatacaatttgagatcaacgttggctgttcgactgatagctcatccgcggatccagtgagactggaattttcaagggacttcggggcgacctggcaccttctgctgcccctctgctaccacagcagcagccacgtcagctctttatgctccaccgagcaccaccccagcagcacctactacgcaggaaccatgcagggctggaggagggaggtcgtgcactttgggaagctgcacctttgtggatctgtccgtttcagatggtaccagggattttaccctgccggctctcagccagtgacatgggccattgataatgtctacatcggtccccagtgtgaggagatgtgtaatggacaggggagctgtatcaatggaaccaaatgtatatgtgaccctggctactcaggtccaacctgtaaaataagcaccaaaaatcctgattttctcaaagatgatttcgaaggtcagctagaatctgatagattcttattaatgagtggtgggaaaccatctcgaaagtgtggaatcctttctagtggaaacaacctctttttcaatgaagatggcttgcgcatgttgatgacacgagacctggatttatcacatgctagatttgtgcagttcttcatgagactgggatgtggtaaaggcgttcctgaccccaggagtcaacccgtgctcctacagtattctctcaacggtggcctctcgtggagtcttcttcaggagttccttttcagcaattccagcaatgtgggcaggtacattgccctggagatacccttgaaagcccgttctggttctactcgccttcgctggtggcaaccgtctgagaatgggcacttctacagcccctgggttatcgatcagattcttattggaggaaatatttctggtaatacggtcttggaagatgatttcacaacccttgatagtaggaaatggctgcttcacccaggaggcaccaagatgcccgtgtgtggctctactggtgatgccctggtcttcattgaaaaggccagcacccgttacgtggtcagcacagacgttgccgtgaatgaggattccttcctacagatagacttcgctgcctcctgctcagtcacagactcttgttatgcgattgaattggaatactcagtagatcttggattgtcatggcacccattggtaagggactgtctgcctaccaatgtggaatgcagtcgctatcatctgcaacggatcctggtgtcagacactttcaacaagtggactagaatcactctgcctctccctccttataccaggtcccaagccactcgtttccgttggcatcaaccagctccttttgacaagcagcagacatgggcaatagataatgtctatatcggggatggctgcatagacatgtgcagtggccatgggagatgcatccagggaaactgcgtctgtgatgaacagtggggtggcctgtactgtgatgaccccgagacctctcttccaacccaactcaaagacaacttcaatcgagctccatccagtcagaactggctgactgtgaacggagggaaattgagtacagtgtgtggagccgtggcgtcgggaatggctctccatttcagtgggggttgtagtcgattattagtcactgtggatctaaacctcactaatgctgagttcatccaattttacttcatgtatgggtgcctgattacaccaaacaaccgtaaccaaggtgttctcttggaatattctgtcaatggaggcattacctggaacctgctcatggagattttctatgaccagtacagtaagcccgggtttgtgaatatccttctccctcctgatgctaaagagattgccactcgcttccgctggtggcagccaagacatgacggcctggatcagaacgactgggccattgacaatgtcctcatctcaggctctgctgaccaaaggaccgttatgctggacaccttcagcagcgccccagtaccccagcatgagcgctcccctgcagatgccggccctgtcgggaggatcgcctttgacatgtttatggaagacaaaacttcagtgaatgagcactggctattccatgatgattgtacagtagaaagattctgtgactcccctgatggtgtgatgctctgtggcagtcatgatggacgggaggtgtatgcagtgacccatgacctgactcccactgaaggctggattatgcaattcaagatctcagttggatgtaaggtgtctgaaaaaattgcccagaatcaaattcatgtgcagtattctactgacttcggtgtgagttggaattatctggtccctcagtgcttgcctgctgacccaaaatgctctggaagtgtttctcagccatctgtattctttccaactaaagggtggaaaaggatcacctacccacttcctgaaagcttagtgggaaatccggtaaggtttaggttctatcagaagtactcagacatgcagtgggcaatcgataatttctacctgggccctggatgcttggacaactgcaggggccatggagattgcttaagggaacagtgcatctgtgatccgggatactcagggccaaactgctacttgacccacactctgaagactttcctgaaggaacgctttgacagtgaagaaatcaaacctgacttatggatgtccttagaaggtggaagtacttgcactgagtgtggaattcttgccgaggacactgcactctattttgggggatccactgtgagacaagcggttacacaagatttggatcttcgaggtgcaaagttcctgcaatactgggggcgcatcggtagtgagaacaacatgacctcttgccatcgtcccatctgccggaaggaaggcgtgctgttggactactctaccgatggaggaattacctggactttgctccatgagatggattaccagaaatacatttctgttagacacgactacatacttcttcctgaagatgccctcaccaacacaactcgacttcgctggtggcagccttttgtgatcagcaatggaattgtggtctctggggtggagcgtgctcagtgggcactggacaacattttgattggtggagcagaaatcaatcccagccaattggtggacacttttgatgatgaaggcacttcccatgaagaaaactggagtttttaccctaatgctgtaaggacagcaggattttgtggcaatccatcctttcacctctattggccaaataaaaagaaggacaagactcacaatgctctctcctcccgagaactcattatacagccaggatacatgatgcagtttaaaattgtggtgggttgtgaagccacttcttgtggtgaccttcattccgtaatgctggaatacactaaggatgcaagatcggattcctggcagctcgtacagacccagtgccttccttcctcttctaacagcattggctgctcccctttccagttccatgaagccaccatctacaactctgtcaacagctcaagctggaaaagaatcaccatccagctgcctgaccatgtctcctctagtgcaacacagttccgctggatccagaagggagaagaaactgagaagcaaagctgggcaattgaccacgtgtacattggagaggcttgccccaagctctgcagcgggcacggatactgcacgaccggtgccatctgcatctgcgacgagagcttccaaggtgatgactgctctgttttcagtcacgaccttcccagttatattaaagataattttgagtccgcaagagtcaccgaggcaaactgggagaccattcaaggtggagtcataggaagtggctgtgggcagctggccccctacgcccatggagactcactgtactttaatggctgtcagatcaggcaagcagctaccaagcctctggatctcactcgagcaagcaaaatcatgtttgttttgcaaattgggagcatgtcgcagacggacagctgcaacagtgacctgagtggcccccacgctgtggacaaggcagtgctgctgcaatacagcgtcaacaacgggatcacctggcatgtcatcgcccagcaccagccaaaggacttcacacaagctcagagagtgtcttacaatgtccccctggaggcacggatgaaaggagtcttactgcgctggtggcaaccacgccacaatggaacaggtcatgatcaatgggctttggaccatgtggaggtcgtcctagtaagcactcgcaaacaaaattacatgatgaatttttcacgacaacatgggctcagacatttctacaacagaagacgaaggtcacttaggcgatacccatgaagaatcaaaaagtttattttttttcttccaacatgtgatgtgttgctctccattcttttaaatctcgcactacatctgatatcaggaaatatctgtgaaggacttggtgattacctgaaagcccttctcaagaccgagtgtacaccactttcccacactgtgaactaatgacaagtgacttatttgctcataagtaaatgtcttcatgttgatgtgtccgtgaaagttgtgatctgttgtaatatcagttacagtggcagtattgacaataagaaacagtttaacagaaaaatgaaatttaagcacaaaaaatttaagagattttatgtttaaaatggcatttagcacagtatttaacattcttggtcacaaagctatttaagtggactgtatttcggctatgtctcatgttttatatgattaaattatcattgtttgtcctttatgtattctcttctacaatacaacacattgaaactgtatttacttgttatgttgtaatattttgctgctgaatttggggctacttatattctgcagaaaattaattgaaatacctattcaagaagatagttgtaaagatattgtatctcctttaatatactccttaaaaatgtatgttggtttagcgttgttttgtggataagaaaaatgcttgaccctgaaatattttctactttaaattgtggatgaagaccctatctcccacaaataagttcccatttccttgtctaaagatctttttttaagtgttctgtggctgatttactaacagtaactgccattttttgtctgtgataacagagtgatttgtaaaacagtggttgttttttcattgtgttttcttcgtggattgttttttctgcgggtcatattcataccttctgatgaagttgtacaacaccagcaacattataatggccctgtagctctgaatgctatttgtgtaactgaaaggttgcactctagggtgaaccaagctataaaagcccatgcttaaataaaaattatgtccaaaagcc

SEQ ID NO: 937 - protein, 3460 aa, Homo sapiens
MERSGWARQTFLLALLLGATLRARAAAGYYPRFSPFFFLCTHHGELEGDGEQGEVLISLHIAGNPTYYVPGQEYHVTISTSTFFDGLLVTGLYTSTSVQASQSIGGSSAFGFGIMSDHQFGNQFMCSVVASHVSHLPTTNLSFIWIAPPAGTGCVNFMATATHRGQVIFKDALAQQLCEQGAPTDVTVHPHLAEIHSDSIILRDDFDSYHQLQLNPNIWVECNNCETGEQCGAIMHGNAVTFCEPYGPRELITTGLNTTTASVLQFSIGSGSCRFSYSDPSIIVLYAKNNSADWIQLEKIRAPSNVSTIIHILYLPEDAKGENVQFQWKQENLRVGEVYEACWALDNILIINSAHRQVVLEDSLDPVDTGNWLFFPGATVKHSCQSDGNSIYFHGNEGSEFNFATTRDVDLSTEDIQEQWSEEFESQPTGWDVLGAVIGTECGTIESGLSMVFLKDGERKLCTPSMDTTGYGNLRFYFVMGGICDPGNSHENDIILYAKIEGRKEHITLDTLSYSSYKVPSLVSVVINPELQTPATKFCLRQKNHQGHNRNVWAVDFFHVLPVLPSTMSHMIQFSINLGCGTHQPGNSVSLEFSTNHGRSWSLLHTECLPEICAGPHLPHSTVYSSENYSGWNRITIPLPNAALTRNTRIRWRQTGPILGNMWAIDNVYIGPSCLKFCSGRGQCTRHGCKCDPGFSGPACEMASQTFPMFISESFGSSRLSSYHNFYSIRGAEVSFGCGVLASGKALVFNKDGRRQLITSFLDSSQSRFLQFTLRLGSKSVLSTCRAPDQPGEGVLLHYSYDNGITWKLLEHYSYLSYHEPRIISVELPGDAKQFGIQFRWWQPYHSSQREDVWAIDEIIMTSVLFNSISLDFTNLVEVTQSLGFYLGNVQPYCGHDWTLCFTGDSKLASSMRYVETQSMQIGASYMIQFSLVMGCGQKYTPHMDNQVKLEYSTNHGLTWHLVQEECLPSMPSCQEFTSASIYHASEFTQWRRVIVLLPQKTWSSATRFRWSQSYYTAQDEWALDSIYIGQQCPNMCSGHGSCDHGICRCDQGYQGTECHPEAALPSTIMSDFENQNGWESDWQEVIGGEIVKPEQGCGVISSGSSLYFSKAGKRQLVSWDLDTSWVDFVQFYIQIGGESASCNKPDSREEGVLLQYSNNGGIQWHLLAEMYFSDFSKPRFVYLELPAAAKTPCTRFRWWQPVFSGEDYDQWAVDDIIILSEKQKQIIPVINPTLPQNFYEKPAFDYPMNQMSVWLMLANEGMVKNETFCAATPSAMIFGKSDGDRFAVTRDLTLKPGYVLQFKLNIGCANQFSSTAPVLLQYSHDAGMSWFLVKEGCYPASAGKGCEGNSRELSEPTMYHTGDFEEWTRITIVIPRSLASSKTRFRWIQESSSQKNVPPFGLDGVYISEPCPSYCSGHGDCISGVCFCDLGYTAAQGTCVSNVPNHNEMFDRFEGKLSPLWYKITGAQVGTGCGTLNDGKSLYFNGPGKREARTVPLDTRNIRLVQFYIQIGSKTSGITCIKPRTRNEGLIVQYSNDNGILWHLLRELDFMSFLEPQIISIDLPQDAKTPATAFRWWQPQHGKHSAQWALDDVLIGMNDSSQTGFQDKFDGSIDLQANWYRIQGGQVDIDCLSMDTALIFTENIGKPRYAETWDFHVSASTFLQFEMSMGCSKPFSNSHSVQLQYSLNNGKDWHLVTEECVPPTIGCLHYTESSIYTSERFQNWKRITVYLPLSTISPRTRFRWIQANYTVGADSWAIDNVVLASGCPWMCSGRGICDAGRCVCDRGFGGPYCVPVVPLPSILKDDFNGNLHPDLWPEVYGAERGNLNGETIKSGTSLIFKGEGLRMLISRDLDCTNTMYVQFSLRFIAKSTPERSHSILLQFSISGGITWHLMDEFYFPQTTNILFINVPLPYTAQTNATRFRLWQPYNNGKKEEIWIVDDFIIDGNNVNNPVMLLDTFDFGPREDNWFFYPGGNIGLYCPYSSKGAPEEDSAMVFVSNEVGEHSITTRDLNVNENTIIQFEINVGCSTDSSSADPVRLEFSRDFGATWHLLLPLCYHSSSHVSSLCSTEHHPSSTYYAGTMQGWRREVVHFGKLHLCGSVRFRWYQGFYPAGSQPVTWAIDNVYIGPQCEEMCNGQGSCINGTKCICDPGYSGPTCKISTKNPDFLKDDFEGQLESDRFLLMSGGKPSRKCGILSSGNNLFFNEDGLRMLMTRDLDLSHARFVQFFMRLGCGKGVPDPRSQPVLLQYSLNGGLSWSLLQEFLFSNSSNVGRYIALEIPLKARSGSTRLRWWQPSENGHFYSPWVIDQILIGGNISGNTVLEDDFTTLDSRKWLLHPGGTKMPVCGSTGDALVFIEKASTRYVVSTDVAVNEDSFLQIDFAASCSVTDSCYAIELEYSVDLGLSWHPLVRDCLPTNVECSRYHLQRILVSDTFNKWTRITLPLPPYTRSQATRFRWHQPAPFDKQQTWAIDNVYIGDGCIDMCSGHGRCIQGNCVCDEQWGGLYCDDPETSLPTQLKDNFNRAPSSQNWLTVNGGKLSTVCGAVASGMALHFSGGCSRLLVTVDLNLTNAEFIQFYFMYGCLITPNNRNQGVLLEYSVNGGITWNLLMEIFYDQYSKPGFVNILLPPDAKEIATRFRWWQPRHDGLDQNDWAIDNVLISGSADQRTVMLDTFSSAPVPQHERSPADAGPVGRIAFDMFMEDKTSVNEHWLFHDDCTVERFCDSPDGVMLCGSHDGREVYAVTHDLTPTEGWIMQFKISVGCKVSEKIAQNQIHVQYSTDFGVSWNYLVPQCLPADPKCSGSVSQPSVFFPTKGWKRITYPLPESLVGNPVRFRFYQKYSDMQWAIDNFYLGPGCLDNCRGHGDCLREQCICDPGYSGPNCYLTHTLKTFLKERFDSEEIKPDLWMSLEGGSTCTECGILAEDTALYFGGSTVRQAVTQDLDLRGAKFLQYWGRIGSENNMTSCHRPICRKEGVLLDYSTDGGITWTLLHEMDYQKYISVRHDYILLPEDALTNTTRLRWWQPFVISNGIVVSGVERAQWALDNILIGGAEINPSQLVDTFDDEGTSHEENWSFYPNAVRTAGFCGNPSFHLYWPNKKKDKTHNALSSRELIIQPGYMMQFKIVVGCEATSCGDLHSVMLEYTKDARSDSWQLVQTQCLPSSSNSIGCSPFQFHEATIYNSVNSSSWKRITIQLPDHVSSSATQFRWIQKGEETEKQSWAIDHVYIGEACPKLCSGHGYCTTGAICICDESFQGDDCSVFSHDLPSYIKDNFESARVTEANWETIQGGVIGSGCGQLAPYAHGDSLYFNGCQIRQAATKPLDLTRASKIMFVLQIGSMSQTDSCNSDLSGPHAVDKAVLLQYSVNNGITWHVIAQHQPKDFTQAQRVSYNVPLEARMKGVLLRWWQPRHNGTGHDQWALDHVEVVLVSTRKQNYMMNFSRQHGLRHFYNRRRRSLRRYP

SEQ ID NO: 938 - DNA, 11558 bp, Homo sapiens
tcggcgggggcccgctcccaggcccgctcccgagcccgttccgctcccgtccgccttcttctcgccttctctccgcgtggctcctccgtcccggcgtctccaaaactgaatgagcgagcggcgcgtagggcgcgcggcggcggcggcggcggcggcggcatggagcgcagtggctgggcccggcagactttcctcctagcgctgttgctgggggcgacgctgagggcgcgcgcggcggctggctattacccccgcttttcgcccttctttttcctgtgcacccaccacggggagctggaaggggatggggagcagggcgaggtgctcatttccctgcatattgcgggcaaccccacctactacgttccgggacaagaataccatgtgacaatttcaacaagcaccttttttgacggcttgctggtgacaggactatacacatctacaagtgttcaggcatcacagagcattggaggttccagtgctttcggatttgggatcatgtctgaccaccagtttggtaaccagtttatgtgcagtgtggtagcctctcacgtgagtcacctgcccacaaccaacctcagtttcatctggattgctccacctgcgggcacaggctgtgtgaatttcatggctacagcaacacaccggggccaggttattttcaaagatgctttagcccagcagttgtgtgaacaaggagctccaacagatgtcactgtgcacccacatctagctgaaatacatagtgacagcattatcctgagagatgactttgactcctaccaccaactgcaattaaatccaaatatatgggttgaatgtaacaactgtgagactggagaacagtgtggcgcgattatgcatggcaatgccgtcaccttctgtgaaccatatggcccacgagaactgattaccacaggccttaatacaacaacagcttctgtcctccaattttccattgggtcaggttcatgtcgctttagttattcagaccccagcatcatcgtgttatatgccaagaataactctgcggactggattcagctagagaaaattagagccccttccaatgtcagcacaatcatccatatcctctaccttcctgaggacgccaaaggggagaatgtccaatttcagtggaagcaggaaaatcttcgtgtaggtgaagtgtatgaagcctgctgggccttagataacatcttgatcatcaattcagctcacagacaagtcgttttagaagatagtctcgacccagtggacacaggcaactggcttttcttcccaggagctacagttaagcatagctgtcagtcagatgggaactccatttatttccatggaaatgaaggcagcgagttcaattttgccaccaccagggatgtagatctttccacagaagatattcaagagcaatggtcagaagaatttgagagccagcctacaggatgggatgtcttgggagctgtcattggtacagaatgtggaacgatagaatcaggcttatcaatggtcttcctcaaagatggagagaggaaattatgcactccatccatggacactaccggttatgggaacctgaggttttactttgtgatgggaggaatttgtgaccctggaaattctcatgaaaatgacataatcctgtatgcaaaaattgaaggaagaaaagagcatataacactggataccctttcctattcctcatataaggttccgtctttggtttctgtggtcatcaatcctgaacttcagactcctgctaccaaattttgtctcaggcaaaagaaccatcaaggacataataggaatgtctgggctgtagactttttccatgtcttgcctgttctcccttctacaatgtctcacatgatacagttttccatcaatctgggatgtggaacgcatcagcctggtaacagtgtcagcttggaattttctaccaaccatgggcgctcctggtccctccttcacactgaatgcttacctgagatctgtgctggaccccacctcccccacagcactgtctactcctctgaaaactacagtgggtggaaccgaataacaattccccttcctaacgcagcactaacccggaacaccaggattcgctggagacaaacaggaccaatccttggaaacatgtgggcaattgataatgtttatattggcccgtcatgtctcaaattctgttctggcagaggacagtgcactagacatggttgcaagtgtgaccctggattttctggcccagcttgtgagatggcatcccagacattcccaatgtttatttctgaaagctttggcagttccaggctctcctcttaccataacttttactctatccgtggtgctgaagtcagctttggttgtggtgtcttggccagtggtaaggccctggttttcaacaaagatgggcggcgtcagctaattacatctttccttgacagctcacaatccaggtttctccagttcacactgagactggggagcaaatctgttctgagcacgtgcagagcccctgatcagcctggtgaaggagttttgttgcattattcttatgataatgggataacttggaaactcctggagcattattcatatctcagctatcatgagcccagaataatctccgtagaactaccaggtgatgcaaagcagtttggaattcagttcagatggtggcaaccgtatcattcttcccagagagaagatgtatgggctattgatgagattatcatgacatctgtgcttttcaacagcattagtcttgactttaccaatcttgtggaggtcactcagtctctgggattctaccttggaaatgttcagccatactgtggccacgactggaccctttgttttacaggagattctaaacttgcctcaagtatgcgctatgtggaaacacaatcaatgcagataggagcatcctatatgattcagttcagtttggtgatgggatgtggccagaaatacaccccacacatggacaaccaggtgaagctggagtactcaaccaaccacggccttacctggcacctcgtccaagaagaatgccttccaagtatgccaagttgtcaggaatttacatcagcaagtatttaccatgccagtgagtttacacagtggaggagagtcatagtgcttcttccccagaaaacttggtccagtgctacccgtttccgctggagccagagctattacacagctcaagacgagtgggctttggacagcatttacattgggcagcagtgccccaacatgtgcagtgggcatggctcatgcgatcatggcatatgcaggtgtgaccaggggtaccaaggcactgaatgccacccagaagctgcccttccgtccacaattatgtcagattttgagaaccagaatggctgggagtctgactggcaagaagttattgggggagaaattgtaaaaccagaacaagggtgtggtgtcatctcttctggatcatctctgtacttcagcaaggctgggaaaagacagctggtgagttgggacctggatacttcttgggtggactttgtccagttctacatccagataggcggagagagtgcttcatgcaacaagcctgacagcagagaggagggcgtcctccttcagtacagcaacaatgggggcatccagtggcacctgctagcagagatgtacttttcagacttcagcaaacccagatttgtctatctggagcttccagctgctgccaagaccccttgcaccaggttccgctggtggcagcccgtgttctcaggggaggactatgaccagtgggcagtcgatgacatcatcattctgtccgagaagcagaagcagatcatcccagttatcaatccaactttacctcagaacttttatgagaagccagcttttgattaccctatgaatcagatgagtgtgtggttgatgttggctaatgaaggaatggttaaaaatgaaaccttctgtgctgccacaccatcagcaatgatatttggaaaatcagatggagatcgatttgcagtaactcgagatttgaccctgaaacctggatatgtgctacagttcaagctaaacataggttgtgccaatcaattcagcagtactgctccagttcttcttcagtactctcatgatgctggtatgtcctggtttctggtgaaagaaggctgttacccggcttctgcaggcaaaggatgcgaaggaaactccagagaactaagtgagcccaccatgtatcacacaggggactttgaagaatggacaagaatcaccattgttattccaaggtctcttgcatccagcaagaccagattccgatggatccaggagagcagctcacagaaaaacgtgcctccatttggtttagatggagtgtacatatccgagccttgtcccagttactgcagtggccatggggactgcatttcaggagtgtgtttctgtgacctgggatatactgctgcacaaggaacctgtgtgtcaaatgtccccaatcacaatgagatgttcgataggtttgaggggaagctcagccctctgtggtacaagataacaggtgcccaggttggaactggctgtggaacacttaacgatggcaaatctctctacttcaatggccctgggaaaagggaagcccggacggtccctctggacaccaggaatatcagacttgttcaattttatatacaaattggaagcaaaacttcaggcattacctgcatcaaaccaagaactagaaatgaagggcttattgttcagtattcaaatgacaatgggatactctggcatttgcttcgagagttggacttcatgtccttcctggaaccacagatcatttccattgacctgccacaggacgcgaagacacctgcaacggcatttcgatggtggcaaccgcaacatgggaagcattcagcccagtgggctttggatgatgttcttataggaatgaatgacagctctcaaactggatttcaagacaaatttgatggctctatagatttgcaagccaactggtatcgaatccaaggaggtcaagttgatattgactgtctctctatggatactgctctgatattcactgaaaacataggaaaacctcgttatgctgagacctgggattttcatgtgtcagcatctacctttttgcagtttgaaatgagcatgggctgtagcaagcccttcagcaactcccacagtgtacagctccagtattctctgaacaatggcaaggactggcatcttgtcaccgaagagtgtgttcctccaaccattggctgtctgcattacacggaaagttcaatttacacctcggaaagattccagaattggaagcggatcactgtctaccttccactctccaccatttctcccaggacccggttcagatggattcaggccaactacactgtgggggctgattcctgggcgattgataatgttgtactggcctcagggtgcccttggatgtgctcaggacgagggatttgtgatgctggacgctgtgtgtgtgaccggggctttggtggaccctattgtgttcctgttgttcctctgccctcgattcttaaagacgatttcaatgggaatttacatcctgacctttggcctgaagtgtatggtgcagagagggggaatctgaatggtgaaaccatcaaatctggaacatctctaatttttaaaggggaaggactaaggatgcttatttcaagagatctagattgtacaaatacaatgtatgtccagttttcacttagatttatagcaaaaagtaccccagagagatctcactctattctgttacaattctccatcagtggaggaatcacttggcacctgatggatgaattttactttcctcaaacaacgaatatacttttcatcaatgttcccttgccatacactgcccaaaccaatgctacaagattcagactctggcaaccttataataacggtaagaaagaagaaatctggattgttgatgacttcattatcgatggaaataatgtaaacaaccctgtgatgctcttggatacatttgattttgggcccagagaagacaattggtttttctatcctggtggtaacatcggtctttattgtccatattcttcaaagggggcacctgaagaagattcagctatggtgtttgtttcaaatgaagttggtgagcattccattaccacccgtgacctaaatgtgaatgagaacaccatcatacaatttgagatcaacgttggctgttcgactgatagctcatccgcggatccagtgagactggaattttcaagggacttcggggcgacctggcaccttctgctgcccctctgctaccacagcagcagccacgtcagctctttatgctccaccgagcaccaccccagcagcacctactacgcaggaaccatgcagggctggaggagggaggtcgtgcactttgggaagctgcacctttgtggatctgtccgtttcagatggtaccagggattttaccctgccggctctcagccagtgacatgggccattgataatgtctacatcggtccccagtgtgaggagatgtgtaatggacaggggagctgtatcaatggaaccaaatgtatatgtgaccctggctactcaggtccaacctgtaaaataagcaccaaaaatcctgattttctcaaagatgatttcgaaggtcagctagaatctgatagattcttattaatgagtggtgggaaaccatctcgaaagtgtggaatcctttctagtggaaacaacctctttttcaatgaagatggcttgcgcatgttgatgacacgagacctggatttatcacatgctagatttgtgcagttcttcatgagactgggatgtggtaaaggcgttcctgaccccaggagtcaacccgtgctcctacagtattctctcaacggtggcctctcgtggagtcttcttcaggagttccttttcagcaattccagcaatgtgggcaggtacattgccctggagatacccttgaaagcccgttctggttctactcgccttcgctggtggcaaccgtctgagaatgggcacttctacagcccctgggttatcgatcagattcttattggaggaaatatttctggtaatacggtcttggaagatgatttcacaacccttgatagtaggaaatggctgcttcacccaggaggcaccaagatgcccgtgtgtggctctactggtgatgccctggtcttcattgaaaaggccagcacccgttacgtggtcagcacagacgttgccgtgaatgaggattccttcctacagatagacttcgctgcctcctgctcagtcacagactcttgttatgcgattgaattggaatactcagtagatcttggattgtcatggcacccattggtaagggactgtctgcctaccaatgtggaatgcagtcgctatcatctgcaacggatcctggtgtcagacactttcaacaagtggactagaatcactctgcctctccctccttataccaggtcccaagccactcgtttccgttggcatcaaccagctccttttgacaagcagcagacatgggcaatagataatgtctatatcggggatggctgcatagacatgtgcagtggccatgggagatgcatccagggaaactgcgtctgtgatgaacagtggggtggcctgtactgtgatgaccccgagacctctcttccaacccaactcaaagacaacttcaatcgagctccatccagtcagaactggctgactgtgaacggagggaaattgagtacagtgtgtggagccgtggcgtcgggaatggctctccatttcagtgggggttgtagtcgattattagtcactgtggatctaaacctcactaatgctgagttcatccaattttacttcatgtatgggtgcctgattacaccaaacaaccgtaaccaaggtgttctcttggaatattctgtcaatggaggcattacctggaacctgctcatggagattttctatgaccagtacagtaagcccgggtttgtgaatatccttctccctcctgatgctaaagagattgccactcgcttccgctggtggcagccaagacatgacggcctggatcagaacgactgggccattgacaatgtcctcatctcaggctctgctgaccaaaggaccgttatgctggacaccttcagcagcgccccagtaccccagcatgagcgctcccctgcagatgccggccctgtcgggaggatcgcctttgacatgtttatggaagacaaaacttcagtgaatgagcactggctattccatgatgattgtacagtagaaagattctgtgactcccctgatggtgtgatgctctgtggcagtcatgatggacgggaggtgtatgcagtgacccatgacctgactcccactgaaggctggattatgcaattcaagatctcagttggatgtaaggtgtctgaaaaaattgcccagaatcaaattcatgtgcagtattctactgacttcggtgtgagttggaattatctggtccctcagtgcttgcctgctgacccaaaatgctctggaagtgtttctcagccatctgtattctttccaactaaagggtggaaaaggatcacctacccacttcctgaaagcttagtgggaaatccggtaaggtttaggttctatcagaagtactcagacatgcagtgggcaatcgataatttctacctgggccctggatgcttggacaactgcaggggccatggagattgcttaagggaacagtgcatctgtgatccgggatactcagggccaaactgctacttgacccacactctgaagactttcctgaaggaacgctttgacagtgaagaaatcaaacctgacttatggatgtccttagaaggtggaagtacttgcactgagtgtggaattcttgccgaggacactgcactctattttgggggatccactgtgagacaagcggttacacaagatttggatcttcgaggtgcaaagttcctgcaatactgggggcgcatcggtagtgagaacaacatgacctcttgccatcgtcccatctgccggaaggaaggcgtgctgttggactactctaccgatggaggaattacctggactttgctccatgagatggattaccagaaatacatttctgttagacacgactacatacttcttcctgaagatgccctcaccaacacaactcgacttcgctggtggcagccttttgtgatcagcaatggaattgtggtctctggggtggagcgtgctcagtgggcactggacaacattttgattggtggagcagaaatcaatcccagccaattggtggacacttttgatgatgaaggcacttcccatgaagaaaactggagtttttaccctaatgctgtaaggacagcaggattttgtggcaatccatcctttcacctctattggccaaataaaaagaaggacaagactcacaatgctctctcctcccgagaactcattatacagccaggatacatgatgcagtttaaaattgtggtgggttgtgaagccacttcttgtggtgaccttcattccgtaatgctggaatacactaaggatgcaagatcggattcctggcagctcgtacagacccagtgccttccttcctcttctaacagcattggctgctcccctttccagttccatgaagccaccatctacaactctgtcaacagctcaagctggaaaagaatcaccatccagctgcctgaccatgtctcctctagtgcaacacagttccgctggatccagaagggagaagaaactgagaagcaaagctgggcaattgaccacgtgtacattggagaggcttgccccaagctctgcagcgggcacggatactgcacgaccggtgccatctgcatctgcgacgagagcttccaaggtgatgactgctctgttttcagtcacgaccttcccagttatattaaagataattttgagtccgcaagagtcaccgaggcaaactgggagaccattcaaggtggagtcataggaagtggctgtgggcagctggccccctacgcccatggagactcactgtactttaatggctgtcagatcaggcaagcagctaccaagcctctggatctcactcgagcaagcaaaatcatgtttgttttgcaaattgggagcatgtcgcagacggacagctgcaacagtgacctgagtggcccccacgctgtggacaaggcagtgctgctgcaatacagcgtcaacaacgggatcacctggcatgtcatcgcccagcaccagccaaaggacttcacacaagctcagagagtgtcttacaatgtccccctggaggcacggatgaaaggagtcttactgcgctggtggcaaccacgccacaatggaacaggtcatgatcaatgggctttggaccatgtggaggtcgtcctcactcgcaaacaaaattacatgatgaatttttcacgacaacatgggctcagacatttctacaacagaagacgaaggtcacttaggcgatacccatgaagaatcaaaaagtttattttttttcttccaacatgtgatgtgttgctctccattcttttaaatctcgcactacatctgatatcaggaaatatctgtgaaggacttggtgattacctgaaagcccttctcaagaccgagtgtacaccactttcccacactgtgaactaatgacaagtgacttatttgctcataagtaaatgtcttcatgttgatgtgtccgtgaaagttgtgatctgttgtaatatcagttacagtggcagtattgacaataagaaacagtttaacagaaaaatgaaatttaagcacaaaaaatttaagagattttatgtttaaaatggcatttagcacagtatttaacattcttggtcacaaagctatttaagtggactgtatttcggctatgtctcatgttttatatgattaaattatcattgtttgtcctttatgtattctcttctacaatacaacacattgaaactgtatttacttgttatgttgtaatattttgctgctgaatttggggctacttatattctgcagaaaattaattgaaatacctattcaagaagatagttgtaaagatattgtatctcctttaatatactccttaaaaatgtatgttggtttagcgttgttttgtggataagaaaaatgcttgaccctgaaatattttctactttaaattgtggatgaagaccctatctcccacaaataagttcccatttccttgtctaaagatctttttttaagtgttctgtggctgatttactaacagtaactgccattttttgtctgtgataacagagtgatttgtaaaacagtggttgttttttcattgtgttttcttcgtggattgttttttctgcgggtcatattcataccttctgatgaagttgtacaacaccagcaacattataatggccctgtagctctgaatgctatttgtgtaactgaaaggttgcactctagggtgaaccaagctataaaagcccatgcttaaataaaaattatgtccaaaagcc

SEQ ID NO: 939 - protein, 3458 aa, Homo sapiens
MERSGWARQTFLLALLLGATLRARAAAGYYPRFSPFFFLCTHHGELEGDGEQGEVLISLHIAGNPTYYVPGQEYHVTISTSTFFDGLLVTGLYTSTSVQASQSIGGSSAFGFGIMSDHQFGNQFMCSVVASHVSHLPTTNLSFIWIAPPAGTGCVNFMATATHRGQVIFKDALAQQLCEQGAPTDVTVHPHLAEIHSDSIILRDDFDSYHQLQLNPNIWVECNNCETGEQCGAIMHGNAVTFCEPYGPRELITTGLNTTTASVLQFSIGSGSCRFSYSDPSIIVLYAKNNSADWIQLEKIRAPSNVSTIIHILYLPEDAKGENVQFQWKQENLRVGEVYEACWALDNILIINSAHRQVVLEDSLDPVDTGNWLFFPGATVKHSCQSDGNSIYFHGNEGSEFNFATTRDVDLSTEDIQEQWSEEFESQPTGWDVLGAVIGTECGTIESGLSMVFLKDGERKLCTPSMDTTGYGNLRFYFVMGGICDPGNSHENDIILYAKIEGRKEHITLDTLSYSSYKVPSLVSVVINPELQTPATKFCLRQKNHQGHNRNVWAVDFFHVLPVLPSTMSHMIQFSINLGCGTHQPGNSVSLEFSTNHGRSWSLLHTECLPEICAGPHLPHSTVYSSENYSGWNRITIPLPNAALTRNTRIRWRQTGPILGNMWAIDNVYIGPSCLKFCSGRGQCTRHGCKCDPGFSGPACEMASQTFPMFISESFGSSRLSSYHNFYSIRGAEVSFGCGVLASGKALVFNKDGRRQLITSFLDSSQSRFLQFTLRLGSKSVLSTCRAPDQPGEGVLLHYSYDNGITWKLLEHYSYLSYHEPRIISVELPGDAKQFGIQFRWWQPYHSSQREDVWAIDEIIMTSVLFNSISLDFTNLVEVTQSLGFYLGNVQPYCGHDWTLCFTGDSKLASSMRYVETQSMQIGASYMIQFSLVMGCGQKYTPHMDNQVKLEYSTNHGLTWHLVQEECLPSMPSCQEFTSASIYHASEFTQWRRVIVLLPQKTWSSATRFRWSQSYYTAQDEWALDSIYIGQQCPNMCSGHGSCDHGICRCDQGYQGTECHPEAALPSTIMSDFENQNGWESDWQEVIGGEIVKPEQGCGVISSGSSLYFSKAGKRQLVSWDLDTSWVDFVQFYIQIGGESASCNKPDSREEGVLLQYSNNGGIQWHLLAEMYFSDFSKPRFVYLELPAAAKTPCTRFRWWQPVFSGEDYDQWAVDDIIILSEKQKQIIPVINPTLPQNFYEKPAFDYPMNQMSVWLMLANEGMVKNETFCAATPSAMIFGKSDGDRFAVTRDLTLKPGYVLQFKLNIGCANQFSSTAPVLLQYSHDAGMSWFLVKEGCYPASAGKGCEGNSRELSEPTMYHTGDFEEWTRITIVIPRSLASSKTRFRWIQESSSQKNVPPFGLDGVYISEPCPSYCSGHGDCISGVCFCDLGYTAAQGTCVSNVPNHNEMFDRFEGKLSPLWYKITGAQVGTGCGTLNDGKSLYFNGPGKREARTVPLDTRNIRLVQFYIQIGSKTSGITCIKPRTRNEGLIVQYSNDNGILWHLLRELDFMSFLEPQIISIDLPQDAKTPATAFRWWQPQHGKHSAQWALDDVLIGMNDSSQTGFQDKFDGSIDLQANWYRIQGGQVDIDCLSMDTALIFTENIGKPRYAETWDFHVSASTFLQFEMSMGCSKPFSNSHSVQLQYSLNNGKDWHLVTEECVPPTIGCLHYTESSIYTSERFQNWKRITVYLPLSTISPRTRFRWIQANYTVGADSWAIDNVVLASGCPWMCSGRGICDAGRCVCDRGFGGPYCVPVVPLPSILKDDFNGNLHPDLWPEVYGAERGNLNGETIKSGTSLIFKGEGLRMLISRDLDCTNTMYVQFSLRFIAKSTPERSHSILLQFSISGGITWHLMDEFYFPQTTNILFINVPLPYTAQTNATRFRLWQPYNNGKKEEIWIVDDFIIDGNNVNNPVMLLDTFDFGPREDNWFFYPGGNIGLYCPYSSKGAPEEDSAMVFVSNEVGEHSITTRDLNVNENTIIQFEINVGCSTDSSSADPVRLEFSRDFGATWHLLLPLCYHSSSHVSSLCSTEHHPSSTYYAGTMQGWRREVVHFGKLHLCGSVRFRWYQGFYPAGSQPVTWAIDNVYIGPQCEEMCNGQGSCINGTKCICDPGYSGPTCKISTKNPDFLKDDFEGQLESDRFLLMSGGKPSRKCGILSSGNNLFFNEDGLRMLMTRDLDLSHARFVQFFMRLGCGKGVPDPRSQPVLLQYSLNGGLSWSLLQEFLFSNSSNVGRYIALEIPLKARSGSTRLRWWQPSENGHFYSPWVIDQILIGGNISGNTVLEDDFTTLDSRKWLLHPGGTKMPVCGSTGDALVFIEKASTRYVVSTDVAVNEDSFLQIDFAASCSVTDSCYAIELEYSVDLGLSWHPLVRDCLPTNVECSRYHLQRILVSDTFNKWTRITLPLPPYTRSQATRFRWHQPAPFDKQQTWAIDNVYIGDGCIDMCSGHGRCIQGNCVCDEQWGGLYCDDPETSLPTQLKDNFNRAPSSQNWLTVNGGKLSTVCGAVASGMALHFSGGCSRLLVTVDLNLTNAEFIQFYFMYGCLITPNNRNQGVLLEYSVNGGITWNLLMEIFYDQYSKPGFVNILLPPDAKEIATRFRWWQPRHDGLDQNDWAIDNVLISGSADQRTVMLDTFSSAPVPQHERSPADAGPVGRIAFDMFMEDKTSVNEHWLFHDDCTVERFCDSPDGVMLCGSHDGREVYAVTHDLTPTEGWIMQFKISVGCKVSEKIAQNQIHVQYSTDFGVSWNYLVPQCLPADPKCSGSVSQPSVFFPTKGWKRITYPLPESLVGNPVRFRFYQKYSDMQWAIDNFYLGPGCLDNCRGHGDCLREQCICDPGYSGPNCYLTHTLKTFLKERFDSEEIKPDLWMSLEGGSTCTECGILAEDTALYFGGSTVRQAVTQDLDLRGAKFLQYWGRIGSENNMTSCHRPICRKEGVLLDYSTDGGITWTLLHEMDYQKYISVRHDYILLPEDALTNTTRLRWWQPFVISNGIVVSGVERAQWALDNILIGGAEINPSQLVDTFDDEGTSHEENWSFYPNAVRTAGFCGNPSFHLYWPNKKKDKTHNALSSRELIIQPGYMMQFKIVVGCEATSCGDLHSVMLEYTKDARSDSWQLVQTQCLPSSSNSIGCSPFQFHEATIYNSVNSSSWKRITIQLPDHVSSSATQFRWIQKGEETEKQSWAIDHVYIGEACPKLCSGHGYCTTGAICICDESFQGDDCSVFSHDLPSYIKDNFESARVTEANWETIQGGVIGSGCGQLAPYAHGDSLYFNGCQIRQAATKPLDLTRASKIMFVLQIGSMSQTDSCNSDLSGPHAVDKAVLLQYSVNNGITWHVIAQHQPKDFTQAQRVSYNVPLEARMKGVLLRWWQPRHNGTGHDQWALDHVEVVLTRKQNYMMNFSRQHGLRHFYNRRRRSLRRYP

SEQ ID NO: 940 - DNA, 2728 bp, Homo sapiens
ggggtagggaggccgactgagcaggagtcgtccgcttatagtggaggctgctaggagccggtcagagggtgagtggggagcaggcgagcgagccacagcaggcaggagggagcgtcgcgcggcgcagaggagcgccggggcagggccgcggcggaaccacagccggagaggggcagcccgagccgggcgccgcagggtccccacccccacccggccggacagtgcccggtgttcccccgtgcggggggcggcggcggcggctgacgggaccgccgggaccgcgggggtgttgccacctccaccgaggagccggcgcggccgcgggctcctcagagccggggccccgggcccgtgacagacgggccgaggaagggagagaggcggcggcgacaccatgtcatctcccagtccgggcaagaggcggatggacacggacgtggtcaagctcatcgagagtaaacatgaggttacgatcctgggaggacttaatgaatttgtagtgaagttttatggaccacaaggaacaccatatgaaggcggagtatggaaagttagagtggacctacctgataaataccctttcaaatctccatctataggattcatgaataaaattttccatcccaacattgatgaagcgtcaggaactgtgtgtctagatgtaattaatcaaacttggacagctctctatgatcttaccaatatatttgagtccttcctgcctcagttattggcctatcctaaccccatagatcctctcaatggtgacgctgcagccatgtacctccaccgaccagaagaatacaagcagaaaattaaagagtacatccagaaatacgccacggaggaggcgctgaaagaacaggaagagggtaccggggacagctcatcggagagctctatgtctgacttttccgaagatgaggcccaggatatggagttgtagtagaaaaagcacctgcttttcagaaagactattatttcctaaccatgagaagcagactataatattcatatttaaacaaagcaattttttttattactaaacaaggtttttatgaataatagcattgatatatatatattatatatcaccctttagatcttgatttcttggtcatttctcaacctgaggtgcatagcatattcccacattccatttggtagcaatatgcggtctgaatgcatgcattcatgagtccatgtggccaagtcagcctgtgtgctactgaactgtcgaaggaaatagccgctctgataggtagatgtgagtaaaaagaacaggaaaaaattgcttcttttattggtttccaaagaaacaaaccaaaccaaccagctcttggatgtgaagataaaatagtgcttttttgaaatggagaggaaaaacttggggaggaagaggcctgctgtgggggcatcggagccagccatgtaagaatcagagctgctccttcctgtgaatcctaggtggccctatgtcttctgtggagttacagtataaagcagggagctaattaagagtattaaaacttaaaaccattttttgactctgattttaagtacatttttatatgtcagttgctgcccttcacactaccaggccctgcagccacagtgttctgttggagaaacttggggaagtgttttctgaaccagttctttttcttggggtagagcgtgaaatccagacctgtttttgaaaggacagcacaggaggagaaaagtgactgggacgatgcttcctctcatccaaaacacatgcagagtcacatcctcatcctagtgtttggcagtttgagaccgctaccctgaacttaagagctttaaatatgagggttgtgtttctgggggggttatttttttggtgtgtgtgtgtgtgtattgtgcttagaaaggttgcagatttcatcttcacctaccaagaggcggccgcctccttggacaagccgctcatggaccattagacttgagaagacgacccacgtggtgactgcaaagccctgggtacttgccttcatgttctggtttggttttccctttttctgctgctcttggcagcagcctggtcatcatctgcttgtgggagtgggaaatgggtattttagacccaacacaggttctaaatttaaaacaaataataattggaacaaataaaggttcttgtacccagagtgattctacatgggaaaaacaaaccagcttttttcagagagtgaccgaataggaagaagggattcagaaatatgatgtagtagaacatgccctgcaggaagaaaatgttttctctcctgcgtatgttaagaggaaatcagtttaaaatgcctgctaatcaaatgtcgactcagctaaccatatgtccaggttgctgcagagtttctttcaaatctgagtgttgcctgctgaactcggaggggagtttggagaaattttagacagcagctctgtgttctttttttgccgcagccaataagataatagcagaattagccaatcctaaaaccttctaaagacgatttttgagcatcccactgggattatttaatttttctttttgacgtgtgtttttagtttagaagtgctgtattccacaaggtttaagtcagtgaggttggaagataccctatcttttttattcaaaaagcacaatcaatcttttgtttgaaaatctatataaagtacaacttgcttttagcatgattattttcctaaataaaaagacaaagaattt

SEQ ID NO: 941 - protein, 183 aa, Homo sapiens
MSSPSPGKRRMDTDVVKLIESKHEVTILGGLNEFVVKFYGPQGTPYEGGVWKVRVDLPDKYPFKSPSIGFMNKIFHPNIDEASGTVCLDVINQTWTALYDLTNIFESFLPQLLAYPNPIDPLNGDAAAMYLHRPEEYKQKIKEYIQKYATEEALKEQEEGTGDSSSESSMSDFSEDEAQDMEL

SEQ ID NO: 942 - DNA, 2635 bp, Homo sapiens
ggggtagggaggccgactgagcaggagtcgtccgcttatagtggaggctgctaggagccggtcagagggtgagtggggagcaggcgagcgagccacagcaggcaggagggagcgtcgcgcggcgcagaggagcgccggggcagggccgcggcggaaccacagccggagaggggcagcccgagccgggcgccgcagggtccccacccccacccggccggacagtgcccggtgttcccccgtgcggggggcggcggcggcggctgacgggaccgccgggaccgcgggggtgttgccacctccaccgaggagccggcgcggccgcgggctcctcagagccggggccccgggcccgtgacagacgggccgaggaagggagagaggcggcggcgacaccatgtcatctcccagtccgggcaagaggcggatggacacggacgtggtcaagctcatcgagagtaaacatgaggttacgatcctgggaggacttaatgaatttgtagtgaagttttatggaccacaaggaacaccatatgaaggcggagtatggaaagttagagtggacctacctgataaataccctttcaaatctccatctatagatcttaccaatatatttgagtccttcctgcctcagttattggcctatcctaaccccatagatcctctcaatggtgacgctgcagccatgtacctccaccgaccagaagaatacaagcagaaaattaaagagtacatccagaaatacgccacggaggaggcgctgaaagaacaggaagagggtaccggggacagctcatcggagagctctatgtctgacttttccgaagatgaggcccaggatatggagttgtagtagaaaaagcacctgcttttcagaaagactattatttcctaaccatgagaagcagactataatattcatatttaaacaaagcaattttttttattactaaacaaggtttttatgaataatagcattgatatatatatattatatatcaccctttagatcttgatttcttggtcatttctcaacctgaggtgcatagcatattcccacattccatttggtagcaatatgcggtctgaatgcatgcattcatgagtccatgtggccaagtcagcctgtgtgctactgaactgtcgaaggaaatagccgctctgataggtagatgtgagtaaaaagaacaggaaaaaattgcttcttttattggtttccaaagaaacaaaccaaaccaaccagctcttggatgtgaagataaaatagtgcttttttgaaatggagaggaaaaacttggggaggaagaggcctgctgtgggggcatcggagccagccatgtaagaatcagagctgctccttcctgtgaatcctaggtggccctatgtcttctgtggagttacagtataaagcagggagctaattaagagtattaaaacttaaaaccattttttgactctgattttaagtacatttttatatgtcagttgctgcccttcacactaccaggccctgcagccacagtgttctgttggagaaacttggggaagtgttttctgaaccagttctttttcttggggtagagcgtgaaatccagacctgtttttgaaaggacagcacaggaggagaaaagtgactgggacgatgcttcctctcatccaaaacacatgcagagtcacatcctcatcctagtgtttggcagtttgagaccgctaccctgaacttaagagctttaaatatgagggttgtgtttctgggggggttatttttttggtgtgtgtgtgtgtgtattgtgcttagaaaggttgcagatttcatcttcacctaccaagaggcggccgcctccttggacaagccgctcatggaccattagacttgagaagacgacccacgtggtgactgcaaagccctgggtacttgccttcatgttctggtttggttttccctttttctgctgctcttggcagcagcctggtcatcatctgcttgtgggagtgggaaatgggtattttagacccaacacaggttctaaatttaaaacaaataataattggaacaaataaaggttcttgtacccagagtgattctacatgggaaaaacaaaccagcttttttcagagagtgaccgaataggaagaagggattcagaaatatgatgtagtagaacatgccctgcaggaagaaaatgttttctctcctgcgtatgttaagaggaaatcagtttaaaatgcctgctaatcaaatgtcgactcagctaaccatatgtccaggttgctgcagagtttctttcaaatctgagtgttgcctgctgaactcggaggggagtttggagaaattttagacagcagctctgtgttctttttttgccgcagccaataagataatagcagaattagccaatcctaaaaccttctaaagacgatttttgagcatcccactgggattatttaatttttctttttgacgtgtgtttttagtttagaagtgctgtattccacaaggtttaagtcagtgaggttggaagataccctatcttttttattcaaaaagcacaatcaatcttttgtttgaaaatctatataaagtacaacttgcttttagcatgattattttcctaaataaaaagacaaagaattt

SEQ ID NO: 943 - protein, 152 aa, Homo sapiens
MSSPSPGKRRMDTDVVKLIESKHEVTILGGLNEFVVKFYGPQGTPYEGGVWKVRVDLPDKYPFKSPSIDLTNIFESFLPQLLAYPNPIDPLNGDAAAMYLHRPEEYKQKIKEYIQKYATEEALKEQEEGTGDSSSESSMSDFSEDEAQDMEL

SEQ ID NO: 944 - DNA, 1945 bp, Homo sapiens
ggggaagcaactcggcagcggaccaagatggcggcgccctgtgagggacaagcgtttgccgtaggggttgaaaagaattggggtgcagtagttcgctccccagaagggaccccccagaaaatccggcagctgatagatgaggggattgccccggaagagggaggcgtggacgcgaaggacacgtctgccacatcccagtcagttaatggatcaccccaagcggaacaaccttcattggaatctacaagcaaagaagccttctttagcagagtggaaacattttcttctttgaaatgggcaggtaagccctttgagctgtctccactcgtctgtgcaaaatatggctgggtcacagtggaatgtgatatgctcaagtgctctagctgtcaagcttttctctgtgccagtttacaaccagcttttgactttgacagatataagcaacgatgtgctgagctgaagaaagccttgtgtactgcccatgagaagttctgtttctggccagacagcccatccccagaccgatttgggatgttgcccctggatgagcctgctattcttgttagtgaattcctagatcgttttcaaagcctttgtcacttggacctccagcttccttccctaaggccggaggacttgaaaactatgtgcttgacagaagacaagatcagtcttctcctacacttgcttgaagatgaacttgatcaccgaactgatgagagaaaaactacaatcaaattaggctcagacatccaagtccacgtcactgcctgtattctctctgtgtgtggctgggcgtgtagttcctctttggaatccatgcagctctccctgataacatgttcgcaatgtatgaggaaggtggggctctggggcttccagcagattgaatcgtccatgactgacctggatgcatcctttggcctgaccagctccccaatcccaggccttgaggggcgaccagagcgcttacctctggtgcctgaatctcctcggaggatgatgacccggagccaggatgccactttctccccaggctcagagcaggctgaaaagagccctggtcccattgtctctcgaactcggagctgggactcttccagtcctgttgaccgtcctgagccagaggctgctagccccaccaccagaactcgcccagtgacccgaagcatgggaacaggagacacccctggcctggaggtaccatctagccctctgcggaaagccaagcgagctcgcctctgctcctccagcagttcggacacatcttcccgaagcttctttgatcccacctctcagcatagagactggtgcccttgggtgaatatcacacttggcaaagaaagcagggagaatggtggaactgaaccagatgccagcgccccagcagagccaggctggaaagcagtgctgaccatcctcttggcgcacaaacagtctagccagccagctgaaacggactccatgagtctctctgagaaatcaaggaaagtattccgaatatttcggcagtgggaatctctgtgctcatgctgaagatactccagcgccttcctggagatagctggaatgagagtgactttttgaaaaattaaggctgagttcctttcggtcagctgacactaagtttttcctgttctgggttaatcataaggagccccctgccatagcaaaggcagtgagtgtcaactatctgcatctggctgagagagacccgtttcctttcagggatgtggacagggtaagggcagcaagcatggttctgttaaaggagtgtgggattaacagactagaaggaagactaaggacctgaccacccatttcagcatcttcaatgtggagcagtgttctgaggactcttctatcctaggactatgacagtgtgtattaataaaatatttgctaagattctcaaaaaaaaaaaaaaaaaaaaaaaaaaaaaaaa

SEQ ID NO: 945 - protein, 502 aa, Homo sapiens
MAAPCEGQAFAVGVEKNWGAVVRSPEGTPQKIRQLIDEGIAPEEGGVDAKDTSATSQSVNGSPQAEQPSLESTSKEAFFSRVETFSSLKWAGKPFELSPLVCAKYGWVTVECDMLKCSSCQAFLCASLQPAFDFDRYKQRCAELKKALCTAHEKFCFWPDSPSPDRFGMLPLDEPAILVSEFLDRFQSLCHLDLQLPSLRPEDLKTMCLTEDKISLLLHLLEDELDHRTDERKTTIKLGSDIQVHVTACILSVCGWACSSSLESMQLSLITCSQCMRKVGLWGFQQIESSMTDLDASFGLTSSPIPGLEGRPERLPLVPESPRRMMTRSQDATFSPGSEQAEKSPGPIVSRTRSWDSSSPVDRPEPEAASPTTRTRPVTRSMGTGDTPGLEVPSSPLRKAKRARLCSSSSSDTSSRSFFDPTSQHRDWCPWVNITLGKESRENGGTEPDASAPAEPGWKAVLTILLAHKQSSQPAETDSMSLSEKSRKVFRIFRQWESLCSC

SEQ ID NO: 946 - DNA, 4468 bp, Homo sapiens
gatttcctgagcatgcctagggaatgacaggcatctccacaggcaggctgcatccaccttggctggggtgtcgtcattggctgcctattagaaaaacgacaggacaatgcataccaccgcctcccgactgtaaacataggggatatgtgttcacttagcatggacttctgggaggggccaaggaagggcggtctggagttttattgaatagagcagtgtgtattcggctgcctgcctgcccgcctgcttgctctctggctgtgctcctgcttaaagaaatcagtccttcctttccgacttagtcctcgggaagaagtttcagactacaaggtatcattggaacatttcaagatcatcaaatcaaattccacagggattggtgaccaaccagaaggctcagacatctgattgctgacctgtccagacatcatctggtctccctgaacctgaaatcacaccatggatgattttgagcgtcgcagagaacttagaaggcaaaagagggaggagatgcgactcgaagcagaaagaatcgcctaccagaggaatgacgatgatgaagaggaggcagcccgggaacggcgccgccgagcccgacaggaacggctgcggcagaagcaggaggaagaatccttgggacaggtgaccgaccaggtggaggtgaatgcccagaacagtgtgcctgacgaggaggccaagacaaccaccacaaacactcaagtggaaggggatgatgaggccgcattcctggagcgcctggctcggcgtgaggaaagacgccaaaaacgccttcaggaggctctggagcggcagaaggagttcgacccaacaataacagatgcaagtctgtcgctcccaagcagaagaatgcaaaatgacacagcagaaaatgaaactaccgagaaggaagaaaaaagtgaaagtcgccaagaaagatacgagatagaggaaacagaaacagtcaccaagtcctaccagaagaatgattggagggatgctgaagaaaacaagaaagaagacaaggaaaaggaggaggaggaagaggagaagccaaagcgagggagcattggagaaaatcagatcaaagatgaaaagattaaaaaggacaaagaacccaaagaagaagttaagagcttcatggatcgaaagaagggatttacagaagttaagtcgcagaatggagaattcatgacccacaaacttaaacatactgagaatactttcagccgccctggagggagggccagcgtggacaccaaggaggctgagggcgccccccaggtggaagccggcaaaaggctggaggagcttcgtcgtcgtcgcggggagaccgagagcgaagagttcgagaagctcaaacagaagcagcaggaggcggctttggagctggaggaactcaagaaaaagagggaggagagaaggaaggtcctggaggaggaagagcagaggaggaagcaggaggaagccgatcgaaaactcagagaggaggaagagaagaggaggctaaaggaagagattgaaaggcgaagagcagaagctgctgagaaacgccagaagatgccagaagatggcttgtcagatgacaagaaaccattcaagtgtttcactcctaaaggttcatctctcaagatagaagagcgagcagaatttttgaataagtctgtgcagaaaagcagtggtgtcaaatcgacccatcaagcagcaatagtctccaagattgacagcagactggagcagtataccagtgcaattgagggaacaaaaagcgcaaaacctacaaagccggcagcctcggatcttcctgttcctgctgaaggtgtacgcaacatcaagagtatgtgggagaaagggaatgtgttttcatcccccactgcagcaggcacaccaaataaggaaactgctggcttgaaggtaggggtttctagccgcatcaatgaatggctaactaaaaccccagatggaaacaagtcacctgctcccaaaccttctgacttgagaccaggagacgtatccagcaagcggaacctctgggaaaagcaatctgtggataaggtcacttcccccactaaggtttgagacagttccagaaagaacccaagctcaagacgcaggacgagctcagttgtagagggctaattcgctctgttttgtatttatgttgatttactaaattgggttcattatcttttatttttcaatatcccagtaaacccatgtatattatcactatatttaataatcacagtctagagatgttcatggtaaaagtactgcctttgcacaggagcctgtttctaaagaaacccatgctgtgaaatagagacttttctactgatcatcataactctgtatctgagcagtgataccaaccacatctgaagtcaacagaagatccaagtttaaaattgcctgcggaatgtgtgcagtatctagaaaaatgaaccgtagtttttgtttttttaaatacagaagtcatgttgtttctgcactttataataaagcatggaagaaattatcttagtaggcaattgtaacactttttgaaagtaacccatttcagatttgaaatactgcaataatggttgtctttaaaaaaaaaaaagaaatgtactgttaaggtattactttttttcatgctgatgattcatatctaaattacattattatgttagctgacagtggtactgattttttaggttggttgttttgtggatttctttagtagtgatagtagcctgaaccacattttagataactcaattatgtatgtatgtgcatacacatatacaaacacactaatggtagaatgcttttttatgtgctagactattatatttagtagtatgtcattgtaactagccaatatcacagcttttgaaaaattaaaaaatcacactatattaatatttcatatttgccaacagaaacatggcagataggtatcaatatgttttcaatgcctgatgacctataagaagaaagtattgaaaagaagagagattagaactgttagaaggagttgaaattttctaaaagacatagtatttagtttataattaaatgcattcttgaagtccagtgtgaattttattaatgctatcatctcgaccaagctcaaagcctacttattagaaacaatgaagttcacaataggtcataaggtctcttccttttctaaaattgaaagacaagaaatttagtgccaatattgtacagacagaaattccatgtatgagtctcaacaaagactacctttggctaaatgtctagaagcagagaagtaaagtgagcaaaatccagtgttgaggagtcatgacagtactttgatctttatatactctgaagcatttcttcaaacttttctacttttatttgtcattgatacctgtagtaagttgacaatgtggtgaaatttcaaaattatatgtaacttctactagttttactttctcccccaagtcttttttaactcatgatttttacacacacaatccagaacttattatatagcctctaagtctttattcttcacagtagataatgaaagagtcctccagtgtcttggcaaaatgttctagtatagctggatacatacagtggagttctataaactcatacctcagtggacttaaccaaaattgtgttagtctcaattcctaccacactgagggagcctcccaaataactattttcttatctgcagtattcctccagaagagctaaccagggcagggctggcatgagaagtgacatctgcgttacaaagtctatcttcctcataagtctgtaaagagcaattgaatcttctagctttagcaaacctaagccaaaggaaggaaagccacgaagaatgcagaagtcaaaccctcatgacaaagtaggcacaagtctacaataagctaaatcagaatttacaaatacaagtgtcccaggtagcattgactcccgtcattggagtgaaatggatcaaagtttgaattaaggcctatggtaaggtaacattgctttgttgtacttttgaacaagagctcctcctgatcactattacatatttttctagaaaatctaaagttcagaagagaatgtatcactgctgacttttattccaatatttggatggagtaagttttagggtagaattttgttcagtttggatttaatcttttgaaaagtaaattccttgtttactggtttgactataattctctgttatctttacgaggtaaaactgcaagctgactagcatgttctgtgaatctgccattcctaaaaattttataaacacttgatacttttcactgataatggatcgctccaataaacatatattgtgaaaatgcatccacaataaatggaattccttcctgcaaaatgtctttttctcacttatttttatgtacaatattgatagtgagaggtatgtctattataataaagattatggcacagtaaaaaaaaaaaaaaaaaa

SEQ ID NO: 947 - protein, 538 aa, Homo sapiens
MDDFERRRELRRQKREEMRLEAERIAYQRNDDDEEEAARERRRRARQERLRQKQEEESLGQVTDQVEVNAQNSVPDEEAKTTTTNTQVEGDDEAAFLERLARREERRQKRLQEALERQKEFDPTITDASLSLPSRRMQNDTAENETTEKEEKSESRQERYEIEETETVTKSYQKNDWRDAEENKKEDKEKEEEEEEKPKRGSIGENQIKDEKIKKDKEPKEEVKSFMDRKKGFTEVKSQNGEFMTHKLKHTENTFSRPGGRASVDTKEAEGAPQVEAGKRLEELRRRRGETESEEFEKLKQKQQEAALELEELKKKREERRKVLEEEEQRRKQEEADRKLREEEEKRRLKEEIERRRAEAAEKRQKMPEDGLSDDKKPFKCFTPKGSSLKIEERAEFLNKSVQKSSGVKSTHQAAIVSKIDSRLEQYTSAIEGTKSAKPTKPAASDLPVPAEGVRNIKSMWEKGNVFSSPTAAGTPNKETAGLKVGVSSRINEWLTKTPDGNKSPAPKPSDLRPGDVSSKRNLWEKQSVDKVTSPTKV

SEQ ID NO: 948 - DNA, 5233 bp, Homo sapiens
gatttcctgagcatgcctagggaatgacaggcatctccacaggcaggctgcatccaccttggctggggtgtcgtcattggctgcctattagaaaaacgacaggacaatgcataccaccgcctcccgactgtaaacataggggatatgtgttcacttagcatggacttctgggaggggccaaggaagggcggtctggagttttattgaatagagcagtgtgtattcggctgcctgcctgcccgcctgcttgctctctggctgtgctcctgcttaaagaaatcagtccttcctttccgacttagtcctcgggaagaagtttcagactacaaggtatcattggaacatttcaagatcatcaaatcaaattccacagggattggtgaccaaccagaaggctcagacatctgattgctgacctgtccagacatcatctggtctccctgaacctgaaatcacaccatggatgattttgagcgtcgcagagaacttagaaggcaaaagagggaggagatgcgactcgaagcagaaagaatcgcctaccagaggaatgacgatgatgaagaggaggcagcccgggaacggcgccgccgagcccgacaggaacggctgcggcagaagcaggaggaagaatccttgggacaggtgaccgaccaggtggaggtgaatgcccagaacagtgtgcctgacgaggaggccaagacaaccaccacaaacactcaagtggaaggggatgatgaggccgcattcctggagcgcctggctcggcgtgaggaaagacgccaaaaacgccttcaggaggctctggagcggcagaaggagttcgacccaacaataacagatgcaagtctgtcgctcccaagcagaagaatgcaaaatgacacagcagaaaatgaaactaccgagaaggaagaaaaaagtgaaagtcgccaagaaagatacgagatagaggaaacagaaacagtcaccaagtcctaccagaagaatgattggagggatgctgaagaaaacaagaaagaagacaaggaaaaggaggaggaggaagaggagaagccaaagcgagggagcattggagaaaatcaggtagaggtgatggtggaagagaaaacaactgaaagccaggaggaaacagtggtaatgtcattaaaaaatgggcagatcagttcagaagagcctaaacaagaggaggagagggaacaaggttcagatgagatttcccatcatgaaaagatggaagaggaagacaaggaaagagctgaggcagagagggcaaggttggaagcagaagaaagagaaagaattaaagccgagcaagacaaaaagatagcagatgaacgagcaagaattgaagcagaagaaaaagcagctgcccaagaaagagaaaggagagaggcagaagagagggaaaggatgagggaggaagagaaaagggcagcagaggagaggcagaggataaaggaggaagagaaaagggcagcagaggagaggcagaggataaaggaggaagagaaaagggcagcagaggagaggcagaggataaaagaggaagagaaaagggcagcagaggagaggcaaagggccagggcagaggaggaagagaaggctaaggtagaagagcagaaacgtaacaagcagctagaagagaaaaaacatgccatgcaagagacaaagataaaaggggaaaaggtagaacagaaaatagaagggaaatgggtaaatgaaaagaaagcacaagaagataaacttcagacagctgtcctaaagaaacagggagaagagaagggaactaaagtgcaagctaaaagagaaaagctccaagaagacaagcctaccttcaaaaaagaagagatcaaagatgaaaagattaaaaaggacaaagaacccaaagaagaagttaagagcttcatggatcgaaagaagggatttacagaagttaagtcgcagaatggagaattcatgacccacaaacttaaacatactgagaatactttcagccgccctggagggagggccagcgtggacaccaaggaggctgagggcgccccccaggtggaagccggcaaaaggctggaggagcttcgtcgtcgtcgcggggagaccgagagcgaagagttcgagaagctcaaacagaagcagcaggaggcggctttggagctggaggaactcaagaaaaagagggaggagagaaggaaggtcctggaggaggaagagcagaggaggaagcaggaggaagccgatcgaaaactcagagaggaggaagagaagaggaggctaaaggaagagattgaaaggcgaagagcagaagctgctgagaaacgccagaagatgccagaagatggcttgtcagatgacaagaaaccattcaagtgtttcactcctaaaggttcatctctcaagatagaagagcgagcagaatttttgaataagtctgtgcagaaaagcagtggtgtcaaatcgacccatcaagcagcaatagtctccaagattgacagcagactggagcagtataccagtgcaattgagggaacaaaaagcgcaaaacctacaaagccggcagcctcggatcttcctgttcctgctgaaggtgtacgcaacatcaagagtatgtgggagaaagggaatgtgttttcatcccccactgcagcaggcacaccaaataaggaaactgctggcttgaaggtaggggtttctagccgcatcaatgaatggctaactaaaaccccagatggaaacaagtcacctgctcccaaaccttctgacttgagaccaggagacgtatccagcaagcggaacctctgggaaaagcaatctgtggataaggtcacttcccccactaaggtttgagacagttccagaaagaacccaagctcaagacgcaggacgagctcagttgtagagggctaattcgctctgttttgtatttatgttgatttactaaattgggttcattatcttttatttttcaatatcccagtaaacccatgtatattatcactatatttaataatcacagtctagagatgttcatggtaaaagtactgcctttgcacaggagcctgtttctaaagaaacccatgctgtgaaatagagacttttctactgatcatcataactctgtatctgagcagtgataccaaccacatctgaagtcaacagaagatccaagtttaaaattgcctgcggaatgtgtgcagtatctagaaaaatgaaccgtagtttttgtttttttaaatacagaagtcatgttgtttctgcactttataataaagcatggaagaaattatcttagtaggcaattgtaacactttttgaaagtaacccatttcagatttgaaatactgcaataatggttgtctttaaaaaaaaaaaagaaatgtactgttaaggtattactttttttcatgctgatgattcatatctaaattacattattatgttagctgacagtggtactgattttttaggttggttgttttgtggatttctttagtagtgatagtagcctgaaccacattttagataactcaattatgtatgtatgtgcatacacatatacaaacacactaatggtagaatgcttttttatgtgctagactattatatttagtagtatgtcattgtaactagccaatatcacagcttttgaaaaattaaaaaatcacactatattaatatttcatatttgccaacagaaacatggcagataggtatcaatatgttttcaatgcctgatgacctataagaagaaagtattgaaaagaagagagattagaactgttagaaggagttgaaattttctaaaagacatagtatttagtttataattaaatgcattcttgaagtccagtgtgaattttattaatgctatcatctcgaccaagctcaaagcctacttattagaaacaatgaagttcacaataggtcataaggtctcttccttttctaaaattgaaagacaagaaatttagtgccaatattgtacagacagaaattccatgtatgagtctcaacaaagactacctttggctaaatgtctagaagcagagaagtaaagtgagcaaaatccagtgttgaggagtcatgacagtactttgatctttatatactctgaagcatttcttcaaacttttctacttttatttgtcattgatacctgtagtaagttgacaatgtggtgaaatttcaaaattatatgtaacttctactagttttactttctcccccaagtcttttttaactcatgatttttacacacacaatccagaacttattatatagcctctaagtctttattcttcacagtagataatgaaagagtcctccagtgtcttggcaaaatgttctagtatagctggatacatacagtggagttctataaactcatacctcagtggacttaaccaaaattgtgttagtctcaattcctaccacactgagggagcctcccaaataactattttcttatctgcagtattcctccagaagagctaaccagggcagggctggcatgagaagtgacatctgcgttacaaagtctatcttcctcataagtctgtaaagagcaattgaatcttctagctttagcaaacctaagccaaaggaaggaaagccacgaagaatgcagaagtcaaaccctcatgacaaagtaggcacaagtctacaataagctaaatcagaatttacaaatacaagtgtcccaggtagcattgactcccgtcattggagtgaaatggatcaaagtttgaattaaggcctatggtaaggtaacattgctttgttgtacttttgaacaagagctcctcctgatcactattacatatttttctagaaaatctaaagttcagaagagaatgtatcactgctgacttttattccaatatttggatggagtaagttttagggtagaattttgttcagtttggatttaatcttttgaaaagtaaattccttgtttactggtttgactataattctctgttatctttacgaggtaaaactgcaagctgactagcatgttctgtgaatctgccattcctaaaaattttataaacacttgatacttttcactgataatggatcgctccaataaacatatattgtgaaaatgcatccacaataaatggaattccttcctgcaaaatgtctttttctcacttatttttatgtacaatattgatagtgagaggtatgtctattataataaagattatggcacagtaaaaaaaaaaaaaaaaaa

SEQ ID NO: 949 - protein, 793 aa, Homo sapiens
MDDFERRRELRRQKREEMRLEAERIAYQRNDDDEEEAARERRRRARQERLRQKQEEESLGQVTDQVEVNAQNSVPDEEAKTTTTNTQVEGDDEAAFLERLARREERRQKRLQEALERQKEFDPTITDASLSLPSRRMQNDTAENETTEKEEKSESRQERYEIEETETVTKSYQKNDWRDAEENKKEDKEKEEEEEEKPKRGSIGENQVEVMVEEKTTESQEETVVMSLKNGQISSEEPKQEEEREQGSDEISHHEKMEEEDKERAEAERARLEAEERERIKAEQDKKIADERARIEAEEKAAAQERERREAEERERMREEEKRAAEERQRIKEEEKRAAEERQRIKEEEKRAAEERQRIKEEEKRAAEERQRARAEEEEKAKVEEQKRNKQLEEKKHAMQETKIKGEKVEQKIEGKWVNEKKAQEDKLQTAVLKKQGEEKGTKVQAKREKLQEDKPTFKKEEIKDEKIKKDKEPKEEVKSFMDRKKGFTEVKSQNGEFMTHKLKHTENTFSRPGGRASVDTKEAEGAPQVEAGKRLEELRRRRGETESEEFEKLKQKQQEAALELEELKKKREERRKVLEEEEQRRKQEEADRKLREEEEKRRLKEEIERRRAEAAEKRQKMPEDGLSDDKKPFKCFTPKGSSLKIEERAEFLNKSVQKSSGVKSTHQAAIVSKIDSRLEQYTSAIEGTKSAKPTKPAASDLPVPAEGVRNIKSMWEKGNVFSSPTAAGTPNKETAGLKVGVSSRINEWLTKTPDGNKSPAPKPSDLRPGDVSSKRNLWEKQSVDKVTSPTKV

SEQ ID NO: 950 - DNA, 4282 bp, Homo sapiens
gggaggagtagatttggctgaggacaagcccagactttcgtcacagggacagaccaacgtgttaacacaaagggagaacacgggagcatcctgcaccgtgcatttcagccacagatcacatggcccctccgcgggcccagcccacgccctgaccgcccggcctggccaggtctccgtatctctctgccccgccgccccttcccaactgcggacatgctgggtggatccggatcgcatggaagacgcagcctggccgcgctctcccaaatcgcctaccagaggaatgacgatgatgaagaggaggcagcccgggaacggcgccgccgagcccgacaggaacggctgcggcagaagcaggaggaagaatccttgggacaggtgaccgaccaggtggaggtgaatgcccagaacagtgtgcctgacgaggaggccaagacaaccaccacaaacactcaagtggaaggggatgatgaggccgcattcctggagcgcctggctcggcgtgaggaaagacgccaaaaacgccttcaggaggctctggagcggcagaaggagttcgacccaacaataacagatgcaagtctgtcgctcccaagcagaagaatgcaaaatgacacagcagaaaatgaaactaccgagaaggaagaaaaaagtgaaagtcgccaagaaagatacgagatagaggaaacagaaacagtcaccaagtcctaccagaagaatgattggagggatgctgaagaaaacaagaaagaagacaaggaaaaggaggaggaggaagaggagaagccaaagcgagggagcattggagaaaatcagggagaagagaagggaactaaagtgcaagctaaaagagaaaagctccaagaagacaagcctaccttcaaaaaagaagagatcaaagatgaaaagattaaaaaggacaaagaacccaaagaagaagttaagagcttcatggatcgaaagaagggatttacagaagttaagtcgcagaatggagaattcatgacccacaaacttaaacatactgagaatactttcagccgccctggagggagggccagcgtggacaccaaggaggctgagggcgccccccaggtggaagccggcaaaaggctggaggagcttcgtcgtcgtcgcggggagaccgagagcgaagagttcgagaagctcaaacagaagcagcaggaggcggctttggagctggaggaactcaagaaaaagagggaggagagaaggaaggtcctggaggaggaagagcagaggaggaagcaggaggaagccgatcgaaaactcagagaggaggaagagaagaggaggctaaaggaagagattgaaaggcgaagagcagaagctgctgagaaacgccagaagatgccagaagatggcttgtcagatgacaagaaaccattcaagtgtttcactcctaaaggttcatctctcaagatagaagagcgagcagaatttttgaataagtctgtgcagaaaagcagtggtgtcaaatcgacccatcaagcagcaatagtctccaagattgacagcagactggagcagtataccagtgcaattgagggaacaaaaagcgcaaaacctacaaagccggcagcctcggatcttcctgttcctgctgaaggtgtacgcaacatcaagagtatgtgggagaaagggaatgtgttttcatcccccactgcagcaggcacaccaaataaggaaactgctggcttgaaggtaggggtttctagccgcatcaatgaatggctaactaaaaccccagatggaaacaagtcacctgctcccaaaccttctgacttgagaccaggagacgtatccagcaagcggaacctctgggaaaagcaatctgtggataaggtcacttcccccactaaggtttgagacagttccagaaagaacccaagctcaagacgcaggacgagctcagttgtagagggctaattcgctctgttttgtatttatgttgatttactaaattgggttcattatcttttatttttcaatatcccagtaaacccatgtatattatcactatatttaataatcacagtctagagatgttcatggtaaaagtactgcctttgcacaggagcctgtttctaaagaaacccatgctgtgaaatagagacttttctactgatcatcataactctgtatctgagcagtgataccaaccacatctgaagtcaacagaagatccaagtttaaaattgcctgcggaatgtgtgcagtatctagaaaaatgaaccgtagtttttgtttttttaaatacagaagtcatgttgtttctgcactttataataaagcatggaagaaattatcttagtaggcaattgtaacactttttgaaagtaacccatttcagatttgaaatactgcaataatggttgtctttaaaaaaaaaaaagaaatgtactgttaaggtattactttttttcatgctgatgattcatatctaaattacattattatgttagctgacagtggtactgattttttaggttggttgttttgtggatttctttagtagtgatagtagcctgaaccacattttagataactcaattatgtatgtatgtgcatacacatatacaaacacactaatggtagaatgcttttttatgtgctagactattatatttagtagtatgtcattgtaactagccaatatcacagcttttgaaaaattaaaaaatcacactatattaatatttcatatttgccaacagaaacatggcagataggtatcaatatgttttcaatgcctgatgacctataagaagaaagtattgaaaagaagagagattagaactgttagaaggagttgaaattttctaaaagacatagtatttagtttataattaaatgcattcttgaagtccagtgtgaattttattaatgctatcatctcgaccaagctcaaagcctacttattagaaacaatgaagttcacaataggtcataaggtctcttccttttctaaaattgaaagacaagaaatttagtgccaatattgtacagacagaaattccatgtatgagtctcaacaaagactacctttggctaaatgtctagaagcagagaagtaaagtgagcaaaatccagtgttgaggagtcatgacagtactttgatctttatatactctgaagcatttcttcaaacttttctacttttatttgtcattgatacctgtagtaagttgacaatgtggtgaaatttcaaaattatatgtaacttctactagttttactttctcccccaagtcttttttaactcatgatttttacacacacaatccagaacttattatatagcctctaagtctttattcttcacagtagataatgaaagagtcctccagtgtcttggcaaaatgttctagtatagctggatacatacagtggagttctataaactcatacctcagtggacttaaccaaaattgtgttagtctcaattcctaccacactgagggagcctcccaaataactattttcttatctgcagtattcctccagaagagctaaccagggcagggctggcatgagaagtgacatctgcgttacaaagtctatcttcctcataagtctgtaaagagcaattgaatcttctagctttagcaaacctaagccaaaggaaggaaagccacgaagaatgcagaagtcaaaccctcatgacaaagtaggcacaagtctacaataagctaaatcagaatttacaaatacaagtgtcccaggtagcattgactcccgtcattggagtgaaatggatcaaagtttgaattaaggcctatggtaaggtaacattgctttgttgtacttttgaacaagagctcctcctgatcactattacatatttttctagaaaatctaaagttcagaagagaatgtatcactgctgacttttattccaatatttggatggagtaagttttagggtagaattttgttcagtttggatttaatcttttgaaaagtaaattccttgtttactggtttgactataattctctgttatctttacgaggtaaaactgcaagctgactagcatgttctgtgaatctgccattcctaaaaattttataaacacttgatacttttcactgataatggatcgctccaataaacatatattgtgaaaatgcatccacaataaatggaattccttcctgcaaaatgtctttttctcacttatttttatgtacaatattgatagtgagaggtatgtctattataataaagattatggcacagtaaaaaaaaaaaaaaaaaa

SEQ ID NO: 951 - protein, 558 aa, Homo sapiens
MLGGSGSHGRRSLAALSQIAYQRNDDDEEEAARERRRRARQERLRQKQEEESLGQVTDQVEVNAQNSVPDEEAKTTTTNTQVEGDDEAAFLERLARREERRQKRLQEALERQKEFDPTITDASLSLPSRRMQNDTAENETTEKEEKSESRQERYEIEETETVTKSYQKNDWRDAEENKKEDKEKEEEEEEKPKRGSIGENQGEEKGTKVQAKREKLQEDKPTFKKEEIKDEKIKKDKEPKEEVKSFMDRKKGFTEVKSQNGEFMTHKLKHTENTFSRPGGRASVDTKEAEGAPQVEAGKRLEELRRRRGETESEEFEKLKQKQQEAALELEELKKKREERRKVLEEEEQRRKQEEADRKLREEEEKRRLKEEIERRRAEAAEKRQKMPEDGLSDDKKPFKCFTPKGSSLKIEERAEFLNKSVQKSSGVKSTHQAAIVSKIDSRLEQYTSAIEGTKSAKPTKPAASDLPVPAEGVRNIKSMWEKGNVFSSPTAAGTPNKETAGLKVGVSSRINEWLTKTPDGNKSPAPKPSDLRPGDVSSKRNLWEKQSVDKVTSPTKV

SEQ ID NO: 952 - DNA, 4204 bp, Homo sapiens
gggaggagtagatttggctgaggacaagcccagactttcgtcacagggacagaccaacgtgttaacacaaagggagaacacgggagcatcctgcaccgtgcatttcagccacagatcacatggcccctccgcgggcccagcccacgccctgaccgcccggcctggccaggtctccgtatctctctgccccgccgccccttcccaactgcggacatgctgggtggatccggatcgcatggaagacgcagcctggccgcgctctcccaaatcgcctaccagaggaatgacgatgatgaagaggaggcagcccgggaacggcgccgccgagcccgacaggaacggctgcggcagaagcaggaggaagaatccttgggacaggtgaccgaccaggtggaggtgaatgcccagaacagtgtgcctgacgaggaggccaagacaaccaccacaaacactcaagtggaaggggatgatgaggccgcattcctggagcgcctggctcggcgtgaggaaagacgccaaaaacgccttcaggaggctctggagcggcagaaggagttcgacccaacaataacagatgcaagtctgtcgctcccaagcagaagaatgcaaaatgacacagcagaaaatgaaactaccgagaaggaagaaaaaagtgaaagtcgccaagaaagatacgagatagaggaaacagaaacagtcaccaagtcctaccagaagaatgattggagggatgctgaagaaaacaagaaagaagacaaggaaaaggaggaggaggaagaggagaagccaaagcgagggagcattggagaaaatcagatcaaagatgaaaagattaaaaaggacaaagaacccaaagaagaagttaagagcttcatggatcgaaagaagggatttacagaagttaagtcgcagaatggagaattcatgacccacaaacttaaacatactgagaatactttcagccgccctggagggagggccagcgtggacaccaaggaggctgagggcgccccccaggtggaagccggcaaaaggctggaggagcttcgtcgtcgtcgcggggagaccgagagcgaagagttcgagaagctcaaacagaagcagcaggaggcggctttggagctggaggaactcaagaaaaagagggaggagagaaggaaggtcctggaggaggaagagcagaggaggaagcaggaggaagccgatcgaaaactcagagaggaggaagagaagaggaggctaaaggaagagattgaaaggcgaagagcagaagctgctgagaaacgccagaagatgccagaagatggcttgtcagatgacaagaaaccattcaagtgtttcactcctaaaggttcatctctcaagatagaagagcgagcagaatttttgaataagtctgtgcagaaaagcagtggtgtcaaatcgacccatcaagcagcaatagtctccaagattgacagcagactggagcagtataccagtgcaattgagggaacaaaaagcgcaaaacctacaaagccggcagcctcggatcttcctgttcctgctgaaggtgtacgcaacatcaagagtatgtgggagaaagggaatgtgttttcatcccccactgcagcaggcacaccaaataaggaaactgctggcttgaaggtaggggtttctagccgcatcaatgaatggctaactaaaaccccagatggaaacaagtcacctgctcccaaaccttctgacttgagaccaggagacgtatccagcaagcggaacctctgggaaaagcaatctgtggataaggtcacttcccccactaaggtttgagacagttccagaaagaacccaagctcaagacgcaggacgagctcagttgtagagggctaattcgctctgttttgtatttatgttgatttactaaattgggttcattatcttttatttttcaatatcccagtaaacccatgtatattatcactatatttaataatcacagtctagagatgttcatggtaaaagtactgcctttgcacaggagcctgtttctaaagaaacccatgctgtgaaatagagacttttctactgatcatcataactctgtatctgagcagtgataccaaccacatctgaagtcaacagaagatccaagtttaaaattgcctgcggaatgtgtgcagtatctagaaaaatgaaccgtagtttttgtttttttaaatacagaagtcatgttgtttctgcactttataataaagcatggaagaaattatcttagtaggcaattgtaacactttttgaaagtaacccatttcagatttgaaatactgcaataatggttgtctttaaaaaaaaaaaagaaatgtactgttaaggtattactttttttcatgctgatgattcatatctaaattacattattatgttagctgacagtggtactgattttttaggttggttgttttgtggatttctttagtagtgatagtagcctgaaccacattttagataactcaattatgtatgtatgtgcatacacatatacaaacacactaatggtagaatgcttttttatgtgctagactattatatttagtagtatgtcattgtaactagccaatatcacagcttttgaaaaattaaaaaatcacactatattaatatttcatatttgccaacagaaacatggcagataggtatcaatatgttttcaatgcctgatgacctataagaagaaagtattgaaaagaagagagattagaactgttagaaggagttgaaattttctaaaagacatagtatttagtttataattaaatgcattcttgaagtccagtgtgaattttattaatgctatcatctcgaccaagctcaaagcctacttattagaaacaatgaagttcacaataggtcataaggtctcttccttttctaaaattgaaagacaagaaatttagtgccaatattgtacagacagaaattccatgtatgagtctcaacaaagactacctttggctaaatgtctagaagcagagaagtaaagtgagcaaaatccagtgttgaggagtcatgacagtactttgatctttatatactctgaagcatttcttcaaacttttctacttttatttgtcattgatacctgtagtaagttgacaatgtggtgaaatttcaaaattatatgtaacttctactagttttactttctcccccaagtcttttttaactcatgatttttacacacacaatccagaacttattatatagcctctaagtctttattcttcacagtagataatgaaagagtcctccagtgtcttggcaaaatgttctagtatagctggatacatacagtggagttctataaactcatacctcagtggacttaaccaaaattgtgttagtctcaattcctaccacactgagggagcctcccaaataactattttcttatctgcagtattcctccagaagagctaaccagggcagggctggcatgagaagtgacatctgcgttacaaagtctatcttcctcataagtctgtaaagagcaattgaatcttctagctttagcaaacctaagccaaaggaaggaaagccacgaagaatgcagaagtcaaaccctcatgacaaagtaggcacaagtctacaataagctaaatcagaatttacaaatacaagtgtcccaggtagcattgactcccgtcattggagtgaaatggatcaaagtttgaattaaggcctatggtaaggtaacattgctttgttgtacttttgaacaagagctcctcctgatcactattacatatttttctagaaaatctaaagttcagaagagaatgtatcactgctgacttttattccaatatttggatggagtaagttttagggtagaattttgttcagtttggatttaatcttttgaaaagtaaattccttgtttactggtttgactataattctctgttatctttacgaggtaaaactgcaagctgactagcatgttctgtgaatctgccattcctaaaaattttataaacacttgatacttttcactgataatggatcgctccaataaacatatattgtgaaaatgcatccacaataaatggaattccttcctgcaaaatgtctttttctcacttatttttatgtacaatattgatagtgagaggtatgtctattataataaagattatggcacagtaaaaaaaaaaaaaaaaaa

SEQ ID NO: 953 - protein, 532 aa, Homo sapiens
MLGGSGSHGRRSLAALSQIAYQRNDDDEEEAARERRRRARQERLRQKQEEESLGQVTDQVEVNAQNSVPDEEAKTTTTNTQVEGDDEAAFLERLARREERRQKRLQEALERQKEFDPTITDASLSLPSRRMQNDTAENETTEKEEKSESRQERYEIEETETVTKSYQKNDWRDAEENKKEDKEKEEEEEEKPKRGSIGENQIKDEKIKKDKEPKEEVKSFMDRKKGFTEVKSQNGEFMTHKLKHTENTFSRPGGRASVDTKEAEGAPQVEAGKRLEELRRRRGETESEEFEKLKQKQQEAALELEELKKKREERRKVLEEEEQRRKQEEADRKLREEEEKRRLKEEIERRRAEAAEKRQKMPEDGLSDDKKPFKCFTPKGSSLKIEERAEFLNKSVQKSSGVKSTHQAAIVSKIDSRLEQYTSAIEGTKSAKPTKPAASDLPVPAEGVRNIKSMWEKGNVFSSPTAAGTPNKETAGLKVGVSSRINEWLTKTPDGNKSPAPKPSDLRPGDVSSKRNLWEKQSVDKVTSPTKV

SEQ ID NO: 954 - DNA, 4546 bp, Homo sapiens
gatttcctgagcatgcctagggaatgacaggcatctccacaggcaggctgcatccaccttggctggggtgtcgtcattggctgcctattagaaaaacgacaggacaatgcataccaccgcctcccgactgtaaacataggggatatgtgttcacttagcatggacttctgggaggggccaaggaagggcggtctggagttttattgaatagagcagtgtgtattcggctgcctgcctgcccgcctgcttgctctctggctgtgctcctgcttaaagaaatcagtccttcctttccgacttagtcctcgggaagaagtttcagactacaaggtatcattggaacatttcaagatcatcaaatcaaattccacagggattggtgaccaaccagaaggctcagacatctgattgctgacctgtccagacatcatctggtctccctgaacctgaaatcacaccatggatgattttgagcgtcgcagagaacttagaaggcaaaagagggaggagatgcgactcgaagcagaaagaatcgcctaccagaggaatgacgatgatgaagaggaggcagcccgggaacggcgccgccgagcccgacaggaacggctgcggcagaagcaggaggaagaatccttgggacaggtgaccgaccaggtggaggtgaatgcccagaacagtgtgcctgacgaggaggccaagacaaccaccacaaacactcaagtggaaggggatgatgaggccgcattcctggagcgcctggctcggcgtgaggaaagacgccaaaaacgccttcaggaggctctggagcggcagaaggagttcgacccaacaataacagatgcaagtctgtcgctcccaagcagaagaatgcaaaatgacacagcagaaaatgaaactaccgagaaggaagaaaaaagtgaaagtcgccaagaaagatacgagatagaggaaacagaaacagtcaccaagtcctaccagaagaatgattggagggatgctgaagaaaacaagaaagaagacaaggaaaaggaggaggaggaagaggagaagccaaagcgagggagcattggagaaaatcagggagaagagaagggaactaaagtgcaagctaaaagagaaaagctccaagaagacaagcctaccttcaaaaaagaagagatcaaagatgaaaagattaaaaaggacaaagaacccaaagaagaagttaagagcttcatggatcgaaagaagggatttacagaagttaagtcgcagaatggagaattcatgacccacaaacttaaacatactgagaatactttcagccgccctggagggagggccagcgtggacaccaaggaggctgagggcgccccccaggtggaagccggcaaaaggctggaggagcttcgtcgtcgtcgcggggagaccgagagcgaagagttcgagaagctcaaacagaagcagcaggaggcggctttggagctggaggaactcaagaaaaagagggaggagagaaggaaggtcctggaggaggaagagcagaggaggaagcaggaggaagccgatcgaaaactcagagaggaggaagagaagaggaggctaaaggaagagattgaaaggcgaagagcagaagctgctgagaaacgccagaagatgccagaagatggcttgtcagatgacaagaaaccattcaagtgtttcactcctaaaggttcatctctcaagatagaagagcgagcagaatttttgaataagtctgtgcagaaaagcagtggtgtcaaatcgacccatcaagcagcaatagtctccaagattgacagcagactggagcagtataccagtgcaattgagggaacaaaaagcgcaaaacctacaaagccggcagcctcggatcttcctgttcctgctgaaggtgtacgcaacatcaagagtatgtgggagaaagggaatgtgttttcatcccccactgcagcaggcacaccaaataaggaaactgctggcttgaaggtaggggtttctagccgcatcaatgaatggctaactaaaaccccagatggaaacaagtcacctgctcccaaaccttctgacttgagaccaggagacgtatccagcaagcggaacctctgggaaaagcaatctgtggataaggtcacttcccccactaaggtttgagacagttccagaaagaacccaagctcaagacgcaggacgagctcagttgtagagggctaattcgctctgttttgtatttatgttgatttactaaattgggttcattatcttttatttttcaatatcccagtaaacccatgtatattatcactatatttaataatcacagtctagagatgttcatggtaaaagtactgcctttgcacaggagcctgtttctaaagaaacccatgctgtgaaatagagacttttctactgatcatcataactctgtatctgagcagtgataccaaccacatctgaagtcaacagaagatccaagtttaaaattgcctgcggaatgtgtgcagtatctagaaaaatgaaccgtagtttttgtttttttaaatacagaagtcatgttgtttctgcactttataataaagcatggaagaaattatcttagtaggcaattgtaacactttttgaaagtaacccatttcagatttgaaatactgcaataatggttgtctttaaaaaaaaaaaagaaatgtactgttaaggtattactttttttcatgctgatgattcatatctaaattacattattatgttagctgacagtggtactgattttttaggttggttgttttgtggatttctttagtagtgatagtagcctgaaccacattttagataactcaattatgtatgtatgtgcatacacatatacaaacacactaatggtagaatgcttttttatgtgctagactattatatttagtagtatgtcattgtaactagccaatatcacagcttttgaaaaattaaaaaatcacactatattaatatttcatatttgccaacagaaacatggcagataggtatcaatatgttttcaatgcctgatgacctataagaagaaagtattgaaaagaagagagattagaactgttagaaggagttgaaattttctaaaagacatagtatttagtttataattaaatgcattcttgaagtccagtgtgaattttattaatgctatcatctcgaccaagctcaaagcctacttattagaaacaatgaagttcacaataggtcataaggtctcttccttttctaaaattgaaagacaagaaatttagtgccaatattgtacagacagaaattccatgtatgagtctcaacaaagactacctttggctaaatgtctagaagcagagaagtaaagtgagcaaaatccagtgttgaggagtcatgacagtactttgatctttatatactctgaagcatttcttcaaacttttctacttttatttgtcattgatacctgtagtaagttgacaatgtggtgaaatttcaaaattatatgtaacttctactagttttactttctcccccaagtcttttttaactcatgatttttacacacacaatccagaacttattatatagcctctaagtctttattcttcacagtagataatgaaagagtcctccagtgtcttggcaaaatgttctagtatagctggatacatacagtggagttctataaactcatacctcagtggacttaaccaaaattgtgttagtctcaattcctaccacactgagggagcctcccaaataactattttcttatctgcagtattcctccagaagagctaaccagggcagggctggcatgagaagtgacatctgcgttacaaagtctatcttcctcataagtctgtaaagagcaattgaatcttctagctttagcaaacctaagccaaaggaaggaaagccacgaagaatgcagaagtcaaaccctcatgacaaagtaggcacaagtctacaataagctaaatcagaatttacaaatacaagtgtcccaggtagcattgactcccgtcattggagtgaaatggatcaaagtttgaattaaggcctatggtaaggtaacattgctttgttgtacttttgaacaagagctcctcctgatcactattacatatttttctagaaaatctaaagttcagaagagaatgtatcactgctgacttttattccaatatttggatggagtaagttttagggtagaattttgttcagtttggatttaatcttttgaaaagtaaattccttgtttactggtttgactataattctctgttatctttacgaggtaaaactgcaagctgactagcatgttctgtgaatctgccattcctaaaaattttataaacacttgatacttttcactgataatggatcgctccaataaacatatattgtgaaaatgcatccacaataaatggaattccttcctgcaaaatgtctttttctcacttatttttatgtacaatattgatagtgagaggtatgtctattataataaagattatggcacagtaaaaaaaaaaaaaaaaaa

SEQ ID NO: 955 - protein, 564 aa, Homo sapiens
MDDFERRRELRRQKREEMRLEAERIAYQRNDDDEEEAARERRRRARQERLRQKQEEESLGQVTDQVEVNAQNSVPDEEAKTTTTNTQVEGDDEAAFLERLARREERRQKRLQEALERQKEFDPTITDASLSLPSRRMQNDTAENETTEKEEKSESRQERYEIEETETVTKSYQKNDWRDAEENKKEDKEKEEEEEEKPKRGSIGENQGEEKGTKVQAKREKLQEDKPTFKKEEIKDEKIKKDKEPKEEVKSFMDRKKGFTEVKSQNGEFMTHKLKHTENTFSRPGGRASVDTKEAEGAPQVEAGKRLEELRRRRGETESEEFEKLKQKQQEAALELEELKKKREERRKVLEEEEQRRKQEEADRKLREEEEKRRLKEEIERRRAEAAEKRQKMPEDGLSDDKKPFKCFTPKGSSLKIEERAEFLNKSVQKSSGVKSTHQAAIVSKIDSRLEQYTSAIEGTKSAKPTKPAASDLPVPAEGVRNIKSMWEKGNVFSSPTAAGTPNKETAGLKVGVSSRINEWLTKTPDGNKSPAPKPSDLRPGDVSSKRNLWEKQSVDKVTSPTKV

SEQ ID NO: 956 - DNA, 3033 bp, Homo sapiens
aggggtgagctggcggcgggggaggcgggcagcggagccaagctgacccggcgagcggagccggggctggagagcggcgaccactgcggatctcggaaggaagaaatgatgtaaatcactcatccaaaccttaaggtcaaaggtgagaaggaaggtcaggaagaacatggcctggccaaatgtttttcaaagagggtctctgctgtcccagttcagccatcatcatgttgtagtgttcctgctcactttcttcagttattcgttgctccatgcttcacgaaaaacatttagcaatgtcaaagtcagtatctctgagcagtggaccccaagtgcttttaacacgtcagttgagctgcctgtggagatctggagcagcaaccatttgttccccagtgcagagaaagcgactcttttcctcggcacactggataccattttcctcttctcctatgctgtgggcctattcatcagtggcatcgttggggatcggttgaatttgcgatgggttctgtcttttggcatgtgctcttctgcattagtggtgtttgtctttggtgcgctcacagaatggctgcgtttctacaacaaatggctgtactgctgcctgtggattgtgaacggcctgctgcagtccactggttggccctgtgtggttgctgttatgggcaactggtttgggaaagccggacgaggagttgtttttggtctctggagtgcctgtgcttcggtgggcaacattttgggagcgtgcctagcttcttctgttcttcagtatggttatgagtatgcctttctggtgacggcgtctgtgcagtttgctggtgggatcgttatcttctttggactcctggtgtcaccagaagaaattggtctctcgggtattgaggcagaagaaaactttgaagaagactcacacaggccattaattaatggtggtgaaaatgaagacgaatatgagccgaattattcaatccaagatgatagttctgttgcccaagtcaaggcgataagcttctaccaggcatgttgccttcctggagtcataccgtactcactggcctacgcctgcttgaagttagtgaattactccttcttcttctggctccccttttatctgagtaacaacttcggctggaaggaggcggaagccgacaagctgtccatttggtacgacgttggagggatcatagtatttagtgtctctgatccgggacaagctaggatggatgtgggttttctactttttcattctcatgacaagttgtacaattgtgtttatctcgccattaatagtgagggaaatattctctctcgtgctaaggagacaggctcacatattgagggagtgaccggtgcccgcgagacagaaagaacaatgtcagccacatcaggaccgctggggcttcgagtctgccctaatttgggtttgtctaggagctccagcctgatcttggattgtcaggcgtctctcaacactgccagccacctgagatgctgaccagcagtgaaggctgcactagttttctacactacaggaattactgttgatgatttttgctgttgtttcatgaatgtgccgagtgacttctgactctgccagcatctttgacctctgactctgcccgcgtctttgtttggcctattgaggtttagcgttttaaccttaactgttgttttggacttgaactttctctagccttgaaaatggagtgaacaggaggcaaagccacgcgtggtttgtgttggtggtatgttccacaaatggaagagatcattgcattttgctttggtaatgagtttacagagagtgggtcatctttgaagcatcaaatcctgatcaaatgctcaagctggaccgagctgcaagcctgccttggacaaagaatccctctgttcactgtggtgggaaagatcacactacatgcctgttgattggctcagtcactctgtgtctgatctaaacgtcattcagccctagaagcatgaattgcttcaaattattgtcaacttgttctcttccattttcattcaaattaactttgactcctggaagtattgagtcttcctttcaaggaccataaggtacatcagttatcttgaacattctgacgtgtaaaggaccataaggtacatcatttatcttgaacattccgacgtgtaactcacagccgaagcactccatcccagatttgttgtctgggaacttaggatcctctaggaagctaatctgcttagtctatttttagaggattgatctctggcacaagcagcttcctggagttacctcagcagaagactagaattagagaaaagggaaagaccttttcttctagtaagtgtcaagtacagatgctctttgacttatgatggggttatgtcccagtaaacccattggaagtcaaatgcatttaatacccctgactggacaccacagcttagcctcgtccaccctaaatgtactcagaacacttagaattgcccacagttgggcagaatcatctaacacaaactctattttataatcgagtgttgaatatatcatgtaatttattgaatattgtacattatgttgaaattgcaaccatttcacaccattgtaaagtccaaaaatcagaagctgaggactgtctgtacatgacattgaatcacatgaatggattactagggcctgaggggtgtccgttctttagaaaaatgtagagtatatatatcttcagggctgtgaattccatactagttatcaatattttaagatcattctgtatatacatattttaaattatgcaagcaaactaggaggagaatgtgcaattttgagggatacctaatttgcattcggttaggggatatttttcaacctcttgctttatactctgatatggggtgtgtttatgaacttgttaatgttatttaatcatgcagatttccaatcagtgtattgctcatttactgacaaaaagggaaaatacgaaacacagaaagggaaaataaactgacttttataatgaaaaaaaaaaaaaaaaaaaaaaaaaa

SEQ ID NO: 957 - protein, 443 aa, Homo sapiens
MAWPNVFQRGSLLSQFSHHHVVVFLLTFFSYSLLHASRKTFSNVKVSISEQWTPSAFNTSVELPVEIWSSNHLFPSAEKATLFLGTLDTIFLFSYAVGLFISGIVGDRLNLRWVLSFGMCSSALVVFVFGALTEWLRFYNKWLYCCLWIVNGLLQSTGWPCVVAVMGNWFGKAGRGVVFGLWSACASVGNILGACLASSVLQYGYEYAFLVTASVQFAGGIVIFFGLLVSPEEIGLSGIEAEENFEEDSHRPLINGGENEDEYEPNYSIQDDSSVAQVKAISFYQACCLPGVIPYSLAYACLKLVNYSFFFWLPFYLSNNFGWKEAEADKLSIWYDVGGIIVFSVSDPGQARMDVGFLLFHSHDKLYNCVYLAINSEGNILSRAKETGSHIEGVTGARETERTMSATSGPLGLRVCPNLGLSRSSSLILDCQASLNTASHLRC

SEQ ID NO: 958 - DNA, 3335 bp, Homo sapiens
aggggtgagctggcggcgggggaggcgggcagcggagccaagctgacccggcgagcggagccggggctggagagcggcgaccactgcggatctcggaaggaagaaatgatgtaaatcactcatccaaaccttaaggtcaaaggtgagaaggaaggtcaggaagaacatggcctggccaaatgtttttcaaagagggtctctgctgtcccagttcagccatcatcatgttgtagtgttcctgctcactttcttcagttattcgttgctccatgcttcacgaaaaacatttagcaatgtcaaagtcagtatctctgagcagtggaccccaagtgcttttaacacgtcagttgagctgcctgtggagatctggagcagcaaccatttgttccccagtgcagagaaagcgactcttttcctcggcacactggataccattttcctcttctcctatgctgtgggcctattcatcagtggcatcgttggggatcggttgaatttgcgatgggttctgtcttttggcatgtgctcttctgcattagtggtgtttgtctttggtgcgctcacagaatggctgcgtttctacaacaaatggctgtactgctgcctgtggattgtgaacggcctgctgcagtccactggttggccctgtgtggttgctgttatgggcaactggtttgggaaagccggacgaggagttgtttttggtctctggagtgcctgtgcttcggtgggcaacattttgggagcgtgcctagcttcttctgttcttcagtatggttatgagtatgcctttctggtgacggcgtctgtgcagtttgctggtgggatcgttatcttctttggactcctggtgtcaccagaagaaattggtctctcgggtattgaggcagaagaaaactttgaagaagactcacacaggccattaattaatggtggtgaaaatgaagacgaatatgagccgaattattcaatccaagatgatagttctgttgcccaagtcaaggcgataagcttctaccaggcatgttgccttcctggagtcataccgtactcactggcctacgcctgcttgaagttagtgaattactccttcttcttctggctccccttttatctgagtaacaacttcggctggaaggaggcggaagccgacaagctgtccatttggtacgacgttggagggatcataggtggaactttgcaaggcttcatctctgatgtactacagaagagagcgccggttcttgccctgagtctgcttctggcagttgggtccctcatcgggtatagtcgttctccaaatgataagtccatcaatgcccttctgatgactgttacaggattttttattggtggaccttctaatatgattagttctgctatttctgcggacttgggtcgccaggagctcatccaaaggagcagtgaagctttggccactgtcacaggaattgtggatggttcggggagcattggagctgcagtgggccagtatttagtgtctctgatccgggacaagctaggatggatgtgggttttctactttttcattctcatgacaagttgtacaattgtgtttatctcgccattaatagtgagggaaatattctctctcgtgctaaggagacaggctcacatattgagggagtgaccggtgcccgcgagacagaaagaacaatgtcagccacatcaggaccgctggggcttcgagtctgccctaatttgggtttgtctaggagctccagcctgatcttggattgtcaggcgtctctcaacactgccagccacctgagatgctgaccagcagtgaaggctgcactagttttctacactacaggaattactgttgatgatttttgctgttgtttcatgaatgtgccgagtgacttctgactctgccagcatctttgacctctgactctgcccgcgtctttgtttggcctattgaggtttagcgttttaaccttaactgttgttttggacttgaactttctctagccttgaaaatggagtgaacaggaggcaaagccacgcgtggtttgtgttggtggtatgttccacaaatggaagagatcattgcattttgctttggtaatgagtttacagagagtgggtcatctttgaagcatcaaatcctgatcaaatgctcaagctggaccgagctgcaagcctgccttggacaaagaatccctctgttcactgtggtgggaaagatcacactacatgcctgttgattggctcagtcactctgtgtctgatctaaacgtcattcagccctagaagcatgaattgcttcaaattattgtcaacttgttctcttccattttcattcaaattaactttgactcctggaagtattgagtcttcctttcaaggaccataaggtacatcagttatcttgaacattctgacgtgtaaaggaccataaggtacatcatttatcttgaacattccgacgtgtaactcacagccgaagcactccatcccagatttgttgtctgggaacttaggatcctctaggaagctaatctgcttagtctatttttagaggattgatctctggcacaagcagcttcctggagttacctcagcagaagactagaattagagaaaagggaaagaccttttcttctagtaagtgtcaagtacagatgctctttgacttatgatggggttatgtcccagtaaacccattggaagtcaaatgcatttaatacccctgactggacaccacagcttagcctcgtccaccctaaatgtactcagaacacttagaattgcccacagttgggcagaatcatctaacacaaactctattttataatcgagtgttgaatatatcatgtaatttattgaatattgtacattatgttgaaattgcaaccatttcacaccattgtaaagtccaaaaatcagaagctgaggactgtctgtacatgacattgaatcacatgaatggattactagggcctgaggggtgtccgttctttagaaaaatgtagagtatatatatcttcagggctgtgaattccatactagttatcaatattttaagatcattctgtatatacatattttaaattatgcaagcaaactaggaggagaatgtgcaattttgagggatacctaatttgcattcggttaggggatatttttcaacctcttgctttatactctgatatggggtgtgtttatgaacttgttaatgttatttaatcatgcagatttccaatcagtgtattgctcatttactgacaaaaagggaaaatacgaaacacagaaagggaaaataaactgacttttataatgaaaaaaaaaaaaaaaaaaaaaaaaaa

SEQ ID NO: 959 - protein, 494 aa, Homo sapiens
MAWPNVFQRGSLLSQFSHHHVVVFLLTFFSYSLLHASRKTFSNVKVSISEQWTPSAFNTSVELPVEIWSSNHLFPSAEKATLFLGTLDTIFLFSYAVGLFISGIVGDRLNLRWVLSFGMCSSALVVFVFGALTEWLRFYNKWLYCCLWIVNGLLQSTGWPCVVAVMGNWFGKAGRGVVFGLWSACASVGNILGACLASSVLQYGYEYAFLVTASVQFAGGIVIFFGLLVSPEEIGLSGIEAEENFEEDSHRPLINGGENEDEYEPNYSIQDDSSVAQVKAISFYQACCLPGVIPYSLAYACLKLVNYSFFFWLPFYLSNNFGWKEAEADKLSIWYDVGGIIGGTLQGFISDVLQKRAPVLALSLLLAVGSLIGYSRSPNDKSINALLMTVTGFFIGGPSNMISSAISADLGRQELIQRSSEALATVTGIVDGSGSIGAAVGQYLVSLIRDKLGWMWVFYFFILMTSCTIVFISPLIVREIFSLVLRRQAHILRE

SEQ ID NO: 960 - DNA, 795 bp, Homo sapiens
atgcacttctccagctcagccagggcagcagatgagaactttgactatttgttcaagattatcctcattggggattccaatgtggggaagacgtgtgtggtgcagcatttcaagtctggagtctacactgagacacagcagaacacgattggagtggactttaccgtgcgttcccttgatattgacggcaaaaaagtgaagaacagttcggccagtattatcacctttgccagtattcagatccacgggcagactcaaaagatgagcccccaaatctggaccaagagttcccattacctgtgggaacccctgatttggactctccttcctgtccttctccagatgcaggtgtgggacacagctggccaggagcgcttccgcaccatcacccaaagctactaccgcagtgcccacgcagccatcatcgcctatgacctcacccggcggtccacgttcgagtccatccctcactggattcatgagatagagaaatatggagctgcaaatgtggtcattatgctgattggaaataaatgtgacctctgggaaaagcggcacgtcctgttcgaggatgcctgcacactggctgagaagtacggcctcctggccgttttggagacatctgccaaggagtcaaagaacatagaagaagtcttcgtgctcatggccaaggagctgatcgcgcgcaacagcctgcacctatatggggagagtgccctgaacggcctccccctggactccagccccgttcttatggcccagggtccaagtgaaaagacccactgcacttgctaa

SEQ ID NO: 961 - protein, 264 aa, Homo sapiens
MHFSSSARAADENFDYLFKIILIGDSNVGKTCVVQHFKSGVYTETQQNTIGVDFTVRSLDIDGKKVKNSSASIITFASIQIHGQTQKMSPQIWTKSSHYLWEPLIWTLLPVLLQMQVWDTAGQERFRTITQSYYRSAHAAIIAYDLTRRSTFESIPHWIHEIEKYGAANVVIMLIGNKCDLWEKRHVLFEDACTLAEKYGLLAVLETSAKESKNIEEVFVLMAKELIARNSLHLYGESALNGLPLDSSPVLMAQGPSEKTHCTC

SEQ ID NO: 962 - DNA, 342 bp, Homo sapiens
atggggcacagcggcggctcgtgggggacgggatccagcgctttgagaggtggcttcacgctggtggggaaggacgcaggcgcacagcgcgtccttgccgggcaccgcgagggcccgcgagggcccgcgggggaagccctgctacccaaggcctgcgaagggtccagtgtggtcccgcgccccgggaccatacagggagatttcagcgcccacatcagcaggaacttcttccaggcaagcaactccgtggaaggggctcggagatggatcccgctgtggctcccgagcagggacctggtgagctgggcacggcgccagcacagccgcagccacccagcctga

SEQ ID NO: 963 - protein, 113 aa, Homo sapiens [sequence omitted]

SEQ ID NO: 964 - DNA, 3116 bp, Homo sapiens
agcgctcagatacgcgacgcgtagcaggcggggaccgaacgggtgcctcagtgtccttcccctcccctcgcctggcctcgccgtcctctccccgcagccggaccggaactatgtgatcccggaagttccggggcctttgctgtgtgggataaacagtaatggcggaggctgcaactcccggaacaacagccacaacatcaggagcaggagcggcagcggcgacggcggcagcagcctcccccaccccgatccccacagtcaccgccccgtccctgggggcgggcggagggggcggcggcagcgacggcagcggcggcggctggactaaacaggtcacctgcaggtattttatgcatggggtttgtaaggaaggagacaactgtcgctactcgcatgacctctctgacagtccgtatagtgtagtgtgcaagtattttcagcgagggtactgtatttatggagaccgctgcagatatgaacatagcaaaccattgaaacaggaagaagcaactgctacagagctaactacaaagtcatcccttgctgcttcctcaagtctctcatcgatagttggaccacttgttgaaatgaatacaggcgaagctgagtcaagaaattcaaactttgcaactgtaggagcaggttcagaggactgggtgaatgctattgagtttgttcctgggcaaccctactgtggccgtactgcgccttcctgcactgaagcacccctgcagggctcagtgaccaaggaagaatcagagaaagagcaaaccgccgtggagacaaagaagcagctgtgcccctatgctgcagtgggagagtgccgatacggggagaactgtgtgtatctccacggagattcttgtgacatgtgtgggctgcagctcctgcatccaatggatgctgcccagagatcgcagcatatcaaatcgtgcattgaggcccatgagaaggacatggagctctcatttgccgtgcagcgcagcaaggacatggtgtgtgggatctgcatggaggtggtctatgagaaagccaaccccagtgagcgccgcttcgggatcctctccaactgcaaccacacctactgtctcaagtgcattcgcaagtggaggagtgctaagcaatttgagagcaagatcataaagtcctgcccagaatgccggatcacatctaactttgtcattccaagtgagtactgggtggaggagaaagaagagaagcagaaactcattctgaaatacaaggaggcaatgagcaacaaggcgtgcaggtattttgatgaaggacgtgggagctgcccatttggagggaactgtttttacaagcatgcgtaccctgatggccgtagagaggagccacagagacagaaagtgggaacatcaagcagataccgggcccaacgaaggaaccacttctgggaactcattgaggaaagagagaacagcaacccctttgacaacgatgaagaagaggttgtcacctttgagctgggcgagatgttgcttatgcttttggctgcaggtggggacgacgaactaacagactctgaagatgagtgggacttgtttcatgatgagctggaagatttttatgacttggatctatagcaaccttgcgtggcgtgtgaactggtctgctgacctcagacagcagctgtcccctgtggtggtgtggcagtgcctgtgttctctcctaggcaggcctctcaactccaggtgctgtcctaagaatttttacccagggcctgtcttctcaacccctcacctttccctgaggagtgtgttgttttccctgttgaaaaaagttacaaaaataaatcttaaagttagttttttgtaacacgaatttaactgtcagacagttagtgtaggtgtgttgcgtcatctgttttcaaccagattgcatttatggacttttcacacactcattttgaggaccccaggttcaaaagtaaaagcagtggccctgctttggggtccaagaataggagtgatgggtgaagggacctaagctggccaatagccctctgccccagacatgggatgtggatccttgaggtttctggtgaaatctgcacatctgtgtttttatatctgttccctaccctgtaatccctaccacgtgcacttgttctgtggttttggtctcttgtttaattgcacacaagtaatactactgggtaaccagaatcaggtgtgaatgtgttgagattttttactgttttgcatgataggaaaattgagaaagaatacgtataaaagatagagaggcataacatcaatgcagagttggaagttggctcccaagggctgacatggtgtgagtgtgtgggtgtgtgataagcttctcatccctgcatagatgcagtattcttagccttagtagaaaaacctggtttagtggtttaagccttgtgtggcagatagatcttaaagggcaaagcagtatattggtagttgtcaatatagcagtgctagctctgtctatataaatagagaaatggggttagccatagaggttaaaactacctggttatcccatataataacacaaactgggtcttggatacacagttgtatttaatgttttacgatctagcctttccagtacaggcactttctgagaaacctttgtcctcacttgaggcattttgttgtcgggtttttgtgtttgtttttgtgggtatttgcctcattccacccctgagctttcaggtagacagacgtgattcaaaactctgttctaaggtgtttattgtagtggagtaatgggtttgcagtgataagtcatacttttccaccgaaagggagggcttgggaatccctgagattagctaaagttaagttgttggaagaattccttgattggaaattgtacctttgtgttttgttgctctgtttcctgaaaataactcggggatgctcctggtttgtccatctactgctttgattccttggatcccacccattctttcactttaagaaaaaacaaataattgttgcagaggtctctgtattttgcagctgcccttttgtaagaagcacttttcccaaataaaacaattaaaaaaaaaaaaaaaaaaaaaaaaaaaaaaaaaaaaaaaaaaaaaaaaaaaa

SEQ ID NO: 965 - protein, 482 aa, Homo sapiens
MAEAATPGTTATTSGAGAAAATAAAASPTPIPTVTAPSLGAGGGGGGSDGSGGGWTKQVTCRYFMHGVCKEGDNCRYSHDLSDSPYSVVCKYFQRGYCIYGDRCRYEHSKPLKQEEATATELTTKSSLAASSSLSSIVGPLVEMNTGEAESRNSNFATVGAGSEDWVNAIEFVPGQPYCGRTAPSCTEAPLQGSVTKEESEKEQTAVETKKQLCPYAAVGECRYGENCVYLHGDSCDMCGLQLLHPMDAAQRSQHIKSCIEAHEKDMELSFAVQRSKDMVCGICMEVVYEKANPSERRFGILSNCNHTYCLKCIRKWRSAKQFESKIIKSCPECRITSNFVIPSEYWVEEKEEKQKLILKYKEAMSNKACRYFDEGRGSCPFGGNCFYKHAYPDGRREEPQRQKVGTSSRYRAQRRNHFWELIEERENSNPFDNDEEEVVTFELGEMLLMLLAAGGDDELTDSEDEWDLFHDELEDFYDLDL

SEQ ID NO: 966 - DNA, 3737 bp, Homo sapiens
gccgcgggcgagcctgcgctgggccggccgagggaagcgcgccgctggggccgggggcggcggggaccccacgggagcgcgcgcggcggggacccccaggggcttgcgggcggccgggggaggctcggcggacaaaggggcggagggcggagggccatggcgtccccggcacccgccgccgcccgcccccgagccgcgccgccagccgtcccggcccgccccggagcccccaagatgcgccccagagcccgcggagccgccgcccgcggggagggtcaaggtggaaggtccaaggactgagaaagaccctcgaaggcatccactttagtcctccattccattcctagagactgatcaggagtcaggcttcagaaggagtcccctggaaggcctccacaacctcacgctagagtcaagaatggatatgttcagcttggatatgatcatcagtgacccagctgcagaagccagcagggctgggaagaagcagctcagaggtgttcagaacccttgcccatctgccagagccagaccccggcacaagtccctcaacataaaggacaagatatcagaatgggaagggaagaaagaggtgcccactcctgcacccagcaggagagcagacggacaggaggattatctgccgtcctctacggtggagaggaggagtagtgatggggtgagaactcaggtcacagaggctaagaatggaatgaggccaggaacagagagcacagagaaggagaggaataaaggagcagtgaacgtcgggggacaggacccagagccggggcaagacctaagccagccagaacgggaagtggatcctagctggggccgaggccgagagccaagacttggcaagctacgctttcagaacgatcacctctccgtgctgaagcaggtcaagaaactcgagcaggctttgaaggatgggtcggcagggctggatccccagttaccagggacttgttactccccacactgccctcctgacaaggcagaggcagggtccacccttcctgagaacctgggaggcgggagtggctcagaagtcagccagagggtccacccctcggacctggaaggcagggagcccacccctgagcttgtggaggacaggaaaggttcatgcagaaggccctgggaccggagccttgagaacgtgtataggggctcggagggttcccccacaaagcccttcatcaaccctctgccaaaaccccggagaacgttcaaacatgccggagaaggggacaaagatgggaagcctggcatcggcttcaggaaagagaaaagaaatctgcctcctctgccctctctacctcccccgcctctgccctcctctcccccaccttcctctgtgaacagaagactgtggaccgggagacagaaatccagtgcagaccacagaaagtcctatgagtttgaagatttactgcagtcttcctctgagagcagcagggtggactggtacgcgcagactaagctggggctgacacgcactttatcggaggagaacgtctatgaagacattctagatccgccaatgaaggagaacccttatgaggacatcgagttacatggtcgctgcctgggaaagaagtgtgtcttgaattttcctgcttctcccacctcttccatccctgacacactcaccaagcagtcattgtccaaacctgcttttttccgacaaaattcagagaggaggaacttcaagctgctggacactaggaagctgagtcgggatggaactgggtccccttccaaaatcagccctccctccactcccagcagccctgatgacattttctttaaccttggagacccacagaacggcaggaagaagagaaagatacccaagctggtgttgcgaatcaacgccatttatgaggtccggagaggaaagaaacgggtgaagaggctgtcccagtcaatggagagcaactcaggaaaagtgacagatgagaacagtgagtctgacagtgacacagaggagaagctgaaagctcacagccagcgcctggtcaacgtgaagtcccggctgaagcaggcgcctcggtacccatcacttgcccgggaactcatcgagtaccaggagaggcagctcttcgagtactttgtggttgtgtctttgcacaagaagcaggccggggctgcctacgtgccagaactcacccaacagttccctctgaagttggaaaggtctttcaagttcatgagagaagctgaggaccaactgaaggccattccccagttctgttttcccgatgccaaggattgggttcctgtccagcagttcaccagtgaaacattctcgtttgtcttaactggagaagatgggagcagaaggttcggttactgccgaagactgctgcctggaggcaaagggaagcgccttcctgaagtttactgcattgtgagccgcctgggatgcttcagcctcttttcaaggatcttggatgaggtggaaaaaagacgaggcatctctcctgccctggttcagccactcatgagaagtgtcatggaagcccctttcccagccctgggcaaaaccatccttgtcaagaacttcctgccaggttcaggaactgaggtgatcgaactgtgccgcccgctggactcccggctcgagcacgtggactttgagtctctcttctcctccctcagcgtccgccacctggtctgtgtgtttgcctccctgcttctggagaggagggtcatcttcattgcagacaagctcagcatcctgtccaagtgctgccacgcgatggtggcgctgatctaccccttcgcctggcagcacacctacatcccggtgctgccacccgccatggtcgacatcgtgtgctcgccgacgcccttcctcatcgggctgctctccagctcgctgccactgctcagggagctgccgctggaagaggtccttgtggttgacctcgtcaacagccggttcctcagacagatggacgatgaggactccatcctgccccggaagcttcaggtggtcctggaacacattctggaacagaggaacgagctggcttgtgagcaggacgaagggcccctagacggcaggcacggtccagagtccagccccttgaacgaggtggtgtctgaagcctttgtccgcttcttcgtggagattgtgggacactactctttgttcctgacgtcgggcgagcgtgaggagagaaccctgcagcgggaggccttccgcaaagctgtctcctccaagagcctccgccacttcctggaggtcttcatggagactcagatgtttcggggcttcatccaggagcgggagctgcgccggcaggatgccaaaggtctgtttgaggtccgagcccaagagtatctggaaacactccccagtggagagcacagcggtgtcaataagttcctgaagggactaggcaataaaatgaaatttctccacaagaaataactctcagcctcaagggaaaacttcctcctagtgcagccctattctttaaaaacagttcctggtggcctttctgaaaggctgggtcccaggttgtcacggtgcggaactggaggccgcggtggcttctggccgaggctgggctcttccctggatgaggacctgggagccgcctgggaggacagccccagaaagggagcccgagaccaggcgtgtcgccgacatgcaaatgggttgttttggtggttgggtttttttttttttatcttagatattaaaagtaagaaaaatg

SEQ ID NO: 967 - protein, 1009 aa, Homo sapiens
MDMFSLDMIISDPAAEASRAGKKQLRGVQNPCPSARARPRHKSLNIKDKISEWEGKKEVPTPAPSRRADGQEDYLPSSTVERRSSDGVRTQVTEAKNGMRPGTESTEKERNKGAVNVGGQDPEPGQDLSQPEREVDPSWGRGREPRLGKLRFQNDHLSVLKQVKKLEQALKDGSAGLDPQLPGTCYSPHCPPDKAEAGSTLPENLGGGSGSEVSQRVHPSDLEGREPTPELVEDRKGSCRRPWDRSLENVYRGSEGSPTKPFINPLPKPRRTFKHAGEGDKDGKPGIGFRKEKRNLPPLPSLPPPPLPSSPPPSSVNRRLWTGRQKSSADHRKSYEFEDLLQSSSESSRVDWYAQTKLGLTRTLSEENVYEDILDPPMKENPYEDIELHGRCLGKKCVLNFPASPTSSIPDTLTKQSLSKPAFFRQNSERRNFKLLDTRKLSRDGTGSPSKISPPSTPSSPDDIFFNLGDPQNGRKKRKIPKLVLRINAIYEVRRGKKRVKRLSQSMESNSGKVTDENSESDSDTEEKLKAHSQRLVNVKSRLKQAPRYPSLARELIEYQERQLFEYFVVVSLHKKQAGAAYVPELTQQFPLKLERSFKFMREAEDQLKAIPQFCFPDAKDWVPVQQFTSETFSFVLTGEDGSRRFGYCRRLLPGGKGKRLPEVYCIVSRLGCFSLFSRILDEVEKRRGISPALVQPLMRSVMEAPFPALGKTILVKNFLPGSGTEVIELCRPLDSRLEHVDFESLFSSLSVRHLVCVFASLLLERRVIFIADKLSILSKCCHAMVALIYPFAWQHTYIPVLPPAMVDIVCSPTPFLIGLLSSSLPLLRELPLEEVLVVDLVNSRFLRQMDDEDSILPRKLQVVLEHILEQRNELACEQDEGPLDGRHGPESSPLNEVVSEAFVRFFVEIVGHYSLFLTSGEREERTLQREAFRKAVSSKSLRHFLEVFMETQMFRGFIQERELRRQDAKGLFEVRAQEYLETLPSGEHSGVNKFLKGLGNKMKFLHKK

SEQ ID NO: 968 - DNA, 14358 bp, Homo sapiens
aaaattccttagttgctggctttgaccttttatgttgctgagttttacacatctattttctcaactgccatatcctagggggcttggagtacccataatacagtgagcccaccttcctggtccccagacatttcagaaggtcgggaaatttttaaacccaggcagcttcctggcagtgccatttggagcatcaaagtgggccgtgggtctggatttccaggaaagcggagacctcgaggtgcaggactgtcggggcgaggtggccgaggcaggtcaaagctgaaaagtggaatcggagctgttgtattacctggggtgtctactgcagatatttcatcaaataaggatgatgaagaaaactctatgcacaatacagttgtgttgttttctagcagtgacaagttcactttgaatcaggatatgtgtgtagtttgtggcagttttggccaaggagcagaaggaagattacttgcctgttctcagtgtggtcagtgttaccatccatactgtgtcagtattaagatcactaaagtggttcttagcaaaggttggaggtgtcttgagtgcactgtgtgtgaggcctgtgggaaggcaactgacccaggaagactcctgctgtgtgatgactgtgacataagttatcacacctactgcctagaccctccattgcagacagttcccaaaggaggctggaagtgcaaatggtgtgtttggtgcagacactgtggagcaacatctgcaggtctaagatgtgaatggcagaacaattacacacagtgcgctccttgtgcaagcttatcttcctgtccagtctgctatcgaaactatagagaagaagatcttattctgcaatgtagacaatgtgatagatggatgcatgcagtttgtcagaacttaaatactgaggaagaagtggaaaatgtagcagacattggttttgattgtagcatgtgcagaccctatatgcctgcgtctaatgtgccttcctcagactgctgtgaatcttcacttgtagcacaaattgtcacaaaagtaaaagagctagacccacccaagacttatacccaggatggtgtgtgtttgactgaatcagggatgactcagttacagagcctcacagttacagttccaagaagaaaacggtcaaaaccaaaattgaaattgaagattataaatcagaatagcgtggccgtccttcagacccctccagacatccaatcagagcattcaagggatggtgaaatggatgatagtcgagaaggagaacttatggattgtgatggaaaatcagaatctagtcctgagcgggaagctgtggatgatgaaactaagggagtggaaggaacagatggtgtcaaaaagagaaaaaggaaaccatacagaccaggtattggtggatttatggtgcggcaaagaagtcgaactgggcaagggaaaaccaaaagatctgtgatcagaaaagattcctcaggctctatttccgagcagttaccttgcagagatgatggctggagtgagcagttaccagatactttagttgatgaatctgtttctgttactgaaagcactgaaaaaataaagaagagataccgaaaaaggaaaaataagcttgaagaaactttccctgcctatttacaagaagctttctttggaaaagatcttctagatacaagtagacaaagcaagataagtttagataatctgtcagaagatggagctcagcttttatataaaacaaacatgaacacaggtttcttggatccttccttagatccactacttagttcatcctcggctccaacaaaatctggaactcacggtcctgctgatgacccattagctgatatttctgaagttttaaacacagatgatgacattcttggaataatttcagatgatctagcaaaatcagttgatcattcagatattggtcctgtcactgatgatccttcctctttgcctcagccaaatgtcaatcagagttcacgaccattaagtgaagaacagctagatgggatcctcagtcctgaactagacaaaatggtcacagatggagcaattcttggaaaattatataaaattccagagcttggcggaaaagatgttgaagacttatttacagctgtacttagtcctgcgaacactcagccaactccattgccacagcctcccccaccaacacagctgttgccaatacacaatcaggatgctttttcacggatgcctctcatgaatggccttattggatccagtcctcatctcccacataattctttgccacctggaagcggactgggaactttctctgcaattgcacaatcctcttatcctgatgccagggataaaaattcagcctttaatccaatggcaagtgatcctaacaactcttggacatcatcagctcccactgtggaaggagaaaatgacacaatgtcgaatgcccagagaagcacgcttaagtgggagaaagaggaggctctgggtgaaatggcaactgttgccccagttctctacaccaatattaatttccccaacttaaaggaagaattccctgattggactactagagtgaagcaaattgccaaattgtggagaaaagcaagctcacaagaaagagcaccatatgtgcaaaaagccagagataacagagctgctttacgcattaataaagtacagatgtcaaatgattccatgaaaaggcagcaacagcaagatagcattgatcccagctctcgtattgattcggagctttttaaagatcctttaaagcaaagagaatcagaacatgaacaggaatggaaatttagacagcaaatgcgtcagaaaagtaagcagcaagctaaaattgaagccacacagaaacttgaacaggtgaaaaatgagcagcagcagcagcaacaacagcaatttggttctcagcatcttctggtgcagtctggttcagatacaccaagtagtgggatacagagtcccttgacacctcagcctggcaatggaaatatgtctcctgcacagtcattccataaagaactgtttacaaaacagccacccagtacccctacgtctacatcttcagatgatgtgtttgtaaagccacaagctccacctcctcctccagccccatcccggattcccatccaggatagtctttctcaggctcagacttctcagccaccctcaccgcaagtgttttcacctgggtcctctaactcacgaccaccatctccaatggatccatatgcaaaaatggttggtacccctcgaccacctcctgtgggccatagtttttccagaagaaattctgctgcaccagtggaaaactgtacacctttatcatcggtatctaggccccttcaaatgaatgagacaacagcaaataggccatcccctgtcagagatttatgttcttcttccacgacaaataatgacccctatgcaaaacctccagacacacctaggcctgtgatgacagatcaatttcccaaatccttgggcctatcccggtctcctgtagtttcagaacaaactgcaaaaggccctatagcagctggaaccagtgatcactttactaaaccatctcctagggcagatgtgtttcaaagacaaaggatacctgactcatatgcacgacccttgttgacacctgcacctcttgatagtggtcctggaccttttaagactccaatgcaacctcctccatcctctcaggatccttatggatcagtgtcacaggcatcaaggcgattgtctgttgacccttatgaaaggcctgctttgacaccaagacctatagataatttttctcataatcagtcaaatgatccatatagtcagcctccccttaccccacatccagcagtgaatgaatcttttgcccatccttcaagggctttttcccagcctggaaccatatcaaggccaacatctcaggacccatactcccaacccccaggaactccacgacctgttgtagattcttattcccaatcttcaggaacagctaggtccaatacagacccttactctcaacctcctggaactccccggcctactactgttgacccatatagtcagcagccccaaaccccaagaccatctacacaaactgacttgtttgttacacctgtaacaaatcagaggcattctgatccatatgctcatcctcctggaacaccaagacctggaatttctgtcccttactctcagccaccagcaacaccaaggccaaggatttcagagggttttactaggtcctcaatgacaagaccagtcctcatgccaaatcaggatcctttcctgcaagcagcacaaaaccgaggaccagctttacctggcccgttggtaaggccacctgatacatgttcccagacacctaggccccctggacctggtctttcagacacatttagccgtgtttccccatctgctgcccgtgatccctatgatcagtctccaatgactccaagatctcagtctgactcttttggaacaagtcaaactgcccatgatgttgctgatcagccaaggcctggatcagaggggagcttctgtgcatcttcaaactctccaatgcactcccaaggccagcagttctctggtgtctcccaacttcctggacctgtgccaacttcaggagtaactgatacacagaatactgtaaatatggcccaagcagatacagagaaattgagacagcggcagaagttacgtgaaatcattctccagcagcaacagcagaagaagattgcaggtcgacaggagaaggggtcacaggactcacccgcagtgcctcatccagggcctcttcaacactggcaaccagagaatgttaaccaggctttcaccagacccccacctccctatcctgggaacattaggtctcctgttgcccctcctttaggacctagatatgctgttttcccaaaagatcagcgtggaccctatcctcctgatgttgctagtatggggatgagacctcatggatttagatttggatttccaggaggtagtcatggtaccatgccgagtcaagagcgcttccttgtgcctcctcagcaaatacagggatctggagtttctccacagctaagaagatcagtatctgtagatatgcctaggcctttaaataactcacaaatgaataatccagttggacttcctcagcatttttcaccacagagcttgccagttcagcagcacaacatactgggccaagcatatattgaactgagacatagggctcctgacggaaggcaacggctgcctttcagtgctccacctggcagcgttgtagaggcatcttctaatctgagacatggaaacttcattccccggccagactttccgggccctagacacacagaccccatgcgacgacctccccagggtctacctaatcagctacctgtgcacccagatttggaacaagtgccaccatctcaacaagagcaaggtcattctgtccattcatcttctatggtcatgaggactctgaaccatccactaggtggtgaattttcagaagctcctttgtcaacatctgtaccgtctgaaacaacgtctgataatttacagataaccacccagccttctgatggtctagaggaaaaacttgattctgatgacccttctgtgaaggaactggatgttaaagaccttgagggggttgaagtcaaagacttagatgatgaagatcttgaaaacttaaatttagatacagaggatggcaaggtagttgaattggatactttagataatttggaaactaatgatcccaacctggatgacctcttaaggtcaggagagtttgatatcattgcatatacagatccagaacttgacatgggagataagaaaagcatgtttaatgaggaactagaccttccaattgatgataagttagataatcagtgtgtatctgttgaaccaaaaaaaaaggaacaagaaaacaaaactctggttctctctgataaacattcaccacagaaaaaatccactgttaccaatgaggtaaaaacggaagtactgtctccaaattctaaggtggaatccaaatgtgaaactgaaaaaaatgatgagaataaagataatgttgacactccttgctcacaggcttctgctcactcagacctaaatgatggagaaaagacttctttgcatccttgtgatccagatctatttgagaaaagaaccaatcgagaaactgctggccccagtgcaaatgtcattcaggcatccactcaactacctgctcaagatgtaataaactcttgtggcataactggatcaactccagttctctcaagtttacttgctaatgagaaatctgataattcagacattaggccatcggggtctccaccaccaccaactctgccggcctccccatccaatcatgtgtcaagtttgcctcctttcatagcaccgcctggccgtgttttggataatgccatgaattctaatgtgacagtagtctctagggtaaaccatgttttttctcagggtgtgcaggtaaacccagggctcattccaggtcaatcaacagttaaccacagtctggggacaggaaaacctgcaactcaaactgggcctcaaacaagtcagtctggtaccagtagcatgtctggaccccaacagctaatgattcctcaaacattagcacagcagaatagagagaggccccttcttctagaagaacagcctctacttctacaggatcttttggatcaagaaaggcaagaacagcagcagcaaagacagatgcaagccatgattcgtcagcgatcagaaccgttcttccctaatattgattttgatgcaattacagatcctataatgaaagccaaaatggtggcccttaaaggtataaataaagtgatggcacaaaacaatctgggcatgccaccaatggtgatgagcaggttcccttttatgggccaggtggtaactggaacacagaacagtgaaggacagaaccttggaccacaggccattcctcaggatggcagtataacacatcagatttctaggcctaatcctccaaattttggtccaggctttgtcaatgattcacagcgtaagcagtatgaagagtggctccaggagacccaacagctgcttcaaatgcagcagaagtatcttgaagaacaaattggtgctcacagaaaatctaagaaggccctttcagctaaacaacgtactgccaagaaagctgggcgtgaatttccagaggaagatgcagaacaactcaagcatgttactgaacagcaaagcatggttcagaaacagctagaacagattcgtaaacaacagaaagaacatgctgaattgattgaagattatcggatcaaacagcagcagcaatgtgcaatggccccacctaccatgatgcccagtgtccagccccagccacccctaattccaggtgccactccacccaccatgagccaacccacctttcccatggtgccacagcagcttcagcaccagcagcacacaacagttatttctggccatactagccctgttagaatgcccagtttacctggatggcaacccaacagtgctcctgcccacctgcccctcaatcctcctagaattcagcccccaattgcccagttaccaataaaaacttgtacaccagccccagggacagtctcaaatgcaaatccacagagtggaccaccacctcgggtagaatttgatgacaacaatccctttagtgaaagttttcaagaacgggaacgtaaggaacgtttacgagaacagcaagagagacaacggatccaactcatgcaggaggtagatagacaaagagctttgcagcagaggatggaaatggagcagcatggtatggtgggctctgagataagtagtagtaggacatctgtgtcccagattcccttctacagttccgacttaccttgtgattttatgcaacctctaggaccccttcagcagtctccacaacaccaacagcaaatggggcaggttttacagcagcagaatatacaacaaggatcaattaattcaccctccacccaaactttcatgcagactaatgagcgaaggcaggtaggccctccttcatttgttcctgattcaccatcaatccctgttggaagcccaaatttttcttctgtgaagcagggacatggaaatctttctgggaccagcttccagcagtccccagtgaggccttcttttacacctgctttaccagcagcacctccagtagctaatagcagtctcccatgtggccaagattctactataacccatggacacagttatccgggatcaacccaatcgctcattcagttgtattctgatataatcccagaggaaaaagggaaaaagaaaagaacaagaaagaagaaaagagatgatgatgcagaatccaccaaggctccatcaactccccattcagatataactgccccaccgactccaggcatctcagaaactacctctactcctgcagtgagcacacccagtgagcttcctcaacaagccgaccaagagtcggtggaaccagtcggcccatccactcccaatatggcagcaggccagctatgtacagaattagagaacaaactgcccaatagtgatttctcacaagcaactccaaatcaacagacgtatgcaaattcagaagtagacaagctctccatggaaacccctgccaaaacagaagagataaaactggaaaaggctgagacagagtcctgcccaggccaagaggagcctaaattggaggaacagaatggtagtaaggtagaaggaaacgctgtagcctgtcctgtctcctcagcacagagtcctccccattctgctggggcccctgctgccaaaggagactcagggaatgaacttctgaaacacttgttgaaaaataaaaagtcatcttctcttttgaatcaaaaacctgagggcagtatttgttcagaagatgactgtacaaaggataataaactagttgagaagcagaacccagctgaaggactgcaaactttgggggctcaaatgcaaggtggttttggatgtggcaaccagttgccaaaaacagatggaggaagtgaaaccaagaaacagcgaagcaaacggactcagaggacgggtgagaaagcagcacctcgctcaaagaaaaggaaaaaggacgaagaggagaaacaagctatgtactctagcactgacacgtttacccacttgaaacaggtgaggcagctctctctgctccctctaatggaaccaatcattggagtgaactttgcgcactttcttccttatggcagtggccaatttaatagtgggaatcgacttctaggaacttttggcagtgctaccctggaaggggtttcggactactattctcagttgatctacaagcagaataatttaagtaatcctccaacaccccctgcctctcttcctcctacaccacctcctatggcttgtcagaagatggccaatggttttgcaacaactgaagaacttgctggaaaagccggagtgttagtgagccatgaagttaccaaaactctaggacctaaaccatttcagctgcccttcagaccccaggacgacttgttggcccgagctcttgctcagggccccaagacagttgatgtgccagcctccctcccaacaccacctcataacaatcaggaagaattaaggatacaggatcactgtggtgatcgagatactcctgacagttttgttccctcatcctctcctgagagtgtggttggggtagaagtgagcaggtatccagatctgtcattggtcaaggaggagcctccagaaccggtgccgtcccccatcattccaattcttcctagcactgctgggaaaagttcagaatcaagaaggaatgacatcaaaactgagccaggcactttatattttgcgtcaccttttggtccttccccaaatggtcccagatcaggtcttatatctgtagcaattactctgcatcctacagctgctgagaacattagcagtgttgtggctgcattttccgaccttcttcacgtccgaatccctaacagctatgaggttagcagtgctccagatgtcccatccatgggtttggtcagtagccacagaatcaacccgggtttggagtatcgacagcatttacttctccgtgggcctccgccaggatctgcaaaccctcccagattagtgagctcttaccggctgaagcagcctaatgtaccatttcctccaacaagcaatggtctttctggatataaggattctagtcatggtattgcagaaagcgcagcactcagaccacagtggtgttgtcattgtaaagtggttattcttggaagtggtgtgcggaaatctttcaaagatctgacccttttgaacaaggattcccgagaaagcaccaagagggtagagaaggacattgtcttctgtagtaataactgctttattctttattcatcaactgcacaagcgaaaaactcagaaaacaaggaatccattccttcattgccacaatcacctatgagagaaacgccttccaaagcatttcatcagtacagcaacaacatctccactttggatgtgcactgtctcccccagctcccagagaaagcttctccccctgcctcaccacccatcgccttccctcctgcttttgaagcagcccaagtcgaggccaagccagatgagctgaaggtgacagtcaagctgaagcctcggctaagagctgtccatggtgggtttgaagattgcaggccgctcaataaaaaatggagaggaatgaaatggaagaagtggagcattcatattgtaatccctaaggggacatttaaaccaccttgtgaggatgaaatagatgaatttctaaagaaattgggcacttcccttaaacctgatcctgtgcccaaagactatcggaaatgttgcttttgtcatgaagaaggtgatggattgacagatggaccagcaaggctactcaaccttgacttggatctgtgggtccacttgaactgcgctctgtggtccacggaggtctatgagactcaggctggtgccttaataaatgtggagctagctctgaggagaggcctacaaatgaaatgtgtcttctgtcacaagacgggtgccactagtggatgccacagatttcgatgcaccaacatttatcacttcacttgcgccattaaagcacaatgcatgttttttaaggacaaaactatgctttgccccatgcacaaaccaaagggaattcatgagcaagaattaagttactttgcagtcttcaggagggtctatgttcagcgtgatgaggtgcgacagattgctagcatcgtgcaacgaggagaacgggaccatacctttcgcgtgggtagcctcatcttccacacaattggtcagctgcttccacagcagatgcaagcattccattctcctaaagcactcttccctgtgggctatgaagccagccggctgtactggagcactcgctatgccaataggcgctgccgctacctgtgctccattgaggagaaggatgggcgcccagtgtttgtcatcaggattgtggaacaaggccatgaagacctggttctaagtgacatctcacctaaaggtgtctgggataagattttggagcctgtggcatgtgtgagaaaaaagtctgaaatgctccagcttttcccagcgtatttaaaaggagaggatctgtttggcctgaccgtctctgcagtggcacgcatagcggaatcacttcctggggttgaggcatgtgaaaattataccttccgatacggccgaaatcctctcatggaacttcctcttgccgttaaccccacaggttgtgcccgttctgaacctaaaatgagtgcccatgtcaagaggcctcacaccttaaacagcaccagcacctcaaagtcatttcagagcacagtcactggagaactgaacgcaccttatagtaaacagtttgttcactccaagtcatcgcagtaccggaagatgaaaactgaatggaaatccaatgtgtatctggcacggtctcggattcaggggctgggcctgtatgctgctcgagacattgagaaacacaccatggtcattgagtacatcgggactatcattcgaaacgaagtagccaacaggaaagagaagctttatgagtctcagaaccgtggtgtgtacatgttccgcatggataacgaccatgtgattgacgcgacgctcacaggagggcccgcaaggtatatcaaccattcgtgtgcacctaattgtgtggctgaagtggtgacttttgagagaggacacaaaattatcatcagctccagtcggagaatccagaaaggagaagagctctgctatgactataagtttgactttgaagatgaccagcacaagattccgtgtcactgtggagctgtgaactgccggaagtggatgaactgaaatgcattccttgctagctcagcgggcggcttgtccctaggaagaggcgattcaacacaccattggaattttgcagacagaaagagatttttgttttctgttttatgactttttgaaaaagcttctgggagttctgatttcctcagtcctttaggttaaagcagcgccaggaggaagctgacagaagcagcgttcctgaagtggccgaggttaaacggaatcacagaatggtccagcacttttgcttttttttcttttccttttcttttttttttgtttgttttttgttttgtttttcccttgtgggtgggtttcattgttttggttttctagtctcactaaggagaaacttttactggggcaaagagccgatggctgccctgccccgggcaggggccttcctatgaatgtaagactgaaatcaccagcgagggggacagagagtgctggccacggccttattaaaaaggggcaggccctctaacttcaaaatgtttttaaataaagtagacaccactgaacaaggaatgtactgaaatgacttccttagggatagagctaagggataataacttgcactaaatacatttaaatacttgattccatgagtcagtttattgtagtttttgatttctgtaaaataagagaaacttttgtatttattattgaataagtgaatgaagctatttttaaataaagttagaagaaagccaagctgctgctgttacctgcagaactaacaaaccctgttactttgtacagatatgtaaatattttgagaaaaaatacagtataaaaatagttattgaccaaatgctaccaggctctgcagcagctcgggggcttataaaatgttcatagggatgttacaatataattttgtgttataaaatatgccattataattatgtaataaccaaaatttcaacctagagtgttgggggttttttggaaaccgcagtctattagtactcaatggttttatacaccttacttctgacagagcggggcgtatgctacgactacaacttttatagctgttttggtaatttaaactaattttttcatattatattgttgcatccctacttcttcagtcaggtttttttgtgcttacaatttgtgataactgtgaataactgcttaaaaatacacccaaatggaggctgaattttttcttcagcaaaagtagttttgattagaactttgtttcagccacagagaatcatgtaaacgtaataggatcatgtagcagaaacttaaatctaaccctttagccttctatttaacacaaaaatttgaaaaagttaaaaaaaaaaaggagatgtgattatgcttacagctgcaggactctggcaatagggtttttggaagatgtaattttaaaatgtgtttgtatgaactgtttgtttacatttctttaataaaaaaaacactgttttgtgtttgcttgtagaaacttaatcagcattttgaaccaggttagctttttattttgtacttaaaattctggtactgacacttcacaggctaagtataaaatgaagttttgtgtgcacaattcaagtggactgtaaactgttggtatattcagtgatgcagttctgaacttgtatatggcatgatgtatttttatcttacagaataaatcaattgtatatatttttctcttgataaatagctgtatgaaatttgtttcctgaatatttttcttctcttgtacaatatcctgacatcctaccagtatttgtcctaccgggtttttgttgttttctgttctgtataatagtatctaatgttggcaaaaattgaattttttgaagtatacagagtgttatgggttttggaatttgtggacacagatttagaagatcaccatttacaaataaaatattttacatctataaaaaaaaaaaa

SEQ ID NO: 969 - protein, 4025 aa, Homo sapiens
MHNTVVLFSSSDKFTLNQDMCVVCGSFGQGAEGRLLACSQCGQCYHPYCVSIKITKVVLSKGWRCLECTVCEACGKATDPGRLLLCDDCDISYHTYCLDPPLQTVPKGGWKCKWCVWCRHCGATSAGLRCEWQNNYTQCAPCASLSSCPVCYRNYREEDLILQCRQCDRWMHAVCQNLNTEEEVENVADIGFDCSMCRPYMPASNVPSSDCCESSLVAQIVTKVKELDPPKTYTQDGVCLTESGMTQLQSLTVTVPRRKRSKPKLKLKIINQNSVAVLQTPPDIQSEHSRDGEMDDSREGELMDCDGKSESSPEREAVDDETKGVEGTDGVKKRKRKPYRPGIGGFMVRQRSRTGQGKTKRSVIRKDSSGSISEQLPCRDDGWSEQLPDTLVDESVSVTESTEKIKKRYRKRKNKLEETFPAYLQEAFFGKDLLDTSRQSKISLDNLSEDGAQLLYKTNMNTGFLDPSLDPLLSSSSAPTKSGTHGPADDPLADISEVLNTDDDILGIISDDLAKSVDHSDIGPVTDDPSSLPQPNVNQSSRPLSEEQLDGILSPELDKMVTDGAILGKLYKIPELGGKDVEDLFTAVLSPANTQPTPLPQPPPPTQLLPIHNQDAFSRMPLMNGLIGSSPHLPHNSLPPGSGLGTFSAIAQSSYPDARDKNSAFNPMASDPNNSWTSSAPTVEGENDTMSNAQRSTLKWEKEEALGEMATVAPVLYTNINFPNLKEEFPDWTTRVKQIAKLWRKASSQERAPYVQKARDNRAALRINKVQMSNDSMKRQQQQDSIDPSSRIDSELFKDPLKQRESEHEQEWKFRQQMRQKSKQQAKIEATQKLEQVKNEQQQQQQQQFGSQHLLVQSGSDTPSSGIQSPLTPQPGNGNMSPAQSFHKELFTKQPPSTPTSTSSDDVFVKPQAPPPPPAPSRIPIQDSLSQAQTSQPPSPQVFSPGSSNSRPPSPMDPYAKMVGTPRPPPVGHSFSRRNSAAPVENCTPLSSVSRPLQMNETTANRPSPVRDLCSSSTTNNDPYAKPPDTPRPVMTDQFPKSLGLSRSPVVSEQTAKGPIAAGTSDHFTKPSPRADVFQRQRIPDSYARPLLTPAPLDSGPGPFKTPMQPPPSSQDPYGSVSQASRRLSVDPYERPALTPRPIDNFSHNQSNDPYSQPPLTPHPAVNESFAHPSRAFSQPGTISRPTSQDPYSQPPGTPRPVVDSYSQSSGTARSNTDPYSQPPGTPRPTTVDPYSQQPQTPRPSTQTDLFVTPVTNQRHSDPYAHPPGTPRPGISVPYSQPPATPRPRISEGFTRSSMTRPVLMPNQDPFLQAAQNRGPALPGPLVRPPDTCSQTPRPPGPGLSDTFSRVSPSAARDPYDQSPMTPRSQSDSFGTSQTAHDVADQPRPGSEGSFCASSNSPMHSQGQQFSGVSQLPGPVPTSGVTDTQNTVNMAQADTEKLRQRQKLREIILQQQQQKKIAGRQEKGSQDSPAVPHPGPLQHWQPENVNQAFTRPPPPYPGNIRSPVAPPLGPRYAVFPKDQRGPYPPDVASMGMRPHGFRFGFPGGSHGTMPSQERFLVPPQQIQGSGVSPQLRRSVSVDMPRPLNNSQMNNPVGLPQHFSPQSLPVQQHNILGQAYIELRHRAPDGRQRLPFSAPPGSVVEASSNLRHGNFIPRPDFPGPRHTDPMRRPPQGLPNQLPVHPDLEQVPPSQQEQGHSVHSSSMVMRTLNHPLGGEFSEAPLSTSVPSETTSDNLQITTQPSDGLEEKLDSDDPSVKELDVKDLEGVEVKDLDDEDLENLNLDTEDGKVVELDTLDNLETNDPNLDDLLRSGEFDIIAYTDPELDMGDKKSMFNEELDLPIDDKLDNQCVSVEPKKKEQENKTLVLSDKHSPQKKSTVTNEVKTEVLSPNSKVESKCETEKNDENKDNVDTPCSQASAHSDLNDGEKTSLHPCDPDLFEKRTNRETAGPSANVIQASTQLPAQDVINSCGITGSTPVLSSLLANEKSDNSDIRPSGSPPPPTLPASPSNHVSSLPPFIAPPGRVLDNAMNSNVTVVSRVNHVFSQGVQVNPGLIPGQSTVNHSLGTGKPATQTGPQTSQSGTSSMSGPQQLMIPQTLAQQNRERPLLLEEQPLLLQDLLDQERQEQQQQRQMQAMIRQRSEPFFPNIDFDAITDPIMKAKMVALKGINKVMAQNNLGMPPMVMSRFPFMGQVVTGTQNSEGQNLGPQAIPQDGSITHQISRPNPPNFGPGFVNDSQRKQYEEWLQETQQLLQMQQKYLEEQIGAHRKSKKALSAKQRTAKKAGREFPEEDAEQLKHVTEQQSMVQKQLEQIRKQQKEHAELIEDYRIKQQQQCAMAPPTMMPSVQPQPPLIPGATPPTMSQPTFPMVPQQLQHQQHTTVISGHTSPVRMPSLPGWQPNSAPAHLPLNPPRIQPPIAQLPIKTCTPAPGTVSNANPQSGPPPRVEFDDNNPFSESFQERERKERLREQQERQRIQLMQEVDRQRALQQRMEMEQHGMVGSEISSSRTSVSQIPFYSSDLPCDFMQPLGPLQQSPQHQQQMGQVLQQQNIQQGSINSPSTQTFMQTNERRQVGPPSFVPDSPSIPVGSPNFSSVKQGHGNLSGTSFQQSPVRPSFTPALPAAPPVANSSLPCGQDSTITHGHSYPGSTQSLIQLYSDIIPEEKGKKKRTRKKKRDDDAESTKAPSTPHSDITAPPTPGISETTSTPAVSTPSELPQQADQESVEPVGPSTPNMAAGQLCTELENKLPNSDFSQATPNQQTYANSEVDKLSMETPAKTEEIKLEKAETESCPGQEEPKLEEQNGSKVEGNAVACPVSSAQSPPHSAGAPAAKGDSGNELLKHLLKNKKSSSLLNQKPEGSICSEDDCTKDNKLVEKQNPAEGLQTLGAQMQGGFGCGNQLPKTDGGSETKKQRSKRTQRTGEKAAPRSKKRKKDEEEKQAMYSSTDTFTHLKQVRQLSLLPLMEPIIGVNFAHFLPYGSGQFNSGNRLLGTFGSATLEGVSDYYSQLIYKQNNLSNPPTPPASLPPTPPPMACQKMANGFATTEELAGKAGVLVSHEVTKTLGPKPFQLPFRPQDDLLARALAQGPKTVDVPASLPTPPHNNQEELRIQDHCGDRDTPDSFVPSSSPESVVGVEVSRYPDLSLVKEEPPEPVPSPIIPILPSTAGKSSESRRNDIKTEPGTLYFASPFGPSPNGPRSGLISVAITLHPTAAENISSVVAAFSDLLHVRIPNSYEVSSAPDVPSMGLVSSHRINPGLEYRQHLLLRGPPPGSANPPRLVSSYRLKQPNVPFPPTSNGLSGYKDSSHGIAESAALRPQWCCHCKVVILGSGVRKSFKDLTLLNKDSRESTKRVEKDIVFCSNNCFILYSSTAQAKNSENKESIPSLPQSPMRETPSKAFHQYSNNISTLDVHCLPQLPEKASPPASPPIAFPPAFEAAQVEAKPDELKVTVKLKPRLRAVHGGFEDCRPLNKKWRGMKWKKWSIHIVIPKGTFKPPCEDEIDEFLKKLGTSLKPDPVPKDYRKCCFCHEEGDGLTDGPARLLNLDLDLWVHLNCALWSTEVYETQAGALINVELALRRGLQMKCVFCHKTGATSGCHRFRCTNIYHFTCAIKAQCMFFKDKTMLCPMHKPKGIHEQELSYFAVFRRVYVQRDEVRQIASIVQRGERDHTFRVGSLIFHTIGQLLPQQMQAFHSPKALFPVGYEASRLYWSTRYANRRCRYLCSIEEKDGRPVFVIRIVEQGHEDLVLSDISPKGVWDKILEPVACVRKKSEMLQLFPAYLKGEDLFGLTVSAVARIAESLPGVEACENYTFRYGRNPLMELPLAVNPTGCARSEPKMSAHVKRPHTLNSTSTSKSFQSTVTGELNAPYSKQFVHSKSSQYRKMKTEWKSNVYLARSRIQGLGLYAARDIEKHTMVIEYIGTIIRNEVANRKEKLYESQNRGVYMFRMDNDHVIDATLTGGPARYINHSCAPNCVAEVVTFERGHKIIISSSRRIQKGEELCYDYKFDFEDDQHKIPCHCGAVNCRKWMN

SEQ ID NO: 970 - DNA, 16872 bp, Homo sapiens
gaggtgcgcgcgcccgcgccgatgtgtgtgagtgcgtgtcctgctcgctccatgttgccgcctctcccggtacctgctgctgctcccggggctgcgggaaatgcgagaggctgagccggggaggaggaacccgagcagcagcggcggcggcggcggccgcggcggcgggagccccccaggaggaggaccgggatccatgtgtctttcctggtgactaggatgtcgtcggaggaggacaagagcgtggagcagccgcagccgccgccaccaccccccgaggagcctggagccccggccccgagccccgcagccgcagacaaaagacctcggggccggcctcgcaaagatggcgcttcccctttccagagagccagaaagaaacctcgaagtagggggaaaactgcagtggaagatgaggacagcatggatgggctggagacaacagaaacagaaacgattgtggaaacagaaatcaaagaacaatctgcagaagaggatgctgaagcagaagtggataacagcaaacagctaattccaactcttcagcgatctgtgtctgaggaatcggcaaactccctggtctctgttggtgtagaagccaaaatcagtgaacagctctgcgctttttgttactgtggggaaaaaagttccttaggacaaggagacttaaaacaattcagaataacgcctggatttatcttgccatggagaaaccaaccttctaacaagaaggacattgatgacaacagcaatggaacctatgagaaaatgcaaaactcagcaccacgaaaacaaagaggacagagaaaagaacgatctcctcagcagaatatagtatcttgtgtaagtgtaagcacccagacagcttcagatgatcaagctggtaaactgtgggatgaactcagtctggttgggcttccagatgccattgatatccaagccttatttgattctacaggcacttgttgggctcatcaccgttgtgtggagtggtcactaggagtatgccagatggaagaaccattgttagtgaacgtggacaaagctgttgtctcagggagcacagaacgatgtgcattttgtaagcaccttggagccactatcaaatgctgtgaagagaaatgtacccagatgtatcattatccttgtgctgcaggagccggcacctttcaggatttcagtcacatcttcctgctttgtccagaacacattgaccaagctcctgaaagatcgaaggaagatgcaaactgtgcagtgtgcgacagcccgggagacctcttagatcagttcttttgtactacttgtggtcagcactatcatggaatgtgcctggatatagcggttactccattaaaacgtgcaggttggcaatgtcctgagtgcaaagtgtgccagaactgcaaacaatcgggagaagatagcaagatgctagtgtgtgatacgtgtgacaaagggtatcatactttttgtcttcaaccagttatgaaatcagtaccaaccaatggctggaaatgcaaaaattgcagaatatgtatagagtgtggcacacggtctagttctcagtggcaccacaattgcctgatatgtgacaattgttaccaacagcaggataacttatgtcccttctgtgggaagtgttatcatccagaattgcagaaagacatgcttcattgtaatatgtgcaaaaggtgggttcacctagagtgtgacaaaccaacagatcatgaactggatactcagctcaaagaagagtatatctgcatgtattgtaaacacctgggagctgagatggatcgtttacagccaggtgaggaagtggagatagctgagctcactacagattataacaatgaaatggaagttgaaggccctgaagatcaaatggtattctcagagcaggcagctaataaagatgtcaacggtcaggagtccactcctggaattgttccagatgcggttcaagtccacactgaagagcaacagaagagtcatccctcagaaagtcttgacacagatagtcttcttattgctgtatcatcccaacatacagtgaatactgaattggaaaaacagatttctaatgaagttgatagtgaagacctgaaaatgtcttctgaagtgaagcatatttgtggcgaagatcaaattgaagataaaatggaagtgacagaaaacattgaagtcgttacacaccagatcactgtgcagcaagaacaactgcagttgttagaggaacctgaaacagtggtatccagagaagaatcaaggcctccaaaattagtcatggaatctgtcactcttccactagaaaccttagtgtccccacatgaggaaagtatttcattatgtcctgaggaacagttggttatagaaaggctacaaggagaaaaggaacagaaagaaaattctgaactttctactggattgatggactctgaaatgactcctacaattgagggttgtgtgaaagatgtttcataccaaggaggcaaatctataaagttatcatctgagacagagtcatcattttcatcatcagcagacataagcaaggcagatgtgtcttcctccccaacaccttcttcagacttgccttcgcatgacatgctgcataattacccttcagctcttagttcctctgctggaaacatcatgccaacaacttacatctcagtcactccaaaaattggcatgggtaaaccagctattactaagagaaaattttctcctggtagacctcggtccaaacagggggcttggagtacccataatacagtgagcccaccttcctggtccccagacatttcagaaggtcgggaaatttttaaacccaggcagcttcctggcagtgccatttggagcatcaaagtgggccgtgggtctggatttccaggaaagcggagacctcgaggtgcaggactgtcggggcgaggtggccgaggcaggtcaaagctgaaaagtggaatcggagctgttgtattacctggggtgtctactgcagatatttcatcaaataaggatgatgaagaaaactctatgcacaatacagttgtgttgttttctagcagtgacaagttcactttgaatcaggatatgtgtgtagtttgtggcagttttggccaaggagcagaaggaagattacttgcctgttctcagtgtggtcagtgttaccatccatactgtgtcagtattaagatcactaaagtggttcttagcaaaggttggaggtgtcttgagtgcactgtgtgtgaggcctgtgggaaggcaactgacccaggaagactcctgctgtgtgatgactgtgacataagttatcacacctactgcctagaccctccattgcagacagttcccaaaggaggctggaagtgcaaatggtgtgtttggtgcagacactgtggagcaacatctgcaggtctaagatgtgaatggcagaacaattacacacagtgcgctccttgtgcaagcttatcttcctgtccagtctgctatcgaaactatagagaagaagatcttattctgcaatgtagacaatgtgatagatggatgcatgcagtttgtcagaacttaaatactgaggaagaagtggaaaatgtagcagacattggttttgattgtagcatgtgcagaccctatatgcctgcgtctaatgtgccttcctcagactgctgtgaatcttcacttgtagcacaaattgtcacaaaagtaaaagagctagacccacccaagacttatacccaggatggtgtgtgtttgactgaatcagggatgactcagttacagagcctcacagttacagttccaagaagaaaacggtcaaaaccaaaattgaaattgaagattataaatcagaatagcgtggccgtccttcagacccctccagacatccaatcagagcattcaagggatggtgaaatggatgatagtcgagaaggagaacttatggattgtgatggaaaatcagaatctagtcctgagcgggaagctgtggatgatgaaactaagggagtggaaggaacagatggtgtcaaaaagagaaaaaggaaaccatacagaccaggtattggtggatttatggtgcggcaaagaagtcgaactgggcaagggaaaaccaaaagatctgtgatcagaaaagattcctcaggctctatttccgagcagttaccttgcagagatgatggctggagtgagcagttaccagatactttagttgatgaatctgtttctgttactgaaagcactgaaaaaataaagaagagataccgaaaaaggaaaaataagcttgaagaaactttccctgcctatttacaagaagctttctttggaaaagatcttctagatacaagtagacaaagcaagataagtttagataatctgtcagaagatggagctcagcttttatataaaacaaacatgaacacaggtttcttggatccttccttagatccactacttagttcatcctcggctccaacaaaatctggaactcacggtcctgctgatgacccattagctgatatttctgaagttttaaacacagatgatgacattcttggaataatttcagatgatctagcaaaatcagttgatcattcagatattggtcctgtcactgatgatccttcctctttgcctcagccaaatgtcaatcagagttcacgaccattaagtgaagaacagctagatgggatcctcagtcctgaactagacaaaatggtcacagatggagcaattcttggaaaattatataaaattccagagcttggcggaaaagatgttgaagacttatttacagctgtacttagtcctgcgaacactcagccaactccattgccacagcctcccccaccaacacagctgttgccaatacacaatcaggatgctttttcacggatgcctctcatgaatggccttattggatccagtcctcatctcccacataattctttgccacctggaagcggactgggaactttctctgcaattgcacaatcctcttatcctgatgccagggataaaaattcagcctttaatccaatggcaagtgatcctaacaactcttggacatcatcagctcccactgtggaaggagaaaatgacacaatgtcgaatgcccagagaagcacgcttaagtgggagaaagaggaggctctgggtgaaatggcaactgttgccccagttctctacaccaatattaatttccccaacttaaaggaagaattccctgattggactactagagtgaagcaaattgccaaattgtggagaaaagcaagctcacaagaaagagcaccatatgtgcaaaaagccagagataacagagctgctttacgcattaataaagtacagatgtcaaatgattccatgaaaaggcagcaacagcaagatagcattgatcccagctctcgtattgattcggagctttttaaagatcctttaaagcaaagagaatcagaacatgaacaggaatggaaatttagacagcaaatgcgtcagaaaagtaagcagcaagctaaaattgaagccacacagaaacttgaacaggtgaaaaatgagcagcagcagcagcaacaacagcaatttggttctcagcatcttctggtgcagtctggttcagatacaccaagtagtgggatacagagtcccttgacacctcagcctggcaatggaaatatgtctcctgcacagtcattccataaagaactgtttacaaaacagccacccagtacccctacgtctacatcttcagatgatgtgtttgtaaagccacaagctccacctcctcctccagccccatcccggattcccatccaggatagtctttctcaggctcagacttctcagccaccctcaccgcaagtgttttcacctgggtcctctaactcacgaccaccatctccaatggatccatatgcaaaaatggttggtacccctcgaccacctcctgtgggccatagtttttccagaagaaattctgctgcaccagtggaaaactgtacacctttatcatcggtatctaggccccttcaaatgaatgagacaacagcaaataggccatcccctgtcagagatttatgttcttcttccacgacaaataatgacccctatgcaaaacctccagacacacctaggcctgtgatgacagatcaatttcccaaatccttgggcctatcccggtctcctgtagtttcagaacaaactgcaaaaggccctatagcagctggaaccagtgatcactttactaaaccatctcctagggcagatgtgtttcaaagacaaaggatacctgactcatatgcacgacccttgttgacacctgcacctcttgatagtggtcctggaccttttaagactccaatgcaacctcctccatcctctcaggatccttatggatcagtgtcacaggcatcaaggcgattgtctgttgacccttatgaaaggcctgctttgacaccaagacctatagataatttttctcataatcagtcaaatgatccatatagtcagcctccccttaccccacatccagcagtgaatgaatcttttgcccatccttcaagggctttttcccagcctggaaccatatcaaggccaacatctcaggacccatactcccaacccccaggaactccacgacctgttgtagattcttattcccaatcttcaggaacagctaggtccaatacagacccttactctcaacctcctggaactccccggcctactactgttgacccatatagtcagcagccccaaaccccaagaccatctacacaaactgacttgtttgttacacctgtaacaaatcagaggcattctgatccatatgctcatcctcctggaacaccaagacctggaatttctgtcccttactctcagccaccagcaacaccaaggccaaggatttcagagggttttactaggtcctcaatgacaagaccagtcctcatgccaaatcaggatcctttcctgcaagcagcacaaaaccgaggaccagctttacctggcccgttggtaaggccacctgatacatgttcccagacacctaggccccctggacctggtctttcagacacatttagccgtgtttccccatctgctgcccgtgatccctatgatcagtctccaatgactccaagatctcagtctgactcttttggaacaagtcaaactgcccatgatgttgctgatcagccaaggcctggatcagaggggagcttctgtgcatcttcaaactctccaatgcactcccaaggccagcagttctctggtgtctcccaacttcctggacctgtgccaacttcaggagtaactgatacacagaatactgtaaatatggcccaagcagatacagagaaattgagacagcggcagaagttacgtgaaatcattctccagcagcaacagcagaagaagattgcaggtcgacaggagaaggggtcacaggactcacccgcagtgcctcatccagggcctcttcaacactggcaaccagagaatgttaaccaggctttcaccagacccccacctccctatcctgggaacattaggtctcctgttgcccctcctttaggacctagatatgctgttttcccaaaagatcagcgtggaccctatcctcctgatgttgctagtatggggatgagacctcatggatttagatttggatttccaggaggtagtcatggtaccatgccgagtcaagagcgcttccttgtgcctcctcagcaaatacagggatctggagtttctccacagctaagaagatcagtatctgtagatatgcctaggcctttaaataactcacaaatgaataatccagttggacttcctcagcatttttcaccacagagcttgccagttcagcagcacaacatactgggccaagcatatattgaactgagacatagggctcctgacggaaggcaacggctgcctttcagtgctccacctggcagcgttgtagaggcatcttctaatctgagacatggaaacttcattccccggccagactttccgggccctagacacacagaccccatgcgacgacctccccagggtctacctaatcagctacctgtgcacccagatttggaacaagtgccaccatctcaacaagagcaaggtcattctgtccattcatcttctatggtcatgaggactctgaaccatccactaggtggtgaattttcagaagctcctttgtcaacatctgtaccgtctgaaacaacgtctgataatttacagataaccacccagccttctgatggtctagaggaaaaacttgattctgatgacccttctgtgaaggaactggatgttaaagaccttgagggggttgaagtcaaagacttagatgatgaagatcttgaaaacttaaatttagatacagaggatggcaaggtagttgaattggatactttagataatttggaaactaatgatcccaacctggatgacctcttaaggtcaggagagtttgatatcattgcatatacagatccagaacttgacatgggagataagaaaagcatgtttaatgaggaactagaccttccaattgatgataagttagataatcagtgtgtatctgttgaaccaaaaaaaaaggaacaagaaaacaaaactctggttctctctgataaacattcaccacagaaaaaatccactgttaccaatgaggtaaaaacggaagtactgtctccaaattctaaggtggaatccaaatgtgaaactgaaaaaaatgatgagaataaagataatgttgacactccttgctcacaggcttctgctcactcagacctaaatgatggagaaaagacttctttgcatccttgtgatccagatctatttgagaaaagaaccaatcgagaaactgctggccccagtgcaaatgtcattcaggcatccactcaactacctgctcaagatgtaataaactcttgtggcataactggatcaactccagttctctcaagtttacttgctaatgagaaatctgataattcagacattaggccatcggggtctccaccaccaccaactctgccggcctccccatccaatcatgtgtcaagtttgcctcctttcatagcaccgcctggccgtgttttggataatgccatgaattctaatgtgacagtagtctctagggtaaaccatgttttttctcagggtgtgcaggtaaacccagggctcattccaggtcaatcaacagttaaccacagtctggggacaggaaaacctgcaactcaaactgggcctcaaacaagtcagtctggtaccagtagcatgtctggaccccaacagctaatgattcctcaaacattagcacagcagaatagagagaggccccttcttctagaagaacagcctctacttctacaggatcttttggatcaagaaaggcaagaacagcagcagcaaagacagatgcaagccatgattcgtcagcgatcagaaccgttcttccctaatattgattttgatgcaattacagatcctataatgaaagccaaaatggtggcccttaaaggtataaataaagtgatggcacaaaacaatctgggcatgccaccaatggtgatgagcaggttcccttttatgggccaggtggtaactggaacacagaacagtgaaggacagaaccttggaccacaggccattcctcaggatggcagtataacacatcagatttctaggcctaatcctccaaattttggtccaggctttgtcaatgattcacagcgtaagcagtatgaagagtggctccaggagacccaacagctgcttcaaatgcagcagaagtatcttgaagaacaaattggtgctcacagaaaatctaagaaggccctttcagctaaacaacgtactgccaagaaagctgggcgtgaatttccagaggaagatgcagaacaactcaagcatgttactgaacagcaaagcatggttcagaaacagctagaacagattcgtaaacaacagaaagaacatgctgaattgattgaagattatcggatcaaacagcagcagcaatgtgcaatggccccacctaccatgatgcccagtgtccagccccagccacccctaattccaggtgccactccacccaccatgagccaacccacctttcccatggtgccacagcagcttcagcaccagcagcacacaacagttatttctggccatactagccctgttagaatgcccagtttacctggatggcaacccaacagtgctcctgcccacctgcccctcaatcctcctagaattcagcccccaattgcccagttaccaataaaaacttgtacaccagccccagggacagtctcaaatgcaaatccacagagtggaccaccacctcgggtagaatttgatgacaacaatccctttagtgaaagttttcaagaacgggaacgtaaggaacgtttacgagaacagcaagagagacaacggatccaactcatgcaggaggtagatagacaaagagctttgcagcagaggatggaaatggagcagcatggtatggtgggctctgagataagtagtagtaggacatctgtgtcccagattcccttctacagttccgacttaccttgtgattttatgcaacctctaggaccccttcagcagtctccacaacaccaacagcaaatggggcaggttttacagcagcagaatatacaacaaggatcaattaattcaccctccacccaaactttcatgcagactaatgagcgaaggcaggtaggccctccttcatttgttcctgattcaccatcaatccctgttggaagcccaaatttttcttctgtgaagcagggacatggaaatctttctgggaccagcttccagcagtccccagtgaggccttcttttacacctgctttaccagcagcacctccagtagctaatagcagtctcccatgtggccaagattctactataacccatggacacagttatccgggatcaacccaatcgctcattcagttgtattctgatataatcccagaggaaaaagggaaaaagaaaagaacaagaaagaagaaaagagatgatgatgcagaatccaccaaggctccatcaactccccattcagatataactgccccaccgactccaggcatctcagaaactacctctactcctgcagtgagcacacccagtgagcttcctcaacaagccgaccaagagtcggtggaaccagtcggcccatccactcccaatatggcagcaggccagctatgtacagaattagagaacaaactgcccaatagtgatttctcacaagcaactccaaatcaacagacgtatgcaaattcagaagtagacaagctctccatggaaacccctgccaaaacagaagagataaaactggaaaaggctgagacagagtcctgcccaggccaagaggagcctaaattggaggaacagaatggtagtaaggtagaaggaaacgctgtagcctgtcctgtctcctcagcacagagtcctccccattctgctggggcccctgctgccaaaggagactcagggaatgaacttctgaaacacttgttgaaaaataaaaagtcatcttctcttttgaatcaaaaacctgagggcagtatttgttcagaagatgactgtacaaaggataataaactagttgagaagcagaacccagctgaaggactgcaaactttgggggctcaaatgcaaggtggttttggatgtggcaaccagttgccaaaaacagatggaggaagtgaaaccaagaaacagcgaagcaaacggactcagaggacgggtgagaaagcagcacctcgctcaaagaaaaggaaaaaggacgaagaggagaaacaagctatgtactctagcactgacacgtttacccacttgaaacagcagaataatttaagtaatcctccaacaccccctgcctctcttcctcctacaccacctcctatggcttgtcagaagatggccaatggttttgcaacaactgaagaacttgctggaaaagccggagtgttagtgagccatgaagttaccaaaactctaggacctaaaccatttcagctgcccttcagaccccaggacgacttgttggcccgagctcttgctcagggccccaagacagttgatgtgccagcctccctcccaacaccacctcataacaatcaggaagaattaaggatacaggatcactgtggtgatcgagatactcctgacagttttgttccctcatcctctcctgagagtgtggttggggtagaagtgagcaggtatccagatctgtcattggtcaaggaggagcctccagaaccggtgccgtcccccatcattccaattcttcctagcactgctgggaaaagttcagaatcaagaaggaatgacatcaaaactgagccaggcactttatattttgcgtcaccttttggtccttccccaaatggtcccagatcaggtcttatatctgtagcaattactctgcatcctacagctgctgagaacattagcagtgttgtggctgcattttccgaccttcttcacgtccgaatccctaacagctatgaggttagcagtgctccagatgtcccatccatgggtttggtcagtagccacagaatcaacccgggtttggagtatcgacagcatttacttctccgtgggcctccgccaggatctgcaaaccctcccagattagtgagctcttaccggctgaagcagcctaatgtaccatttcctccaacaagcaatggtctttctggatataaggattctagtcatggtattgcagaaagcgcagcactcagaccacagtggtgttgtcattgtaaagtggttattcttggaagtggtgtgcggaaatctttcaaagatctgacccttttgaacaaggattcccgagaaagcaccaagagggtagagaaggacattgtcttctgtagtaataactgctttattctttattcatcaactgcacaagcgaaaaactcagaaaacaaggaatccattccttcattgccacaatcacctatgagagaaacgccttccaaagcatttcatcagtacagcaacaacatctccactttggatgtgcactgtctcccccagctcccagagaaagcttctccccctgcctcaccacccatcgccttccctcctgcttttgaagcagcccaagtcgaggccaagccagatgagctgaaggtgacagtcaagctgaagcctcggctaagagctgtccatggtgggtttgaagattgcaggccgctcaataaaaaatggagaggaatgaaatggaagaagtggagcattcatattgtaatccctaaggggacatttaaaccaccttgtgaggatgaaatagatgaatttctaaagaaattgggcacttcccttaaacctgatcctgtgcccaaagactatcggaaatgttgcttttgtcatgaagaaggtgatggattgacagatggaccagcaaggctactcaaccttgacttggatctgtgggtccacttgaactgcgctctgtggtccacggaggtctatgagactcaggctggtgccttaataaatgtggagctagctctgaggagaggcctacaaatgaaatgtgtcttctgtcacaagacgggtgccactagtggatgccacagatttcgatgcaccaacatttatcacttcacttgcgccattaaagcacaatgcatgttttttaaggacaaaactatgctttgccccatgcacaaaccaaagggaattcatgagcaagaattaagttactttgcagtcttcaggagggtctatgttcagcgtgatgaggtgcgacagattgctagcatcgtgcaacgaggagaacgggaccatacctttcgcgtgggtagcctcatcttccacacaattggtcagctgcttccacagcagatgcaagcattccattctcctaaagcactcttccctgtgggctatgaagccagccggctgtactggagcactcgctatgccaataggcgctgccgctacctgtgctccattgaggagaaggatgggcgcccagtgtttgtcatcaggattgtggaacaaggccatgaagacctggttctaagtgacatctcacctaaaggtgtctgggataagattttggagcctgtggcatgtgtgagaaaaaagtctgaaatgctccagcttttcccagcgtatttaaaaggagaggatctgtttggcctgaccgtctctgcagtggcacgcatagcggaatcacttcctggggttgaggcatgtgaaaattataccttccgatacggccgaaatcctctcatggaacttcctcttgccgttaaccccacaggttgtgcccgttctgaacctaaaatgagtgcccatgtcaagaggtttgtgttaaggcctcacaccttaaacagcaccagcacctcaaagtcatttcagagcacagtcactggagaactgaacgcaccttatagtaaacagtttgttcactccaagtcatcgcagtaccggaagatgaaaactgaatggaaatccaatgtgtatctggcacggtctcggattcaggggctgggcctgtatgctgctcgagacattgagaaacacaccatggtcattgagtacatcgggactatcattcgaaacgaagtagccaacaggaaagagaagctttatgagtctcagaaccgtggtgtgtacatgttccgcatggataacgaccatgtgattgacgcgacgctcacaggagggcccgcaaggtatatcaaccattcgtgtgcacctaattgtgtggctgaagtggtgacttttgagagaggacacaaaattatcatcagctccagtcggagaatccagaaaggagaagagctctgctatgactataagtttgactttgaagatgaccagcacaagattccgtgtcactgtggagctgtgaactgccggaagtggatgaactgaaatgcattccttgctagctcagcgggcggcttgtccctaggaagaggcgattcaacacaccattggaattttgcagacagaaagagatttttgttttctgttttatgactttttgaaaaagcttctgggagttctgatttcctcagtcctttaggttaaagcagcgccaggaggaagctgacagaagcagcgttcctgaagtggccgaggttaaacggaatcacagaatggtccagcacttttgcttttttttcttttccttttcttttttttttgtttgttttttgttttgtttttcccttgtgggtgggtttcattgttttggttttctagtctcactaaggagaaacttttactggggcaaagagccgatggctgccctgccccgggcaggggccttcctatgaatgtaagactgaaatcaccagcgagggggacagagagtgctggccacggccttattaaaaaggggcaggccctctaacttcaaaatgtttttaaataaagtagacaccactgaacaaggaatgtactgaaatgacttccttagggatagagctaagggataataacttgcactaaatacatttaaatacttgattccatgagtcagtttattgtagtttttgatttctgtaaaataagagaaacttttgtatttattattgaataagtgaatgaagctatttttaaataaagttagaagaaagccaagctgctgctgttacctgcagaactaacaaaccctgttactttgtacagatatgtaaatattttgagaaaaaatacagtataaaaatagttattgaccaaatgctaccaggctctgcagcagctcgggggcttataaaatgttcatagggatgttacaatataattttgtgttataaaatatgccattataattatgtaataaccaaaatttcaacctagagtgttgggggttttttggaaaccgcagtctattagtactcaatggttttatacaccttacttctgacagagcggggcgtatgctacgactacaacttttatagctgttttggtaatttaaactaattttttcatattatattgttgcatccctacttcttcagtcaggtttttttgtgcttacaatttgtgataactgtgaataactgcttaaaaatacacccaaatggaggctgaattttttcttcagcaaaagtagttttgattagaactttgtttcagccacagagaatcatgtaaacgtaataggatcatgtagcagaaacttaaatctaaccctttagccttctatttaacacaaaaatttgaaaaagttaaaaaaaaaaaggagatgtgattatgcttacagctgcaggactctggcaatagggtttttggaagatgtaattttaaaatgtgtttgtatgaactgtttgtttacatttctttaataaaaaaaacactgttttgtgtttgcttgtagaaacttaatcagcattttgaaccaggttagctttttattttgtacttaaaattctggtactgacacttcacaggctaagtataaaatgaagttttgtgtgcacaattcaagtggactgtaaactgttggtatattcagtgatgcagttctgaacttgtatatggcatgatgtatttttatcttacagaataaatcaattgtatatatttttctcttgataaatagctgtatgaaatttgtttcctgaatatttttcttctcttgtacaatatcctgacatcctaccagtatttgtcctaccgggtttttgttgttttctgttctgtataatagtatctaatgttggcaaaaattgaattttttgaagtatacagagtgttatgggttttggaatttgtggacacagatttagaagatcaccatttacaaataaaatattttacatctataaaaaaaaaaaa

SEQ ID NO: 971 - protein, 4911 aa, Homo sapiens
MSSEEDKSVEQPQPPPPPPEEPGAPAPSPAAADKRPRGRPRKDGASPFQRARKKPRSRGKTAVEDEDSMDGLETTETETIVETEIKEQSAEEDAEAEVDNSKQLIPTLQRSVSEESANSLVSVGVEAKISEQLCAFCYCGEKSSLGQGDLKQFRITPGFILPWRNQPSNKKDIDDNSNGTYEKMQNSAPRKQRGQRKERSPQQNIVSCVSVSTQTASDDQAGKLWDELSLVGLPDAIDIQALFDSTGTCWAHHRCVEWSLGVCQMEEPLLVNVDKAVVSGSTERCAFCKHLGATIKCCEEKCTQMYHYPCAAGAGTFQDFSHIFLLCPEHIDQAPERSKEDANCAVCDSPGDLLDQFFCTTCGQHYHGMCLDIAVTPLKRAGWQCPECKVCQNCKQSGEDSKMLVCDTCDKGYHTFCLQPVMKSVPTNGWKCKNCRICIECGTRSSSQWHHNCLICDNCYQQQDNLCPFCGKCYHPELQKDMLHCNMCKRWVHLECDKPTDHELDTQLKEEYICMYCKHLGAEMDRLQPGEEVEIAELTTDYNNEMEVEGPEDQMVFSEQAANKDVNGQESTPGIVPDAVQVHTEEQQKSHPSESLDTDSLLIAVSSQHTVNTELEKQISNEVDSEDLKMSSEVKHICGEDQIEDKMEVTENIEVVTHQITVQQEQLQLLEEPETVVSREESRPPKLVMESVTLPLETLVSPHEESISLCPEEQLVIERLQGEKEQKENSELSTGLMDSEMTPTIEGCVKDVSYQGGKSIKLSSETESSFSSSADISKADVSSSPTPSSDLPSHDMLHNYPSALSSSAGNIMPTTYISVTPKIGMGKPAITKRKFSPGRPRSKQGAWSTHNTVSPPSWSPDISEGREIFKPRQLPGSAIWSIKVGRGSGFPGKRRPRGAGLSGRGGRGRSKLKSGIGAVVLPGVSTADISSNKDDEENSMHNTVVLFSSSDKFTLNQDMCVVCGSFGQGAEGRLLACSQCGQCYHPYCVSIKITKVVLSKGWRCLECTVCEACGKATDPGRLLLCDDCDISYHTYCLDPPLQTVPKGGWKCKWCVWCRHCGATSAGLRCEWQNNYTQCAPCASLSSCPVCYRNYREEDLILQCRQCDRWMHAVCQNLNTEEEVENVADIGFDCSMCRPYMPASNVPSSDCCESSLVAQIVTKVKELDPPKTYTQDGVCLTESGMTQLQSLTVTVPRRKRSKPKLKLKIINQNSVAVLQTPPDIQSEHSRDGEMDDSREGELMDCDGKSESSPEREAVDDETKGVEGTDGVKKRKRKPYRPGIGGFMVRQRSRTGQGKTKRSVIRKDSSGSISEQLPCRDDGWSEQLPDTLVDESVSVTESTEKIKKRYRKRKNKLEETFPAYLQEAFFGKDLLDTSRQSKISLDNLSEDGAQLLYKTNMNTGFLDPSLDPLLSSSSAPTKSGTHGPADDPLADISEVLNTDDDILGIISDDLAKSVDHSDIGPVTDDPSSLPQPNVNQSSRPLSEEQLDGILSPELDKMVTDGAILGKLYKIPELGGKDVEDLFTAVLSPANTQPTPLPQPPPPTQLLPIHNQDAFSRMPLMNGLIGSSPHLPHNSLPPGSGLGTFSAIAQSSYPDARDKNSAFNPMASDPNNSWTSSAPTVEGENDTMSNAQRSTLKWEKEEALGEMATVAPVLYTNINFPNLKEEFPDWTTRVKQIAKLWRKASSQERAPYVQKARDNRAALRINKVQMSNDSMKRQQQQDSIDPSSRIDSELFKDPLKQRESEHEQEWKFRQQMRQKSKQQAKIEATQKLEQVKNEQQQQQQQQFGSQHLLVQSGSDTPSSGIQSPLTPQPGNGNMSPAQSFHKELFTKQPPSTPTSTSSDDVFVKPQAPPPPPAPSRIPIQDSLSQAQTSQPPSPQVFSPGSSNSRPPSPMDPYAKMVGTPRPPPVGHSFSRRNSAAPVENCTPLSSVSRPLQMNETTANRPSPVRDLCSSSTTNNDPYAKPPDTPRPVMTDQFPKSLGLSRSPVVSEQTAKGPIAAGTSDHFTKPSPRADVFQRQRIPDSYARPLLTPAPLDSGPGPFKTPMQPPPSSQDPYGSVSQASRRLSVDPYERPALTPRPIDNFSHNQSNDPYSQPPLTPHPAVNESFAHPSRAFSQPGTISRPTSQDPYSQPPGTPRPVVDSYSQSSGTARSNTDPYSQPPGTPRPTTVDPYSQQPQTPRPSTQTDLFVTPVTNQRHSDPYAHPPGTPRPGISVPYSQPPATPRPRISEGFTRSSMTRPVLMPNQDPFLQAAQNRGPALPGPLVRPPDTCSQTPRPPGPGLSDTFSRVSPSAARDPYDQSPMTPRSQSDSFGTSQTAHDVADQPRPGSEGSFCASSNSPMHSQGQQFSGVSQLPGPVPTSGVTDTQNTVNMAQADTEKLRQRQKLREIILQQQQQKKIAGRQEKGSQDSPAVPHPGPLQHWQPENVNQAFTRPPPPYPGNIRSPVAPPLGPRYAVFPKDQRGPYPPDVASMGMRPHGFRFGFPGGSHGTMPSQERFLVPPQQIQGSGVSPQLRRSVSVDMPRPLNNSQMNNPVGLPQHFSPQSLPVQQHNILGQAYIELRHRAPDGRQRLPFSAPPGSVVEASSNLRHGNFIPRPDFPGPRHTDPMRRPPQGLPNQLPVHPDLEQVPPSQQEQGHSVHSSSMVMRTLNHPLGGEFSEAPLSTSVPSETTSDNLQITTQPSDGLEEKLDSDDPSVKELDVKDLEGVEVKDLDDEDLENLNLDTEDGKVVELDTLDNLETNDPNLDDLLRSGEFDIIAYTDPELDMGDKKSMFNEELDLPIDDKLDNQCVSVEPKKKEQENKTLVLSDKHSPQKKSTVTNEVKTEVLSPNSKVESKCETEKNDENKDNVDTPCSQASAHSDLNDGEKTSLHPCDPDLFEKRTNRETAGPSANVIQASTQLPAQDVINSCGITGSTPVLSSLLANEKSDNSDIRPSGSPPPPTLPASPSNHVSSLPPFIAPPGRVLDNAMNSNVTVVSRVNHVFSQGVQVNPGLIPGQSTVNHSLGTGKPATQTGPQTSQSGTSSMSGPQQLMIPQTLAQQNRERPLLLEEQPLLLQDLLDQERQEQQQQRQMQAMIRQRSEPFFPNIDFDAITDPIMKAKMVALKGINKVMAQNNLGMPPMVMSRFPFMGQVVTGTQNSEGQNLGPQAIPQDGSITHQISRPNPPNFGPGFVNDSQRKQYEEWLQETQQLLQMQQKYLEEQIGAHRKSKKALSAKQRTAKKAGREFPEEDAEQLKHVTEQQSMVQKQLEQIRKQQKEHAELIEDYRIKQQQQCAMAPPTMMPSVQPQPPLIPGATPPTMSQPTFPMVPQQLQHQQHTTVISGHTSPVRMPSLPGWQPNSAPAHLPLNPPRIQPPIAQLPIKTCTPAPGTVSNANPQSGPPPRVEFDDNNPFSESFQERERKERLREQQERQRIQLMQEVDRQRALQQRMEMEQHGMVGSEISSSRTSVSQIPFYSSDLPCDFMQPLGPLQQSPQHQQQMGQVLQQQNIQQGSINSPSTQTFMQTNERRQVGPPSFVPDSPSIPVGSPNFSSVKQGHGNLSGTSFQQSPVRPSFTPALPAAPPVANSSLPCGQDSTITHGHSYPGSTQSLIQLYSDIIPEEKGKKKRTRKKKRDDDAESTKAPSTPHSDITAPPTPGISETTSTPAVSTPSELPQQADQESVEPVGPSTPNMAAGQLCTELENKLPNSDFSQATPNQQTYANSEVDKLSMETPAKTEEIKLEKAETESCPGQEEPKLEEQNGSKVEGNAVACPVSSAQSPPHSAGAPAAKGDSGNELLKHLLKNKKSSSLLNQKPEGSICSEDDCTKDNKLVEKQNPAEGLQTLGAQMQGGFGCGNQLPKTDGGSETKKQRSKRTQRTGEKAAPRSKKRKKDEEEKQAMYSSTDTFTHLKQQNNLSNPPTPPASLPPTPPPMACQKMANGFATTEELAGKAGVLVSHEVTKTLGPKPFQLPFRPQDDLLARALAQGPKTVDVPASLPTPPHNNQEELRIQDHCGDRDTPDSFVPSSSPESVVGVEVSRYPDLSLVKEEPPEPVPSPIIPILPSTAGKSSESRRNDIKTEPGTLYFASPFGPSPNGPRSGLISVAITLHPTAAENISSVVAAFSDLLHVRIPNSYEVSSAPDVPSMGLVSSHRINPGLEYRQHLLLRGPPPGSANPPRLVSSYRLKQPNVPFPPTSNGLSGYKDSSHGIAESAALRPQWCCHCKVVILGSGVRKSFKDLTLLNKDSRESTKRVEKDIVFCSNNCFILYSSTAQAKNSENKESIPSLPQSPMRETPSKAFHQYSNNISTLDVHCLPQLPEKASPPASPPIAFPPAFEAAQVEAKPDELKVTVKLKPRLRAVHGGFEDCRPLNKKWRGMKWKKWSIHIVIPKGTFKPPCEDEIDEFLKKLGTSLKPDPVPKDYRKCCFCHEEGDGLTDGPARLLNLDLDLWVHLNCALWSTEVYETQAGALINVELALRRGLQMKCVFCHKTGATSGCHRFRCTNIYHFTCAIKAQCMFFKDKTMLCPMHKPKGIHEQELSYFAVFRRVYVQRDEVRQIASIVQRGERDHTFRVGSLIFHTIGQLLPQQMQAFHSPKALFPVGYEASRLYWSTRYANRRCRYLCSIEEKDGRPVFVIRIVEQGHEDLVLSDISPKGVWDKILEPVACVRKKSEMLQLFPAYLKGEDLFGLTVSAVARIAESLPGVEACENYTFRYGRNPLMELPLAVNPTGCARSEPKMSAHVKRFVLRPHTLNSTSTSKSFQSTVTGELNAPYSKQFVHSKSSQYRKMKTEWKSNVYLARSRIQGLGLYAARDIEKHTMVIEYIGTIIRNEVANRKEKLYESQNRGVYMFRMDNDHVIDATLTGGPARYINHSCAPNCVAEVVTFERGHKIIISSSRRIQKGEELCYDYKFDFEDDQHKIPCHCGAVNCRKWMN

SEQ ID NO: 972 - DNA, 856 bp, Homo sapiens
cgcgaggagcaaatgtgcgcccgcacggcgagggcagcccgggcttcgctggttctcgccgaggtctttcctcgtagcgcccacactacggggaggaaaaggaatggagtcaacttcgttcgaatccaacgccagcaagtcatctttgcactcataaccacatcttttatggaacatcaagcctactctgaggtacaggctttcagaagcctgaatttggaggaccatgcctgaaccaaatggagtctccagaatcaaaactgctcaaaataatcattcatggttctcagaccaaataagatctacttagaaacatttctcgacagcacgctgccatgccgacgcagaccccactctgcacgccagcccccctgcacccaccatggccacagttcagcagctagaaggaagatggcgcctggtggacaacaaaggctttgatgaatacatgaaggagctaggagtgggaatagctttgtgaaaaatgggcgcaatggccaagccagattgtatcatcacttgtgatagcaaaaacctcaccataaaaactgagagcactttgaaaacaacacagttttctggtaccctgggagagaagtttgaagaaaacacagctgatggcagaagaactcagactgtttgcaactttacagatggtgcattggttcagcatcaggagtgggatgggaaggaaagcacaataacaagaaaactgaaagatgggaaattagtggtggagcgtgtcatgaaccatgtcgcctgtactcggatctatgaaaaagcacaataaagattccatcatcactttggacaggagttaaccaagagaatgaccaagctcagttcaatgaacaaa

SEQ ID NO: 973 - DNA, 2037 bp, Homo sapiens
gcggagttcctttacagaatcaaccctggggtggctttaggactgggctctttggagctcatccttggacccacagtggagcgctggtctgtgctaacatcttcagataccaatcaatgggcatttggctccttgcttccactgacctcttgagtactttcaacgatcggtgtcaagggtgcccctgctgctgtttctagagcatctctgcaacccacggtggcctctcctctttctgcgggccatggacagcacagtcccttcagccctggagctgccccagcggctggcactgaacccaagggagagcccaaggagtccggaagaggaggagccccacctgctgagcagcttggctgcagtccagaccctggccaatgtcatccggccttgctatggcccccatggccggcagaagttcctggtgaccatgaaaggagaaacagtgtgcacggggtgtgccactgccatcctcagggccctggagctggagcacccagcggcatggctcctccgggaagcagcccaaacccaagcagagaatagtggggatggcacagccttcgtggttctgctgacggaagccttgctggaacaggcagagcagctgctgaagttcggcctgcctcgcccgcagctccgggaggcctacgccacagccactgcagaggtcctggccacactgccctccctggccatccaatctctggggcctttggaagatccgtcctgggccctccattctgtgatgaatacccacaccctgccccccatgaaccacttgaccaagctggtggcccacgcctgctgggctatcaaggagctagacggcagcttcaagcctgagcgtgttggggtgtgcacgctgcacggggggacactggaggattcctgcctcctccaggggttagcaatatctgggaagctctgtgggcaaatggccgcagtgttaagtggtgccagggtggctctctttgcttgcccctttggtcctgcccatccaaatgcaccagcaacggcctgtctttctagtcctgctgatctagctcaatttagtaaaggaagtgaccaattactagaaaagcaagtaggccagctggcagccgcgggaattaatgtggcagtggtgttgggggaggtcgacgaggagaccctcacactggcggacaagtatggcatcgtggtgattcaggctaggtctcggatggagatcatttacctgagtgaggtgttggacacaccgctgctgcctcgtctgctccctccccagaggccaggcaagtgccagagggtttacaggcaggagctgggagatggtttggctgtggtatttgaatgggaatgtacaggcacacctgccctcaccgtggttctcaggggagccaccacccaggggctgcggagtgcagagcaggccgtctaccacagcattgatgcctatttccagccatgtcaagatcccagactgatcccaggagctggggccacagaaatggctttggcaaaaatgctctctgataaaggaagcagattggaagggcccaatgggcctgcattcctagcatttgcccgggccctgaagtatcttcctaaaaccttggcagagaatgcaggcttagctgtctcagacgtggttgcagaaatgagtggagtgcaccaaggtgggaacctcctaatgggtgtgggagctgaagggataataaatgtggcccaggaaggggtgtgggacaccctaatagtcaaagcccaaggatttcgagcagtggctgaggtggtgctacagctcgtgactgtagatgaaatcgtagtggccaagaaaagtcccacacatcagcagatctggaatcctgactctaagaagacaaagaaacgcccacctcctgtggaaaaaaaaaaaatccttggaatgaataactagtgataccctcaataaaacagggattgccaagaagggaacaatcaccccaaaaatgaatgtttgcctttattccatgtttggtacttgattcagtttctttaaataaaaacatgaaggaa

SEQ ID NO: 974 - protein, 557 aa, Homo sapiens
MDSTVPSALELPQRLALNPRESPRSPEEEEPHLLSSLAAVQTLANVIRPCYGPHGRQKFLVTMKGETVCTGCATAILRALELEHPAAWLLREAAQTQAENSGDGTAFVVLLTEALLEQAEQLLKFGLPRPQLREAYATATAEVLATLPSLAIQSLGPLEDPSWALHSVMNTHTLPPMNHLTKLVAHACWAIKELDGSFKPERVGVCTLHGGTLEDSCLLQGLAISGKLCGQMAAVLSGARVALFACPFGPAHPNAPATACLSSPADLAQFSKGSDQLLEKQVGQLAAAGINVAVVLGEVDEETLTLADKYGIVVIQARSRMEIIYLSEVLDTPLLPRLLPPQRPGKCQRVYRQELGDGLAVVFEWECTGTPALTVVLRGATTQGLRSAEQAVYHSIDAYFQPCQDPRLIPGAGATEMALAKMLSDKGSRLEGPNGPAFLAFARALKYLPKTLAENAGLAVSDVVAEMSGVHQGGNLLMGVGAEGIINVAQEGVWDTLIVKAQGFRAVAEVVLQLVTVDEIVVAKKSPTHQQIWNPDSKKTKKRPPPVEKKKILGMNN

SEQ ID NO: 975 - DNA, 774 bp, Homo sapiens
atgaacatggaggaggacgtcttcgagggagagctggcagggtggaacgccgcggtccgtaccggagagggagaaagtgcaggacgacccgccgggaagacccgagcgcgtgcgccttccccgcggctccacgggcacaaaacggtggctccggagctcctagacccaggcagccccagctgcgcgcgcgcctccccccgagcgcggccgggctcccgcgggaaacaagcgaccgcggcacgcgtgggcgcggcgggtgggtgccggcgccaggttcctcccggctccccactgcggatcctcgcggctcctcccggctccgcccagcggctcaccccgcggacggggatccctccgcccaccgccggcccttccgcgccaagtagtgcgaccccggcccccgcagcttccgccaacccaggctcgcgaggacgagtccacggtcgcgggcgagaaggagcgacgcagagacggccgggggcgcggggcagtcccgaggttttccccgcgaggccgcggggggtctcccagtggccagggagagagcgcgcccaggtccgcggaaccacggctcctgccgcggcgagcgggccgggagtctacggtcggggcagagccgcccgggaagccgcgcgaggacggcggccggcggccggcggcggaggcaggtgtcccgaggcctgccccacccccactaccgcgggcaggaagaggaaggagccgcggccgtgcctggcgggcgggggtgcccgacccgcggagcgcgtgacctag

SEQ ID NO: 976 - protein, 257 aa, Homo sapiens
MNMEEDVFEGELAGWNAAVRTGEGESAGRPAGKTRARAPSPRLHGHKTVAPELLDPGSPSCARASPRARPGSRGKQATAARVGAAGGCRRQVPPGSPLRILAAPPGSAQRLTPRTGIPPPTAGPSAPSSATPAPAASANPGSRGRVHGRGREGATQRRPGARGSPEVFPARPRGVSQWPGRERAQVRGTTAPAAASGPGVYGRGRAAREAARGRRPAAGGGGRCPEACPTPTTAGRKRKEPRPCLAGGGARPAERVT

SEQ ID NO: 977 - DNA, 3094 bp, Homo sapiens
tttgactggccgtagagtctgcgcagttggtgaatggcgttggtggcgggaaagttgagtctctcctgcgccgagccttcggggcgatgtgtagtgccttccatagggctgagtctgggaccgagctccttgcccgacttgaaggtagaagttccttgaaagaaatagaaccaaatctgtttgctgatgaagattcacctgtgcatggtgatattcttgaatttcatggcccagaaggaacaggaaaaacagaaatgctttatcacctaacagcacgatgtatacttcccaaatcagaaggtggcctggaagtagaagtcttatttattgatacagattaccactttgatatgctccggctagttacaattcttgagcacagactatcccaaagctctgaagaaataatcaaatactgcctgggaagattttttttggtgtactgcagtagtagcacccacttacttcttacactttactcactagaaagtatgttttgtagtcacccatctctctgccttttgattttggatagcctgtcagctttttactggatagaccgcgtcaatggaggagaaagtgtgaacttacaggagtctactctgaggaaatgttctcagtgcttagagaagcttgtaaatgactatcgcctggttctttttgcaacgacacaaactataatgcagaaagcctcgagctcatcagaagaaccttctcatgcctctcgacgactgtgtgatgtggacatagactacagaccttatctctgtaaggcatggcagcaactggtgaagcacaggatgtttttctccaaacaagatgattctcaaagcagcaaccaattttcattagtttcacgttgtttaaaaagtaacagtttaaaaaaacatttttttattattggagaaagtggggttgaattttgttgatatacatcataaaatagtcttttgcagggtactacgcaagccttaaaatttttcttaagacagagtcttgctctgtctcccaggctggagtgcagtggcacaatcatggctcactgcagccttgaactcctggcctcaagggatcctcctatgtgtgcctcctagagtgcagggattacaggcgtgagccactgctcgtggccaaaagttttctttttttttttttttctttttgaaacagtcttactctgtctcccaggctgctggagtgcagtggcacaatctcggcccgctgcagcctctgcctcttgggttcaagtgattcttccacctcagcctcccaggtagctgggattacaggcacccaccaccacgcctggctaatttttgtatttttaatagagacggggtttcaccatgttggccaggctggtctcgaactcctgacctcaagtgatccacccacctcggcctcccaaagtgctaggattacaggcccgtgcccagccctaaagttttaaactctaggggaattaacagtatttctttacagaatggatttgttaaactagcacagtaaaagtaaagactattctgtttctaggctgttgaatcaaagtgattttagcaattaaactttgtattaatttaccaccaatatttcttcacaaaggaacttttaaaagattatctcagaaagtaaatctgagaggtaagaagtaataatgagtaaatggtaagtacttgagtaaatctaaagaaatattgatagtaaggcaatcctaagcaaaaagaacaaagctggaggcatcacgctacccagcttcaaactatactacaaggctacagtaaccaaaacagcatagtactggcacaaaaacacacgtagactgatggaacagaatagagaatttagaaatgagaccacacacctataatttttttgatcttcgatgaacctgacaaaaacaagcaatgggcaatggattctctattcaataaatcgtgctgggataactggccagccatatggaaaagattgaaaatggacgccttccttatgccatatacaaaaattaactcaagatggattaaagacttaatgtaaaacccaaaacagtaaaaatcctggaagacaacccaggcagtaccattcaggacataggcacaggcaaagatttcatgacgaagacgccaaaaacaattgcaacagaagcaaaaattcacaaatgggatctaattaaactaaagagctgcacagcaaaagaaactatcaagagagtaaacagacagcttacagaatgggagaaaattgttgcaaactatgcatctgagaaaggtctgaaatccagcatctatacgtaatttaaacaaatttagaagaaaaaaccaccccattaaaaagtgggcaaaggacatgaacagacacttttcaaaagaagacatctgtggccaacaatcctatggaaaaaagcccagcatcactgatcattagagaaatgcaaatcgaaacaacaacgagataccatctcacaccagtccaaatggctattataaaaatgtcagaaaataacagatgctggtgaggttgtggagaaaaagatatgcttatacactgttggtggaaatgtaaattaaattagttcagccattgtggaagacagtgtggggataaagacagagataccattcaacccagcaatctcattactgggtatatacccaaaggaatagaaatcattgttataaagacacatgcacgcgtatgttcgttgcagcactgcccatcagtgacagactggattaaaaaaatgtggtacatacacaccagggaatactatacagccataaaaaggaacaagactgactgggcgtggtggctcatgcctgtgatcctagcactttgcgaggccgaggtgggtggattgcccgcgctcaggaggtcaagaccagcctgggcaacacggtgaaaccccatctctattaaaatacaaaaaattagctgggcatggtggtgcgtgcctgtagtgccagctactcaggaggccgaggcaggagaattgctggaacccaggaggtggaggttgcagtgagctgagatcgcgccattgcactcccgcctgggcgactccatctctaaaaaaaaaaaaaaaaaaaaaaaaaaa

SEQ ID NO: 978 - protein, 280 aa, Homo sapiens
MCSAFHRAESGTELLARLEGRSSLKEIEPNLFADEDSPVHGDILEFHGPEGTGKTEMLYHLTARCILPKSEGGLEVEVLFIDTDYHFDMLRLVTILEHRLSQSSEEIIKYCLGRFFLVYCSSSTHLLLTLYSLESMFCSHPSLCLLILDSLSAFYWIDRVNGGESVNLQESTLRKCSQCLEKLVNDYRLVLFATTQTIMQKASSSSEEPSHASRRLCDVDIDYRPYLCKAWQQLVKHRMFFSKQDDSQSSNQFSLVSRCLKSNSLKKHFFIIGESGVEFC

SEQ ID NO: 979 - DNA, 3785 bp, Homo sapiens
ctgggcagtgcttctgggccctctgctgctcctgcttgtcggttgctaggcgctgggacgcgcctcccgaagggtgcggggcacaggtggcctcttcggggtggaccgcgcctggccggggccgaggacaccgcggccgcccgggcctgcgggaagcgatggagcccgggaagagaagaaccaaagatgatacctggaaagcagatgacctcagaaaacatctctgggccatacagtcaggtggttccaaggaagaaagaaagcacagagagaagaagctgcgtaaggagtctgagatggaccttcctgaacataaggagccgaggtgcagggatcccgaccaggatgccaggagcagagacagggtggccgaagtccacaccgctaaggagagtcctcgtggggagagggacagagacagacagagggagaggagaagagacgcaaaagaccgggagaaagaaaagctgaaggagaaacatcgagaggcagaaaagtctcacagcagaggaaaggacagggaaaaagaaaaagacagaagggcccggaaggaagagctccggcagaccgtggcccaccacaacctgctgggccaggagacacgcgaccggcagctcctggagcgggcggagaggaaaggccgctcagtaagtaaagtaagaagtgaagagaaagatgaagactctgaaagaggagatgaagatagagaaagaagataccgagaaagaaagctgcagtacggagacagcaaggacaaccctctcaagtactggctttataaagaagaaggcgagaggagacacaggaagcccagagagccagatcgagacaagaaacaccgagaaaaaagcagcacaagggaaaaaagagagaaatattccaaagagaaaagtaattcattctctgacaaaggggaagaaagacataaagaaaagcgacacaaagaaggttttcattttgatgatgagaggcaccaaagcaacgtggatagaaaagagaaatcggcaaaagatgagcccaggaaaagggaattccagaatggtgaacacagaaatcgaggtgcaagctcaaaaagagatgggaccagcagccagcatgctgagaatttagtaaggaatcatggaaaagataaagattcaagacggaagcatggccacgaggaaggctcttctgtgtggtggaagctggaccagaggccgggaggcgaggaaaccgtggaaattgaaaaggaagaaactgatttagaaaatgctagagctgatgcatatacagccagttgtgaagatgattttgaagactatgaagatgactttgaggtttgtgatggtgatgatgatgaaagcagtaatgaacctgagtcaagagaaaaactggaagaacttcctctagctcaaaaaaaggaaatacaagaaattcaaagagctattaatgcagaaaatgaaaggattggcgagttatctttgaaactgtttcagaagcgaggtagaacagaatttgaaaaggagcccaggacagatacaaacagttccccttccagagcctctgtttgtggaatttttgtggattttgcctcagcttcacaccgtcaaaagagtcggactcaggcccttaagcaaaagatgcgaagtacaaaactgcttcggctcattgacttagatttttcatttactttctctctcttggatctaccaccagtaaatgaatatgacatgtatatcagaaactttgggaaaaaaaataccaagcaggcatatgttcagtgtaacgaagataatgttgaaagagacattcaaacggaggaaatagagaccagggaagtgtggacccagcacccgggagaaagtactgttgtatctggaggcagtgaacaaagagatacctctgatgctgtagttatgccaaagattgatactccaaggttatgtagctttctgcgggctgcttgtcaggtgatggccgttttgctggaagaggatcgcttggcagctgaacccagctggaatcttagggctcaagacagggccctgtattttagtgacagctcatctcagctgaacaccagtctaccattccttcaaaatcgaaaagtatcctccttgcacacctcccgagttcagaggcagatggtggtctccgttcacgacttacccgagaagagctttgtgcccctgctggacagcaaatacgtcctctgtgtgtgggatatttggcagccttcagggccacagaaggttctgatatgtgagtcccaggtcacgtgttgctgcttgagccctttgaaagcatttttactgtttgccggaacagcgcacggctcagttgtcgtctgggatttgagagaagactcaaggctgcattactctgtgacgctgagcgatggcttctggacgttccggaccgccacgttttccaccgatggaatccttacctcagtaaaccaccgaagccctcttcaagcagtagaacctatctcaacgtccgtccacaaaaagcagagctttgtgctttcacccttttctactcaagaagaaatgtcaggtttgtccttccacatcgcttccttggatgagagtggggttctcaatgtatgggtggttgttgaattaccaaaggcagacatcgcaggttcaataagtgatttaggtctgatgcctggagggagggtcaagctggtacatagtgctctgatccagttgggtgacagtctttcccataaaggtaatgaattttggggcactacacaaacactgaatgttaaatttctgccttcagatcctaatcactttattattggcacagacatgggtctcataagccatggcacaagacaagatttgagagtggctcccaaactattcaaacctcagcaacatggtataagaccagtgaaagttaatgtcattgatttttcaccatttggagaaccaatatttttggccggctgttcggacggaagcatcaggctgcaccagctgagctccgcgtttccgctcctgcagtgggacagcagcacggacagccatgcggtcaccggcctgcagtggtccccaaccaggcctgccgtgttcctggtgcaggacgacacatccaacatctacatctgggacctcctccagagcgatctgggtcctgtcgccaaacagcaggtctcccccaacaggctggtggccatggctgcggtgggtgagcctgagaaggctggtggcagcttcctggccctggtgctggccagggcgtctggctccatcgacatccagcacctgaagaggcggtgggcggccccggaggtggacgagtgcaacaggctgcgtctgcttttgcaggaagccctgtggccagagggaaaactgcacaagtagcgggtgtggctgagaggaccgcgtttctgtaatgacccagatttaaaagacataaggtggataattctacatttgtgtgcaagtatatttatgtatatagactatgtatattctgtatataatttattttacatgaatatttctttggtattcccagtaaatacatgactacttttgagtggaaacaaagaacattctagcatttacaaaacttccaggggaatgtagagccacgtccagggtgctcttttctgagagtatttcgagttatttttagaacagtttaaatattgtcacattactgctagattttaaacagcctaccatgaaaatgtatcttaatgaactattttcttatgcataaagtatgtgaacacacgtctaaattaaaaggaattactccaccgcaaaaaaaaaaaaaaaaaa

SEQ ID NO: 980 - protein, 1066 aa, Homo sapiens
MEPGKRRTKDDTWKADDLRKHLWAIQSGGSKEERKHREKKLRKESEMDLPEHKEPRCRDPDQDARSRDRVAEVHTAKESPRGERDRDRQRERRRDAKDREKEKLKEKHREAEKSHSRGKDREKEKDRRARKEELRQTVAHHNLLGQETRDRQLLERAERKGRSVSKVRSEEKDEDSERGDEDRERRYRERKLQYGDSKDNPLKYWLYKEEGERRHRKPREPDRDKKHREKSSTREKREKYSKEKSNSFSDKGEERHKEKRHKEGFHFDDERHQSNVDRKEKSAKDEPRKREFQNGEHRNRGASSKRDGTSSQHAENLVRNHGKDKDSRRKHGHEEGSSVWWKLDQRPGGEETVEIEKEETDLENARADAYTASCEDDFEDYEDDFEVCDGDDDESSNEPESREKLEELPLAQKKEIQEIQRAINAENERIGELSLKLFQKRGRTEFEKEPRTDTNSSPSRASVCGIFVDFASASHRQKSRTQALKQKMRSTKLLRLIDLDFSFTFSLLDLPPVNEYDMYIRNFGKKNTKQAYVQCNEDNVERDIQTEEIETREVWTQHPGESTVVSGGSEQRDTSDAVVMPKIDTPRLCSFLRAACQVMAVLLEEDRLAAEPSWNLRAQDRALYFSDSSSQLNTSLPFLQNRKVSSLHTSRVQRQMVVSVHDLPEKSFVPLLDSKYVLCVWDIWQPSGPQKVLICESQVTCCCLSPLKAFLLFAGTAHGSVVVWDLREDSRLHYSVTLSDGFWTFRTATFSTDGILTSVNHRSPLQAVEPISTSVHKKQSFVLSPFSTQEEMSGLSFHIASLDESGVLNVWVVVELPKADIAGSISDLGLMPGGRVKLVHSALIQLGDSLSHKGNEFWGTTQTLNVKFLPSDPNHFIIGTDMGLISHGTRQDLRVAPKLFKPQQHGIRPVKVNVIDFSPFGEPIFLAGCSDGSIRLHQLSSAFPLLQWDSSTDSHAVTGLQWSPTRPAVFLVQDDTSNIYIWDLLQSDLGPVAKQQVSPNRLVAMAAVGEPEKAGGSFLALVLARASGSIDIQHLKRRWAAPEVDECNRLRLLLQEALWPEGKLHK

SEQ ID NO: 981 - DNA, 597 bp, Homo sapiens
atggcaccgcggccacacttctcagctctcagcactgtccccgcgacggaggagccgccccagcacagctctaagcgctgtccccccgacagaggagctgccccagtctcactctcagcgctgtccccgacaacggaggagccgtcccagtctcagctctcagcgctgtccccgacgacggaggagctgccccagtctcactctcagcgctgtccccccgacagaggagctaccccagtctcagctctcagcgctgtccccgacaacggaggagccgtcccagtctcagctctcagcgctgtcccccacgacggaggagccgccccactctcagctctcagcgctgtcccccacgacggaggagccaccccagtctcactctcagcgctgtcccccacgacggaggagccaccccagtctcactctcagcactgtcccccacgacggaggagccgccccagtctcagctctcagcgctgtccccgacgacggaggagccgccccagcacatccagcgacatggcaggggcaccatcctgggaggctccggacacaggagttacctggacccagcaggggaaacacagctgctgctaa

SEQ ID NO: 982 - protein, 198 aa, Homo sapiens
MAPRPHFSALSTVPATEEPPQHSSKRCPPDRGAAPVSLSALSPTTEEPSQSQLSALSPTTEELPQSHSQRCPPDRGATPVSALSAVPDNGGAVPVSALSAVPHDGGAAPLSALSAVPHDGGATPVSLSALSPTTEEPPQSHSQHCPPRRRSRPSLSSQRCPRRRRSRPSTSSDMAGAPSWEAPDTGVTWTQQGKHSCC

SEQ ID NO: 983 - DNA, 3958 bp, Homo sapiens
gtgcattgagcgcgctccagctgccgggacggagggggcggcccccgcgctcgggcgctcggctacagctgcggggcccgaggtctccgcgcactcgctcccggcccatgctggaggcggcggaaccgcggggacctaggacggaggcggcgggcgctgggcggcccccggcacgctgagctcgggatgcggacgctgctgcctcccgcgctgctgacctgctggctgctcgcccccgtgaacagcattcacccagaatgccgatttcatctggaaatacaggaggaagaaacaaaatgtgcagagcttctgaggtctcaaacagaaaaacacaaagcctgcagtggcgtctgggacaacatcacgtgctggcggcctgccaatgtgggagagaccgtcacggtgccctgcccaaaagtcttcagcaatttttacagcaaagcaggaaacataagcaaaaactgtacgagtgacggatggtcagagacgttcccagatttcgtcgatgcctgtggctacagcgacccggaggatgagagcaagatcacgttttatattctggtgaaggccatttataccctgggctacagtgtctctctgatgtctcttgcaacaggaagcataattctgtgcctcttcaggaagctgcactgcaccaggaattacatccacctgaacctgttcctgtccttcatcctgagagccatctcagtgctggtcaaggacgacgttctctactccagctctggcacgttgcactgccctgaccagccatcctcctgggtgggctgcaagctgagcctggtcttcctgcagtactgcatcatggccaacttcttctggctgctggtggaggggctctacctccacaccctcctggtggccatgctcccccctagaaggtgcttcctggcctacctcctgatcggatggggcctccccaccgtctgcatcggtgcatggactgcggccaggctctacttagaagacaccggttgctgggatacaaacgaccacagtgtgccctggtgggtcatacgaataccgattttaatttccatcatcgtcaattttgtccttttcattagtattatacgaattttgctgcagaagttaacatccccagatgtcggcggcaacgaccagtctcagtacaagaggctggccaagtccacgctcctgcttatcccgctgttcggcgtccactacatggtgtttgccgtgtttcccatcagcatctcctccaaataccagatactgtttgagctgtgcctcgggtcgttccagggcctggtggtggccgtcctctactgtttcctgaacagtgaggtgcagtgcgagctgaagcgaaaatggcgaagccggtgcccgaccccgtccgcgagccgggattacagggtctgcggttcctccttctcccgcaacggctcggagggcgccctgcagttccaccgcggctcccgcgcccagtccttcctgcaaacggagacctcggtcatctagccccacccctgcctgtcggacgcggcgggaggcccacggttcggggcttctgcggggctgagacgccggcttcctccttccagatgcccgagcaccgtgtcgggcaggtcagcgcggtcctgactccgtcaagctggttgtccactaaaccccatacctggaattggagtcgtgttgtcattgactcgatttaaactccagcatttagataatcttgtgcaaaatgtgtttcagccgtatagtggatccacttttttttttttttttttttgagacggagtcttgctctgtcgcccaggctggagtgcagtggcctgatctctgctccctgcaagctccgcctcccgggttcacgccattctcctgcctcagcctcccatagctgggactacaggcgcccgccaacacgcctggctaattttttgtatttttagtagagacagggtttcaccatgttagccaggatggtctcgatctcctgacctcgtgatgggcccgcctcggcctcccaaagtgctgggattaaggcgtgagccactgcgcccggcccaagagaataggggagccaaggaggaaatgtggaaacgcagttgtgtggcccagcacgagcctgggcgaccaccgggtgacatccgtcccacatcagggcggcctcccaggtcccataagggtagccccctcatctgcaggacagagggaagccagtcagggcccccccgacgttaggaccaggagaaatcaacaggagggcagcccgtcctctctcttggggcgcccacccggcccggctgagccctgccccacccaactccacagggctgttttgcctccccacggaaggcgggctgaggagacaaccagatcaggagagcaaggtcatgaaggaggggacctctccacacaggtgttccgtgggaccctcagcagctctggctctgcctcaggaggtcacctgccgccctgtgggagccgcagagcctgacgctcagccccaggccagctgcggccaggcctgcgggcccctggtgatggggttacgtggggtgcgggatacagctgagtgggaaccggaaacctattctctttttaacaaaaataatcttaggataagaattattttaacaacatataaaactgtttcaagccctcctccccagagctggcgctcagcagccctagcggctgctccttcaggcgaagggtggtttgcagatgtggggagggtgtctggggacgttgctgagctggctgcagaagggtggggatatcagggcacagtctccatgtgtgtgccaagccctggcccccacagcgctcgatggacctcagcaagctgcccagccctggcccaggtgccccgactgtgggactcagttgttctgagcacatttgactccacttttcctttaaaaatgaatgtcttgttcctgtgcattggtggcatcacagaccccagctggggcgcgatgtcaaaggtcgggacagctgtgccgggaggcagccacagggaagctcacacatcctgtcagtgtcaccttggtttgcaaaacccatatccccggtaaaatgaggccggacagaggggctgttaggacagcaaagcagcagtgtccagagacccctcaatccccaaaggtccgcaccctgtcctgcacaccctgggccacgccggccacacccctctgctgcaacaagctcatccctggacttctgggagaatgaacccgaggttggtttggggagacaggtgaggcggttggatctacagaacaacccaccatttctgggggccgcagaggatccatcacagacggatactggggagtaaacggcccaggccaggtgcccaggaaaggacggctgagcatgtggagcgagagggaggcaggtggacgctgcagaccccaggttcagtgcggcccctcggctgttcctcccctgtagggtttggacagacccacccccagccttgcccagctttcaaaggacaaaagggagcatcccccacctactctcaggtttttgaggaaacaaagatttgtggtaactgaaggtgttgggtcagtggccaggtgccgacactgagctgtgacccagaggggacgctgaggaagtgggcgtgagtggacatgtcaggtggttaccaggcactggttgttgatggtcggtggttgggtgtgggcagtcatcagtcatcaggtgtgctcaggggacaatctcccctcaaccgcacatgtgccactgttcagcggagctgactggtttctcctggtagagggccggctgtatcctgacagatgcctggtgagcaggggaagcaggacccagtggtcaacaggtgtctttaactgtcattgtgtgtggaatgtcgcagactcctccacgtggcgggaatgagctgtgtaaatacttcaataaagcctgacttcacatctgcaaaaaaaaaaaaaaaaaa

SEQ ID NO: 984 - protein, 438 aa, Homo sapiens
MRTLLPPALLTCWLLAPVNSIHPECRFHLEIQEEETKCAELLRSQTEKHKACSGVWDNITCWRPANVGETVTVPCPKVFSNFYSKAGNISKNCTSDGWSETFPDFVDACGYSDPEDESKITFYILVKAIYTLGYSVSLMSLATGSIILCLFRKLHCTRNYIHLNLFLSFILRAISVLVKDDVLYSSSGTLHCPDQPSSWVGCKLSLVFLQYCIMANFFWLLVEGLYLHTLLVAMLPPRRCFLAYLLIGWGLPTVCIGAWTAARLYLEDTGCWDTNDHSVPWWVIRIPILISIIVNFVLFISIIRILLQKLTSPDVGGNDQSQYKRLAKSTLLLIPLFGVHYMVFAVFPISISSKYQILFELCLGSFQGLVVAVLYCFLNSEVQCELKRKWRSRCPTPSASRDYRVCGSSFSRNGSEGALQFHRGSRAQSFLQTETSVI

SEQ ID NO: 985 - DNA, 3610 bp, Homo sapiens
agcggggtcttcccctgaggccgcgcggagctgggcgactggggcgaggactcgcgcacaggtaattaaccagaacaggatcgacacgtgttctctacagcccgtccatggatcctttccgaccatcgttcaggggccagtctcctatccacccatcccagtgccaggctgtacggatgccaggctgttggccacaagcttctaaacctttggacccagctctgggcaggggagcacctgcaggcagaggccatgtatttggaaagccagaggaaccaagcacacagagggggccagcacaaagggagtctgtgggtttggtctccatgttccgaggcctgggcattgaaacagtttctaagacccctctgaaacgggaaatgcttccatcaggtagaggcattttaggtcgaggcttgtctgctaatctggtacgcaaggacagggaggaactctctcccactttttgggatccaaaagtgttggcggctggggacagcaagatggcagagacctccgttggttggagtaggacgcttggaagagggagttcagatgcgtctttattaccactgggaagagcagcaggtggtatcagcagagaagtggacaagcctccctgtaccttcagcacaccgtcccggggtcccccgcagctgtcatcaccaccagctctgccccagtctcccctgcactctccagatcgccctctggtcctgactgtggaacacaaggaaaaagagcttattgtgaagcaaggatcaaaaggaacacctcagtctttgggactgaacctcgtcaaaatacagtgtcataatgaagcagtttatcaatatcatgtgactttcagccccaatgtggagtgcaaaagcatgaggttcggcatgttgaaggaccatcaagctgtcaccggcaacgtcactgcgtttgatggatctattctctatctgcctgttaagcttcaacaagttcttgagttaaaaagtcaaaggaaaacagacagtgctgaaatcagcattaagattcagatgacaaagatcctggagccctgctctgacctgtgcattcccttctacaatgttgttttccgtcgggtaatgaaacttttagatatgaagcttgtggggagaaacttttatgaccctacaagtgctatggtactacagcaacacagattgcagatctggccaggctatgcagctagcatccgaaggacagatggagggctcttcctgctagctgatgtctcccataaggtcattcggaatgactgtgtgctggatgtcatgcatgccatttatcagcagaataaagaacacttccaggatgagtgtactaagcttctggttggcaatattgttatcacccgatataacaatcgtacctatcgtattgatgatgtggattggaataagactccaaaggatagcttcacgatgtctgatgggaaagagatcacattcttggaatactacagcaaaaattatgggatcacagttaaggaagaggaccagccattgctgattcacaggcccagtgagagacaggataatcatgggatgctgctaaaaggggaaatcctgctgctgcctgagctttcttttatgaccggaatcccagagaagatgaagaaggacttcagagccatgaaggatttggctcagcaaatcaatctgagccccaagcaacaccatagtgctttggaatgcttgctgcaaagaattgcaaagaacgaggcagccaccaatgaactgatgcgttgggggctccgtctgcaaaaggatgtacataagattgaaggacgtgttctgccaatggaaagaattaacttaaaaaatacttcgtttatcacatctcaggaactaaactgggttaaggaagtaaccagagacccttccatcttgactatccccatgcatttctgggcacttttttacccaaagagagcaatggaccaggctcgagaactggtcaacatgttggagaagatagccggccccattggcatgcgtatgagcccaccggcctgggttgaactaaaggatgaccgaatagagacttatgtcagaaccattcaatccacgttaggagctgaggggaagatacagatggttgtttgcatcatcatgggcccacgtgatgatctctatggggccatcaagaagctgtgctgtgtgcagtccccagtgccctcccaggttgtcaatgttcgaaccattggtcagcccaccaggcttcggagtgtggcccagaagattttacttcagattaactgtaaattgggtggtgagctctggggagtggatattcctctgaaacagttaatggtgatcgggatggatgtttaccatgaccccagtagaggcatgcgctccgtggttggcttcgtggcaagcatcaatctcaccctcacaaaatggtattcccgggtggtgttccagatgccgcatcaggagattgtggacagcctgaagctatgcctcgtgggctccttaaaaaagttttatgaggtgaaccactgtctaccagagaagattgtggtgtaccgtgatggagtgtctgatggccaactgaagacagttgccaactatgagattcctcaactacagaagtgttttgaagcttttgagaattatcagcccaagatggtggtgtttgtagttcagaagaaaatcagtactaatctatatctggctgctcctcagaactttgtaactcccactcctggaactgtggtagatcatacaataacaagctgtgagtgggtggatttctatcttcttgcccatcatgtacggcagggctgtggcattcctacgcattatgtctgtgttctcaacaccgcaaacctgagccctgatcatatgcagaggctgactttcaaactgtgccacatgtactggaattggcctggcaccatcagagttccagctccttgcaagtatgcccacaagctagctttcctgtcaggacacatcttgcatcatgaaccagccatccagctgtgcgagaacctgttcttcctgtgactgcacagcttggagatgggctggtgagaagaaaggcggcctcagaactcagctgtgactcttgcagaatcaacagagactgaagtgggcttttgtgttataattttccctttctccaaccctgtagaataagatttctttcttgtcttttaaacctaatatcaccaagaagcaagtttctgagtaacagctgaaaatggccttgttgcctgtgtagagcaagttacggtggtactgccactctgcaggtggagcgggtgactctgggggaccattaagacctccagaccgggtgcggtggttcacacctgtaatccaagcactttgggaggccgaggcgggtggatcatgaggtcaggagatcaagaccatcctggccaacatggtgaaaccccgtctctactaaaatacaaaaaattagccgggtgtggcggtgcacgcctgtagtcccagctactcaggaggctaaggcaggagaatcgcttgaacccgggaggtggaggttgcagtgagccgagatcacgccactgcactccagcctgttgacaaagcaagactctgtctcaaaaaaaaaaaaaaaa

SEQ ID NO: 986 - protein, 973 aa, Homo sapiens
MDPFRPSFRGQSPIHPSQCQAVRMPGCWPQASKPLDPALGRGAPAGRGHVFGKPEEPSTQRGPAQRESVGLVSMFRGLGIETVSKTPLKREMLPSGRGILGRGLSANLVRKDREELSPTFWDPKVLAAGDSKMAETSVGWSRTLGRGSSDASLLPLGRAAGGISREVDKPPCTFSTPSRGPPQLSSPPALPQSPLHSPDRPLVLTVEHKEKELIVKQGSKGTPQSLGLNLVKIQCHNEAVYQYHVTFSPNVECKSMRFGMLKDHQAVTGNVTAFDGSILYLPVKLQQVLELKSQRKTDSAEISIKIQMTKILEPCSDLCIPFYNVVFRRVMKLLDMKLVGRNFYDPTSAMVLQQHRLQIWPGYAASIRRTDGGLFLLADVSHKVIRNDCVLDVMHAIYQQNKEHFQDECTKLLVGNIVITRYNNRTYRIDDVDWNKTPKDSFTMSDGKEITFLEYYSKNYGITVKEEDQPLLIHRPSERQDNHGMLLKGEILLLPELSFMTGIPEKMKKDFRAMKDLAQQINLSPKQHHSALECLLQRIAKNEAATNELMRWGLRLQKDVHKIEGRVLPMERINLKNTSFITSQELNWVKEVTRDPSILTIPMHFWALFYPKRAMDQARELVNMLEKIAGPIGMRMSPPAWVELKDDRIETYVRTIQSTLGAEGKIQMVVCIIMGPRDDLYGAIKKLCCVQSPVPSQVVNVRTIGQPTRLRSVAQKILLQINCKLGGELWGVDIPLKQLMVIGMDVYHDPSRGMRSVVGFVASINLTLTKWYSRVVFQMPHQEIVDSLKLCLVGSLKKFYEVNHCLPEKIVVYRDGVSDGQLKTVANYEIPQLQKCFEAFENYQPKMVVFVVQKKISTNLYLAAPQNFVTPTPGTVVDHTITSCEWVDFYLLAHHVRQGCGIPTHYVCVLNTANLSPDHMQRLTFKLCHMYWNWPGTIRVPAPCKYAHKLAFLSGHILHHEPAIQLCENLFFL

SEQ ID NO: 987 - DNA, 4627 bp, Homo sapiens
ccccggacgcagtgaggggggtcggcgcgcgtgtctacgcggacgcaccggctaagctgcttctgccgccgccggccgcctgggaccttgcggtgaggctgcgcggggccgaggccgcctccgagcgccaggtttattcagtcaccatgaagctgctgctgctgcacccggccttccagagctgcctcctgctgaccctgcttggcttatggagaaccacccctgaggctcacgcttcatccctgggtgcaccagctatcagcgctgcctccttcctgcaggatctaatacatcggtatggcgagggtgacagccccactctgcagcagctgaaggccctactcaaccacctggatgtgggagtgggccggggtaatgtcacccagcacgtgcaaggacacaggaacctctccacgtgctttagttctggagacctcttcactgcccacaatttcagcgagcagtcgcggattgggagcagcgagctccaggagttctgccccaccatcctccagcagctggattcccgggcctgcacctcggagaaccaggaaaacgaggagaatgagcagacggaggaggggcggccaagcgctgttgaagtgtggggctttggttttctcagtgtctcactgattaacctggcctctctcctgggagtcctcgtcctgccctgcacagagaaagcgtttttcagccgtgtgctcacttacttcatcgccctgtccattggaacgctgctgtctaacgcgctattccagctcatcccagaggcatttggtttcaaccctctggaagattattatgtctccaagtctgcagtggtgtttgggggcttttatcttttctttttcacagagaagatcttgaagattcttcttaagcagaaaaatgagcatcatcatggacacagccattatgcctctgagtcgcttccctccaagaaggaccaggaggagggggtgatggagaagctgcagaacggggacctggaccacatgattcctcagcactgcagcagtgagctggacggcaaggcgcccatggtggacgagaaggtcattgtgggctcgctctctgtgcaggacctgcaggcttcccagagtgcttgctactggctgaaaggtgtccgctactctgatatcggcactctggcctggatgatcactctgagcgacggcctccataatttcatcgatggcctggccatcggtgcttccttcactgtgtcagttttccaaggcatcagcacctcggtggccatcctctgtgaggagttcccacgtgagctaggagactttgtcatcctgctcaacgctgggatgagcatccaacaagctctcttcttcaacttcctttctgcctgctgctgctacctgggtctggcctttggcatcctggccggcagccacttctctgccaactggatttttgcgctagctggaggaatgttcttgtatatttctctggctgatatgttccctgagatgaatgaggtctgtcaagaggatgaaaggaagggcagcatcttgattccatttatcatccagaacctgggcctcctgactggattcaccatcatggtggtcctcaccatgtattcaggacagatccagattgggtagggctctgccaagagcctgtgggactggaagtcgggccctgggctgcccgatcgccagcccgaggacttaccatccacaatgcaccacggaagaggccgttctatgaaaaactgacacagactgtattcctgcattcaaatgtcagccgtttgtaaaatgctgtatcctaggaataagctgccctggtaaccagtctctagctagtgcctcttgccctctcctcacctccttttctctcagtgactctggaacctgaatgcagcttacaagacaagcctgacttttttctctgattaccttggcctcctcttggaaccagtgctgaaaggttttgaatcctttacccaacaatgcaaaaatagagccaatggttataacttggctagaaatatcaagagttgaatccatagtgtggggcccatgactctagctgggcaccttggacctccagctggccaatagaagagacaggagacaggaagccttcccattttttcaaagtctgtttaattgcctattacttctctcaaagagaacctgaagtcagaacacatgagcagggtgagaggtgaggcaaggttcatcctgaatgggagaggaagtcgaaccactgctgtgtgtcttgtcaggatgctcacttgttcctactgagatgctggatattgattttgtaacagcacctggtgtttcacggctgtccgagtgagctaacgtggcggtgtggctgcctggacctcctctttcaggttaacgctgacagaatggaggctcaggctgtctgcaagaaaacagttggtttggctgtgattttgacctcctcttccccactgccatcttctaagagactttgtagctgcctcctagaagcacattctgagcacatttgagacctctgtgttagaggggagactgcacaaactatcctcccccaggttgagacgtctgcagagtggcaagctgacttgtagaaatggggtgccatttatgctctacttagacaagggtaatcagaaatggaatcagtgcaggcaaaatttaggatttgccgcttccataaatcaaagcatgactaatagggggtctctgaaatgtaagggcacaaacttcacttagggcatcgcagatgtttgcagaatggttggcctaatgattatgctacagatgggttttaaatgacccgtctaggttactgcttccttgcaaaaaagtcgaatcctgcattgaattgaatatgaatttctctaactctctccagaaaatggatggagataacttgtctttaaaactgtaggccagccttggccactgtggagcccttgcctccgagctctggcttcaaggggagctcttctccaggttcactaggtgaattgatttattattatcatattgataatgtgagattctttagccactttggggagcctgtccctccagaagcctttcttagtggtgcccacagttggagcccaggggccatgtttgcaaactgattcatgtgcatggctgacaggagtactggttcactaccaatgcctgagcttttctcttacatagaaaaactgtccgctctcagtaatcacaagcagcatccgttttgttttctcttcttgggagacatctgtcaaaccaggaatattcttgaaaagaacgtgagcaggaaaaactgctggtgatactttttttaagttttgtttttatcttgcctgttggcttcaatacatttgagaatacgctgaagagggaaaatttcagtgatggagattctagattaaatatcaggactgatttcctggtgggattatggtccagttttaccaaagaaccaattccttgaatgttggaatctaactttttatattgtcattattattgttgtttttaaacggttctttgtcttttctgttttatttttctcaagctgctttcaggagctagcagaaaataactcaaagttgaagactctggaagattttgctttaacctaactcgcattgatgtattaaatttataattttagcattcccaatagatcctatcattccttaaacataataccctttgtcttggagtagaatactaagttagagttagtggatttctagtttaggagaggagctcaaaactataatctttaacaaattgaaaaatgaaatagggtgttttccctttttgtgcacacctatattaccttaagaaatttccttccatagacagctgcctcaaagggaaatcctctttaaaccgtagttggcgcagaggtcagtcctagtcggagcttaggaggggcggagacgctcacatcgtctgacttgagtcgccactgattgtggcaacagctttgcctcatgagtcaaaaattggcaatttcttttgatttttagttgttgaatttgctgtttcaagcatttgtacatattagaagtctaaggagtagcaagtcagtgggaggactttttcacccctggcattagcagcttcgacctcattttccagatgcaccagctcctattaataagttagcaaggaaagtgtatgtcacgtgcaggaacagtgaggcagggacaggggttctgctccttctcacttcaccaccggcacacagcttgcccctgtctttgcccccaaaggtattttgtgtctagtgtcaaattggagctattcttcactggtccttaaccttgggttttaaaaagaaggcttctctgtttgggtagcgtaagagctgagtatagtaagtcctcttccaaagagatggcaatatgctgggcatctactttaaaacaaagttgtctgatttttgcaagagaggttaggattttattgttcttatttccctttacagttctgcagttccatcacagtatttttttaaataactcaggtgtatgagaagaaattagaaaagaaaattaacttatgtggactgtaaatgttttatttgtaagattctataaataaagctatattctgtaattgttgagaaaaaaaaaaaaaaaaaa

SEQ ID NO: 988 - protein, 492 aa, Homo sapiens
MKLLLLHPAFQSCLLLTLLGLWRTTPEAHASSLGAPAISAASFLQDLIHRYGEGDSPTLQQLKALLNHLDVGVGRGNVTQHVQGHRNLSTCFSSGDLFTAHNFSEQSRIGSSELQEFCPTILQQLDSRACTSENQENEENEQTEEGRPSAVEVWGFGFLSVSLINLASLLGVLVLPCTEKAFFSRVLTYFIALSIGTLLSNALFQLIPEAFGFNPLEDYYVSKSAVVFGGFYLFFFTEKILKILLKQKNEHHHGHSHYASESLPSKKDQEEGVMEKLQNGDLDHMIPQHCSSELDGKAPMVDEKVIVGSLSVQDLQASQSACYWLKGVRYSDIGTLAWMITLSDGLHNFIDGLAIGASFTVSVFQGISTSVAILCEEFPRELGDFVILLNAGMSIQQALFFNFLSACCCYLGLAFGILAGSHFSANWIFALAGGMFLYISLADMFPEMNEVCQEDERKGSILIPFIIQNLGLLTGFTIMVVLTMYSGQIQIG

SEQ ID NO: 989 - DNA, 2221 bp, Homo sapiens
cacgagggcccgggccgcgagcagccgcggctgtcccggtcgccacccttagcagcggtcgaggtcggtgccgaagcggtgttccccgccttagccgctggcgcctcccaagagagcggccggtgggccctcgtcctgtcagtggcgtcggaggccggcgctgcggtggccgcgcccttctggtgctcggacaccgctgaggagccggggccgggcacggctggctgacggctccgggcagctaaggctgcccgaggagaaggcggcggccgcggcgtaggcgcacgtccggcgggctcctggagcctggaggaggccgaggggaccatgtccgggaggcgcttccacctctccaccaccgaccgcgtcatcaaagctgtcccctttcctccaacccaacggcttactttcaaggaagtatttgagaatgggaaacctaaagttgatgttttaaaaaaccatttggtaaaggaaggacgactggaagaggaagtagccttaaagataatcaatgatggggctgccatcctgaggcaagagaagactatgatagaagtagatgctccaatcacagtatgtggtgatattcatggacaattctttgacctaatgaagttatttgaagttggaggatcacctagtaacacacgctacctctttctgggtgactatgtggacagaggctatttcagtatagagtgtgtgctgtatttatggagtttaaagattaatcatcccaaaacattgtttctgcttcggggaaatcatgaatgcaggcatcttacagactatttcaccttcaaacaggaatgtcgaatcaaatattcggaacaggtgtatgatgcctgtatggagacatttgactgtcttcctcttgctgccctcttaaaccagcagtttctctgtgtacatggaggaatgtcacctgaaattacttctttagatgacattaggaaattagacaggtttacggaacctcccgcctttggacctgtgtgtgacctgctttggtctgatccctcagaggattatggcaatgagaagaccttggagcactatacccacaacactgtccgagggtgctcttatttctacagttaccctgcagtttgtgaatttttgcagaacaataatttactatcaattatcagagcccatgaagcccaagatgctgggtatcgaatgtacaggaagagccaagccacaggctttccatcacttattacaattttctctgcccccaattacctagatgtctataacaataaagctgctgtgttgaaatatgaaaacaatgtcatgaatatcaggcagtttaactgttctccacacccctactggcttccaaactttatggatgttttcacatggtctttgccttttgttggggaaaaagtcacagagatgctggtaaatgtgctcaacatatgctctgatgacgaactgatttctgatgatgaagcagaaggaagcactacagttcgtaaggagatcatcaggaataagatcagagccattgggaagatggcacgggtcttttcaattcttcggcaagaaagtgagagtgtgctgactctcaagggcctgactcccacaggcacactccctctgggcgtcctctcaggaggcaagcagactatcgagacagccacagtagaagcggtagaggcccgggaagccatcagagggttctcgcttcagcacaagatccggagttttgaagaagcgcgaggtctggaccgaattaatgagcgaatgccaccccgaaaggatagcatacacgctggtgggccaatgaaatctgtaacctcagcacactcacatgctgcgcacaggagcgaccaagggaagaaagcccattcatgacttagagtcctgccgtggctcaggtggatctaaaactcaagaacaaattctatttatttattattggaaaatgaaaagcaactcaaaacaacttcaacctggaggtgcatttataattcagtctgcatttattctgtaaaaaggtgactgttttataaattcttttaatttatgttcaatatatataaaaagtgcatctgttttgtttttcccttttttctccataattttaagaaatgaatctgattgttgtcaacacatttgtgaagtcttgtgctataaaggggaacttcccctaataaaagggccttggaaacctcaaaaaaaaaaaaaaaaaaaaaaaaaaaaaaaaaaa

SEQ ID NO: 990 - protein, 512 aa, Homo sapiens
MSGRRFHLSTTDRVIKAVPFPPTQRLTFKEVFENGKPKVDVLKNHLVKEGRLEEEVALKIINDGAAILRQEKTMIEVDAPITVCGDIHGQFFDLMKLFEVGGSPSNTRYLFLGDYVDRGYFSIECVLYLWSLKINHPKTLFLLRGNHECRHLTDYFTFKQECRIKYSEQVYDACMETFDCLPLAALLNQQFLCVHGGMSPEITSLDDIRKLDRFTEPPAFGPVCDLLWSDPSEDYGNEKTLEHYTHNTVRGCSYFYSYPAVCEFLQNNNLLSIIRAHEAQDAGYRMYRKSQATGFPSLITIFSAPNYLDVYNNKAAVLKYENNVMNIRQFNCSPHPYWLPNFMDVFTWSLPFVGEKVTEMLVNVLNICSDDELISDDEAEGSTTVRKEIIRNKIRAIGKMARVFSILRQESESVLTLKGLTPTGTLPLGVLSGGKQTIETATVEAVEAREAIRGFSLQHKIRSFEEARGLDRINERMPPRKDSIHAGGPMKSVTSAHSHAAHRSDQGKKAHS

SEQ ID NO: 991 - DNA, 2027 bp, Homo sapiens
ctaggaccccgcgtcccgcccgctctcctcccctcccgagccgcgaacttttccggaggcggcggcctcggctgccgctgggtcccggggtcgcgggccctgattgcgccgtttccccgcgcagagctcgccggcgccccgacgggccccggagcagcggcccccggccggcccggcctcagcctggagctccagctacccacatgcaccttacctgggttccgcccggtccctgagtccccacaaaatggctgatggaggaagccccttcctaggtcggagggactttgtctacccttcctcaacccgagaccctagtgcctctaacggagggggcagcccagccaggagggaagagaagaagagaaaggccgccaggctcaagtttgacttccaggcgcagtcccccaaggagctgactctgcagaagggtgacattgtctacatccacaaggaggtggacaagaactggctggagggagagcaccacggccgcctgggcatcttccctgctaattatgtggaggtgctgcccgcagatgagatccctaagcccatcaagcccccgacctaccaggtgctggagtatggagaggctgtggcccagtacaccttcaagggggacctggaggtggagctgtccttccgcaagggagagcacatctgcctgatccgcaaggtgaacgagaactggtacgagggacgcatcacgggcacggggcgccaaggcatattccctgccagctacgtgcaggtgtctcgtgaaccccggctccggctctgtgacgacggcccccagctccccacgtctccccgcctgaccgctgccgcccgctcagcccgtcaccccagctccccctcagccctgcgcagcccagctgaccccatcgacttggggggacagacctccccccgtcgcactggcttctccttccccacccaggagcctagaccccagacccagaatcttggcacccctggtccagctctgtcccactctcgaggtcccagccatcccctggacctggggacctcctctcctaacacctctcagatacactggaccccgtaccgggcgatgtaccagtacaggccccagaacgaagacgagctggagctgcgcgagggggacagggtggatgtcatgcagcagtgtgacgatggctggtttgtgggtgtctcccggaggacccagaaattcggaacgttccctggaaattacgttgccccggtgtgagtggtctccatggcaacttggagccagccaggatggggtggggagcggtggcactcgtgggagggagaggacccccgcccacatcctccttccccaggacctgagctcccagcatctgcagacgacccccgcagcatttccctcggacccccctcgaagccccctggactgattcccacccacgactcacaggcattcctcccacagccctttcatttcctccccaccccactccccaaatacagaggtctgctttgaagcggagaccatttccaggccttattgagaccagaccccaagtcccccacccccatcctgctccagcgtttcctctaacagggaccagctctccgctttgcccccacggggttcctctaaccagaaccagcttcctagcctcgtagagaccaaaggccgcccccgcctgctggggttcctcccagcaccccagcttgctggctgccctctttgccttctggcctccagctgggtgtgggggggcggagcaaggcgggggacagacgcagcaccttcttagcgatctaggcctggcaagagctctggccccaaggcctcctcttcccaggggctgccaagtcctggccctggccctggcatatcaccccgcactgtggggccaggcaccactagcctggctcaaatattccccagggagactgctgtgtgctgcccgcctgcctgctggctctcccccagccccacatcccctctggaagagaatgtaaaataaacctggacacaagggaaaaaaaaaaaaaaaaaaaaaaaa

SEQ ID NO: 992 - protein, 329 aa, Homo sapiens
MADGGSPFLGRRDFVYPSSTRDPSASNGGGSPARREEKKRKAARLKFDFQAQSPKELTLQKGDIVYIHKEVDKNWLEGEHHGRLGIFPANYVEVLPADEIPKPIKPPTYQVLEYGEAVAQYTFKGDLEVELSFRKGEHICLIRKVNENWYEGRITGTGRQGIFPASYVQVSREPRLRLCDDGPQLPTSPRLTAAARSARHPSSPSALRSPADPIDLGGQTSPRRTGFSFPTQEPRPQTQNLGTPGPALSHSRGPSHPLDLGTSSPNTSQIHWTPYRAMYQYRPQNEDELELREGDRVDVMQQCDDGWFVGVSRRTQKFGTFPGNYVAPV

SEQ ID NO: 993 - DNA, 3145 bp, Homo sapiens
ctccggcccagccccggcccgcagtccagatccgagacccaaactccgcccgccccgccgcgcgactctcacggtccggcctccggcgcgcgccccttcggcctccctcttcctgcgccggcgcccggcccggcccggcccgtcctgacccggtcacgagggccgcgacggcccgcgcttctccttgcccttcctcctcgagcgcccgcgccaggcagcagccgggcagggatgctcctgcgctcccgggcggcctcgggcccagccacctgctcgccggggaagaggacacgcagaggagcagctggcttgcccggagtcctcccaccttgacccaagcatgcagggcccaccccgcagcctccgcgctgggctcagcctggacgacttcatccctggccacctccagtcccacatagggtcttcctcccgggggacacgggtgcccgtgatccggaatggtggctccaacacccttaatttccagttccacgaccccgcgcccaggactgtgtgcaatgggggctacacaccaagacgagatgcttcccagcacccggaccctgcgtggtatcagacctggccaggccctgggagcaagccctctgcaagcacaaagatccctgcctcccagcacacccagaactggtcagccacgtggaccaaggacagcaagcgtcgggacaagcgctgggtcaagtacgagggaatcgggcccgtggacgagagcggcatgcccattgccccccgatccagcgttgacagacccagagactggtaccggagaatgttccagcagattcaccggaaaatgccagacttgcagctggactggaccttcgaggagccacccagagaccccaggcatctaggagcccagcaaagacctgcccacaggcccggcccggcaacatcttccagtggaagaagctgggaccactctgaagagttacctagaagcaccttcaactacagacctggagcattctccactgtgctgcagccctcaaatcaggtgctcagacgccgggaaaaagtagacaacgtctggacggaagagtcctggaaccagtttctgcaggaactagagactgggcagaggcccaagaaaccgctggtggacgaccctggtgagaagccctcccagcccattgaggtgctgctggagagagagctggccgagctgagcgccgagctggacaaggacctgcgggcaattgagacccgactgccgtcccccaagagctcgccggcgccccgacgggccccggagcagcggcccccggccggcccggcctcagcctggagctccagctacccacatgcaccttacctgggttccgcccggtccctgagtccccacaaaatggctgatggaggaagccccttcctaggtcggagggactttgtctacccttcctcaacccgagaccctagtgcctctaacggagggggcagcccagccaggagggaagagaagaagagaaaggccgccaggctcaagtttgacttccaggcgcagtcccccaaggagctgactctgcagaagggtgacattgtctacatccacaaggaggtggacaagaactggctggagggagagcaccacggccgcctgggcatcttccctgctaattatgtggaggtgctgcccgcagatgagatccctaagcccatcaagcccccgacctaccaggtgctggagtatggagaggctgtggcccagtacaccttcaagggggacctggaggtggagctgtccttccgcaagggagagcacatctgcctgatccgcaaggtgaacgagaactggtacgagggacgcatcacgggcacggggcgccaaggcatattccctgccagctacgtgcaggtgtctcgtgaaccccggctccggctctgtgacgacggcccccagctccccacgtctccccgcctgaccgctgccgcccgctcagcccgtcaccccagctccccctcagccctgcgcagcccagctgaccccaccgacttggggggacagacctccccccgtcgcactggcttctccttccccacccaggagcctagaccccagacccagaatcttggcacccctggtccagctctgtcccactctcgaggtcccagccatcccctggacctggggacctcctctcctaacacctctcagatacactggaccccgtaccgggcgatgtaccagtacaggccccagaacgaagacgagctggagctgcgcgagggggacagggtggatgtcatgcagcagtgtgacgatggctggtttgtgggtgtctcccggaggacccagaaattcggaacgttccctggaaattacgttgccccggtgtgagtggtctccatggcaacttggagccagccaggatggggtggggagcggtggcactcgtgggagggagaggacccccgcccacatcctccttccccaggacctgagctcccagcatctgcagacgacccccgcagcatttccctcggacccccctcgaagccccctggactgattcccacccacgactcacaggcattcctcccacagccctttcatttcctccccaccccactccccaaatacagaggtctgctttgaagcggagaccatttccaggccttattgagaccagaccccaagtcccccacccccatcctgctccagcgtttcctctaacagggaccagctctccgctttgcccccacggggttcctctaaccagaaccagcttcctagcctcgtagagaccaaaggccgcccccgcctgctggggttcctcccagcaccccagcttgctggctgccctctttgccttctggcctccagctgggtgtgggggggcggagcaaggcgggggacagacgcagcaccttcttagcgatctaggcctggcaagagctctggccccaaggcctcctcttcccaggggctgccaagtcctggccctggccctggcatatcaccccgcactgtggggccaggcaccactagcctggctcaaatattccccagggagactgctgtgtgctgcccgcctgcctgctggctctcccccagccccacatcccctctggaagagaatgtaaaataaacctggacacaaggaaaaaaaaaaaaaaaaaaaaaaaa

SEQ ID NO: 994 - protein, 671 aa, Homo sapiens
MQGPPRSLRAGLSLDDFIPGHLQSHIGSSSRGTRVPVIRNGGSNTLNFQFHDPAPRTVCNGGYTPRRDASQHPDPAWYQTWPGPGSKPSASTKIPASQHTQNWSATWTKDSKRRDKRWVKYEGIGPVDESGMPIAPRSSVDRPRDWYRRMFQQIHRKMPDLQLDWTFEEPPRDPRHLGAQQRPAHRPGPATSSSGRSWDHSEELPRSTFNYRPGAFSTVLQPSNQVLRRREKVDNVWTEESWNQFLQELETGQRPKKPLVDDPGEKPSQPIEVLLERELAELSAELDKDLRAIETRLPSPKSSPAPRRAPEQRPPAGPASAWSSSYPHAPYLGSARSLSPHKMADGGSPFLGRRDFVYPSSTRDPSASNGGGSPARREEKKRKAARLKFDFQAQSPKELTLQKGDIVYIHKEVDKNWLEGEHHGRLGIFPANYVEVLPADEIPKPIKPPTYQVLEYGEAVAQYTFKGDLEVELSFRKGEHICLIRKVNENWYEGRITGTGRQGIFPASYVQVSREPRLRLCDDGPQLPTSPRLTAAARSARHPSSPSALRSPADPTDLGGQTSPRRTGFSFPTQEPRPQTQNLGTPGPALSHSRGPSHPLDLGTSSPNTSQIHWTPYRAMYQYRPQNEDELELREGDRVDVMQQCDDGWFVGVSRRTQKFGTFPGNYVAPV

SEQ ID NO: 995 - DNA, 1419 bp, Homo sapiens
atgccgggaggccggagaccagcccgtgggagaggagtttacacacacccaggacggtctgtgggaggaggggggccagagtgtgaacgcaaggaggctgagacgcgggcacagacagcagcctggcagccagaggccaagtggagacccaacgagaggcggctctatggccttgaggtccccggagagagggttgccagggcccctgcgggtccccctttgcgggcattccaggcagagaagttctgcgctgccgagaagccagcgttcaggaagggagttggcgggcaggagggtggccttggtttgggatttgtgggtgtcaaggccgcatctgcgccagcctcccagcctggagtgggtggaggagccaggcggaccgcagacacacccaggcagcccaccctgcccaggacctggggatgcggggcgggagagcgcggccggcgtgggagagctttatggggctgccccctcgatcgtctgcgaagtggggcgcggggcagtccctggaccggctctgctgtgctccgggcagtcgggggcttgcgggcgctccggggaggatgcgggcaccaccggctggacggtcgcagcctgcagggggccctggggacagcctgcctcatccccccggcgggctcgggccaggtggcagcgcctgggctcgccgcgcggaggcggcggcttctcgggctaggggcggcggcaggggcggccccgggatcacatgggcggaggcaggtccgggagccccgggcgggctctccccagagtcgggtagacggcagcgggagcggtggcgtctccccgccttccctccctcccgggcctgggcgcccagccggacaggtgagcggcagccaggtgagcgcgcccacctgcgcctctccgcgcggcccgccctccccggcgccgggctcctctccgcgcccctgtcggcgcggaaccctggcctcgtccgcggcccagctccctggagcctcgcatcagcgggggcgcccccgcgagctgcgctctccccggccggagcgctcctcctccagcccccagcccgcagggtactttgccctcggagcgaaggaggctccagaactggtagagccgggccatcgggctgggcacctccccgcggcgcccgcagcgcggagtccactgaccggctcaaaggtctgggaatctcggggcggccgcgagccggcctcggggactggggtgggggcggtgctgggaacagaggctaggcctgggcccaaggggaaggcagccggggatggagcggacagaccgctggtgctcttgatagattctcgcagcacttgcgtccccagggcagccccaggatgggtgctgggcagggtggtgcccagcctggcaccgcggcttcctgcctggattggctcctggctccagagctag

SEQ ID NO: 996 - protein, 472 aa, Homo sapiens
MPGGRRPARGRGVYTHPGRSVGGGGPECERKEAETRAQTAAWQPEAKWRPNERRLYGLEVPGERVARAPAGPPLRAFQAEKFCAAEKPAFRKGVGGQEGGLGLGFVGVKAASAPASQPGVGGGARRTADTPRQPTLPRTWGCGAGERGRRGRALWGCPLDRLRSGARGSPWTGSAVLRAVGGLRALRGGCGHHRLDGRSLQGALGTACLIPPAGSGQVAAPGLAARRRRLLGLGAAAGAAPGSHGRRQVREPRAGSPQSRVDGSGSGGVSPPSLPPGPGRPAGQVSGSQVSAPTCASPRGPPSPAPGSSPRPCRRGTLASSAAQLPGASHQRGRPRELRSPRPERSSSSPQPAGYFALGAKEAPELVEPGHRAGHLPAAPAARSPLTGSKVWESRGGREPASGTGVGAVLGTEARPGPKGKAAGDGADRPLVLLIDSRSTCVPRAAPGWVLGRVVPSLAPRLPAWIGSWLQS

SEQ ID NO: 997 - DNA, 1857 bp, Homo sapiens
agagtcgggtagacggcagcgggagcggtggcgtctccccgccttccctccctcccgggcctgggcgcccagccggacaggtgagcggcagccaggtgagcgcgcccacctgcgcctctccgcgcggcccgccctccccggcgccgggctcctctccgcgcccctgtcggcgcggaaccctggcctcgtccgcggcccagctccctggagcctcgcatcagcgggggcgcccccgcgagctgcgctctccccggccggagcgctcctcctccagcccccagcccgcagggtactttgccctcggagcgaaggaggctccagaactggtagagccgggccatcgggctgggcacctccccgcggcgcccgcagcgcggagtccactgaccggctcaaaggtatggcgttgacggtggatgtggccgggccagcgccctggggcttccgtatcacagggggcagggatttccacacgcccatcatggtgactaaggtggccgagcggggcaaagccaaggacgctgacctccggcctggagacataatcgtggccatcaacggggaaagcgcggagggcatgctgcatgccgaggcccagagcaagatccgccagagcccctcgcccctgcggctgcagctggaccggtctcaggctacgtctccagggcagaccaatggggacagctccttggaagtgctggcgactcgcttccagggctccgtgaggacatacactgagagtcagtcctccttaaggtcctcctactccagcccaacctccctcagcccgagggccggcagccccttctcaccaccaccctctagcagctccctcactggagaggcagccatcagccgcagcttccagagtctggcatgttccccgggcctccccgctgctgaccgcctgtcctactcaggccgccctggaagccgacaggccggcctcggccgcgctggcgactcggcggtgctggtgctgccgccttccccgggccctcgttcctccaggcccagcatggactcggaagggggaagcctcctcctggacgaggactcggaagtcttcaagatgctgcaggaaaatcgcgagggacgggcggccccccgacagtccagctcctttcggctcttgcaggaagccctggaggctgaggagagaggtggcacgccagccttcttgcccagctcactgagcccccagtcctccctgcccgcctccagggccctggccacccctcccaagctccacacttgtgagaagtgcagtaccagcatcgcgaaccaggctgtgcgcatccaggagggccggtaccgccaccccggctgctacacctgtgccgactgtgggctgaacctgaagatgcgcgggcacttctgggtgggtgacgagctgtactgtgagaagcatgcccgccagcgctactccgcacctgccaccctcagctctcgggcctgagcccgccatgccctcagcctgcctcactgctgggccagggtcatgcctatataagttggcatggcagggacaatggtgggcagttgctcttacatgagctaagtttggagacctgaggcccctttgtcctcgctgggtgggccaaggtctgggacctgtcttggactgtgggagactcaccctcaccttgccaggcctctcccctgcaggactggcattgcactagtctgaggtggccactgcctttgatcaacctttgtgtgcgagggtctaagtagggtcgaacacagaagtgggaaggagaggggtgggccaggggctaatggtgtcactgtgtaaagtttttgacatactagctctataaatatatgaatatggacaaaataaaaaaaaaaaaa

SEQ ID NO: 998 - protein, 352 aa, Homo sapiens
MALTVDVAGPAPWGFRITGGRDFHTPIMVTKVAERGKAKDADLRPGDIIVAINGESAEGMLHAEAQSKIRQSPSPLRLQLDRSQATSPGQTNGDSSLEVLATRFQGSVRTYTESQSSLRSSYSSPTSLSPRAGSPFSPPPSSSSLTGEAAISRSFQSLACSPGLPAADRLSYSGRPGSRQAGLGRAGDSAVLVLPPSPGPRSSRPSMDSEGGSLLLDEDSEVFKMLQENREGRAAPRQSSSFRLLQEALEAEERGGTPAFLPSSLSPQSSLPASRALATPPKLHTCEKCSTSIANQAVRIQEGRYRHPGCYTCADCGLNLKMRGHFWVGDELYCEKHARQRYSAPATLSSRA

SEQ ID NO: 999 - DNA, 4611 bp, Homo sapiens
aagcccctgagtagctgctccgggagctgtggtgccctctccttctccctttggctcctctcctgctgccttacagtgcccccagagccggctaggggcatggacttcacctcctggtcctctcttcctcaggtatggcgttgacggtggatgtggccgggccagcgccctggggcttccgtatcacagggggcagggatttccacacgcccatcatggtgactaaggtggccgagcggggcaaagccaaggacgctgacctccggcctggagacataatcgtggccatcaacggggaaagcgcggagggcatgctgcatgccgaggcccagagcaagatccgccagagcccctcgcccctgcggctgcagctggaccggtctcaggctacgtctccagggcagaccaatggggacagctccttggaagtgctggcgactcgcttccagggctccgtgaggacatacactgagagtcagtcctccttaaggtcctcctactccagcccaacctccctcagcccgagggccggcagccccttctcaccaccaccctctagcagctccctcactggagaggcagccatcagccgcagcttccagagtctggcatgttccccgggcctccccgctgctgaccgcctgtcctactcaggccgccctggaagccgacaggccggcctcggccgcgctggcgactcggcggtgctggtgctgccgccttccccgggccctcgttcctccaggcccagcatggactcggaagggggaagcctcctcctggacgaggactcggaagtcttcaagatgctgcaggaaaatcgcgagggacgggcggccccccgacagtccagctcctttcggctcttgcaggaagccctggaggctgaggagagaggtggcacgccagccttcttgcccagctcactgagcccccagtcctccctgcccgcctccagggccctggccacccctcccaagctccacacttgtgagaagtgcagtaccagcatcgcgaaccaggctgtgcgcatccaggagggccggtaccgccaccccggctgctacacctgtgccgactgtgggctgaacctgaagatgcgcgggcacttctgggaggacgcttgtgctatggagggaatgagattgtcactggaagctttggaggggatggtggagggcgccaagcggagggacaggaggaagaccaggagacccatccagccaagctggtgagacaacctctgatcctgaggaccggccgcccaccaagggttgggcccccggggccaggttgatctaccgacaccttccacttctttcctgggagagactgctggcttcattggtgattgatttggaggggggaaaaagggcagggtggctcaggctttaggcccaggtactggggaggcctgaggagccctcctggagctcaggaggccgaggctgccttgagctgtgatcgtgccactgcattccagcctgggagagagagaggacctgtctgttgaaaaaaacacaaaaacaaatgaatgcatgtggccagtgccaggtgagctgccctgggggttcactggagttgaggcaggggacagtagtctcccctgccagcctaggattttgggcgtcattcacccactacccctagtgctagtcccagaggatgctgcggagggggcagcctcagctctcttttcagagaagatcaaagctgggcttcccagggtgcctggctggtccctgccggcagctttgtgctctccggctctttgtgaaaggaatcttggcgcagatgtttgtgttgcctcctcaggcacctgtagatataatttacaccatgatatcattgtctcaccttttgcctgggtggctgcctgagaaaggtctttctttttatagaaaagatcaaggctgtctggcgcgggactccatgagccccaggcgctggtcagaaacggggtagtctctttggcgccacctagtgtccagtttggcccatggcggggcccattcacggggcaacactgggcttctgggcacagcgggaatacagaaagatacagcactcctcatgccttcctggaggtagaaggccagtggcagcgactgagctggcatgaatgaataagaggatgtggcactgagcgccaagggctaccttggaacgcaccgaggagcgtcccgtgagttcaaagcagtggccgtgatgcaaaaggagggctgggtcttggagacgtggagaagaggaatgctgagtgatggggtggctgctggggggatgcttagctcagagcagtggctgatggggacactgagataagatcggaggggagctgtcaatgccagaagtggtttgaacttccccttgaggctctagggacattttgttttgagacatggtcttgctctattgcccaggctggagtgcagtggtacagtcttagctcactgcagcctccacctcccaggctcaagagatcctcccacagcctcccaggtagctgggactacaggcgtgcaccaccacacccagctaatttttaagtttttttttttttttaagagatggggtctcactatgttgcccaggctggtctcgaacttcgggccccaagccatcctcccaccttggctttccaaagtgttgggattacaagcgtgagctaaccttgcccagcctctgggaacacttggaaggttttaagcagagaagtgacaggttggaaaagatggtttggattattgatatggacagattcccacctgtatgtagcacgccatgctgggccagcagtgtcataggagtggagggggataagtggggactggggacatgtgaaatgatgggcattccagtgaggcatcgaatgccttctgagggctttgtaggttccagctcaaatccccctctggctcttgttctttggtgtggcagccatctctcctcccaggggtcctgagggtttcagcaccagggttctctgcagccacacaatcagcccggctcgggagcaaactcccctggaagaacggagttatgagttggtcagcagaggaggctggggacaggcagtttttggtcttttacctctgatcttgtccccaacctaagccagctagctgcgtgctcccactccctctgccgcacgccgcccgtctatgttcccggactttgtccagtgcagtgccctcttcccttcctgcactgaggagattaactgaagtgacagattagagttagaagtggcccaaaggagcatctggtacaaccccctttggttagagaagggaaagtgacttttccaaagctgcacagctagacagtcataatggctaagctctgggggtgcttttgatgtgctagggatacttccaatgctttaactcacttaatcctcacaacccgagataggtactgttaccatcctctctgcagacgaggaaaccgaggaccaggaggttcagtaaatggtccaagtactcctagctagtaaggaatggatctacagcctgcctcccaggtttctggcttgtggggggcagagtttgtccctctgtcatcagaggcagccttccaggcacagctctggtcacctctggtcacaactggaggtcaccacagccctccccagcgctctgtaggctctcagctttgtgcttcctcccacgggtactagctccagctgagcttgcaggaaacccacttcctgaagccaggacttccccatgggaagtgcaggggccactgggcagcctgagggctgaccctgctcaggacactgtctgtctcaggaactcatggcagtggtttaccttgtcaggagtgcatggacgggctgcccctcccattccttcaagcatcactcagagagccctggcctggctctaggcttgggactgcggctgccacaggaagggggcatccccctactttgggtgttgggtcagatcctgcccccgtgcccgccagggctcaggttcctctgagctggtcctgggccaggacgcatctgcatggcggtggtggggaggaggggtgcgccatggcctggaggggagtgtgtgttggggtgtgtgtgtggaggttcttttgagtcacacacaaagcattgtgctgagacactgcattcctgctggctgggcttcctgtttccagatgcattcctgtcccagagtcaccacagagactgtttggaatcccgccccacattctccaaattcagggcgcgatctggcaaaggctccctcccccaccctcttactttggagggagtctgggctccctcctacccagggagggctggcagggctctggcacggccggggtgtgattccacacatcttcttggtcttgcataaggcagttcctggagacccagcactctggttctctctctgcctgtgagaagcggaatgggtactgtctaggaggactgggcagggtgggggcaacccagaggacccatggctagcagggaagggcctgggcttgaatgtgactctgttgagacatggccagcaattctggcacttggctgtcattcggctggcctgcgcagagattggctgtgggcctcagtttccccattttataaagttttaaaatctg

SEQ ID NO: 1000 - protein, 366 aa, Homo sapiens
MALTVDVAGPAPWGFRITGGRDFHTPIMVTKVAERGKAKDADLRPGDIIVAINGESAEGMLHAEAQSKIRQSPSPLRLQLDRSQATSPGQTNGDSSLEVLATRFQGSVRTYTESQSSLRSSYSSPTSLSPRAGSPFSPPPSSSSLTGEAAISRSFQSLACSPGLPAADRLSYSGRPGSRQAGLGRAGDSAVLVLPPSPGPRSSRPSMDSEGGSLLLDEDSEVFKMLQENREGRAAPRQSSSFRLLQEALEAEERGGTPAFLPSSLSPQSSLPASRALATPPKLHTCEKCSTSIANQAVRIQEGRYRHPGCYTCADCGLNLKMRGHFWEDACAMEGMRLSLEALEGMVEGAKRRDRRKTRRPIQPSW

SEQ ID NO: 1001 - DNA, 1473 bp, Homo sapiens
aagcccctgagtagctgctccgggagctgtggtgccctctccttctccctttggctcctctcctgctgccttacagtgcccccagagccggctaggggcatggacttcacctcctggtcctctcttcctcaggtatggcgttgacggtggatgtggccgggccagcgccctggggcttccgtatcacagggggcagggatttccacacgcccatcatggtgactaaggtggccgagcggggcaaagccaaggacgctgacctccggcctggagacataatcgtggccatcaacggggaaagcgcggagggcatgctgcatgccgaggcccagagcaagatccgccagagcccctcgcccctgcggctgcagctggaccggtctcaggctacgtctccagggcagaccaatggggacagctccttggaagtgctggcgactcgcttccagggctccgtgaggacatacactgagagtcagtcctccttaaggtcctcctactccagcccaacctccctcagcccgagggccggcagccccttctcaccaccaccctctagcagctccctcactggagaggcagccatcagccgcagcttccagagtctggcatgttccccgggcctccccgctgctgaccgcctgtcctactcaggccgccctggaagccgacaggccggcctcggccgcgctggcgactcggcggtgctggtgctgccgccttccccgggccctcgttcctccaggcccagcatggactcggaagggggaagcctcctcctggacgaggactcggaagtcttcaagatgctgcaggaaaatcgcgagggacgggcggccccccgacagtccagctcctttcggctcttgcaggaagccctggaggctgaggagagaggaaccaggctgtgcgcatccaggagggccggtaccgccaccccggctgctacacctgtgccgactgtgggctgaacctgaagatgcgcgggcacttctgggtgggtgacgagctgtactgtgagaagcatgcccgccagcgctactccgcacctgccaccctcagctctcgggcctgagcccgccatgccctcagcctgcctcactgctgggccagggtcatgcctatataagttggcatggcagggacaatggtgggcagttgctcttacatgagctaagtttggagacctgaggcccctttgtcctcgctgggtgggccaaggtctgggacctgtcttggactgtgggagactcaccctcaccttgccaggcctctcccctgcaggactggcattgcactagtctgaggtggccactgcctttgatcaacctttgtgtgcgagggtctaagtagggtcgaacacagaagtgggaaggagaggggtgggccaggggctaatggtgtcactgtgtaaagtttttgacatactagctctataaatatatgaatatggacaaaataaaaaaaaaaaaa

SEQ ID NO: 1002 - protein, 278 aa, Homo sapiens
MALTVDVAGPAPWGFRITGGRDFHTPIMVTKVAERGKAKDADLRPGDIIVAINGESAEGMLHAEAQSKIRQSPSPLRLQLDRSQATSPGQTNGDSSLEVLATRFQGSVRTYTESQSSLRSSYSSPTSLSPRAGSPFSPPPSSSSLTGEAAISRSFQSLACSPGLPAADRLSYSGRPGSRQAGLGRAGDSAVLVLPPSPGPRSSRPSMDSEGGSLLLDEDSEVFKMLQENREGRAAPRQSSSFRLLQEALEAEERGTRLCASRRAGTATPAATPVPTVG

SEQ ID NO: 1003 - DNA, 2075 bp, Homo sapiens
gccgcgcccagctgggtcgggacgcgctccctgagctgcccgagctccgcggggactcgggccgggatcctcgggcggctgcattggccggggccggggccgggagcgggccatgatgggccggcggcgcgccttcgccgtggacggccgggatggggctggcgagggcctggcacggggctgcatagtgcctggagtcaccagcacctacagacggatccccgacgctgcccacgggtgctcatcctgggagagaggtgacaagttcagaggtgtcggcagggaggcactctttctcaaactggcctcccgggactcaggagtggagatggcagttggggacagccccctggccgccttaccgggcctttctcaggactccctggactttgaatcctcagggagttctgagccccccgcccaggtaggccgactcctggccagccagaagctgggggaggtgttggagcggtcccgccggctcccaacagctcccaccagcttgtcaggacaacaccgctccctgcggctggcaagcaagcctgagcgtgaagtgccccttggagcagggcaacaggagtccatggaggcagacacagacctagaggcaggcctggaagaagaggcggtggggggcctggggcctggagcctgggcctgcctccccgggcagggtcttcgctatctggaacacctgtgcctggtgctggagcagatggcaaggctccagcagctctacctgcagctgcggatccagaggcccccaggggatcccggcgaggaggagtcgacccgagcccctttaccgtccccgttacacaccccaggcaatcgggggcaggggccatgggagctgctaagccagacagagcacacaggagcaaaggctgcttcacccccaaaggtggaggtgcccagtgccaaccctcccaggctgccagaaaccccagtggagccaacgtaccacttgccatcctcccagggacacaagcgggatatctcccactgggacaaggtcaaggtcctgctcaaccggatctgccggagaagccaccaccaccctgagccccctgcccctcctgatggctctgaccccaggatcgagtccagggacctccctgaaaggcctcagtgccgcccccaccggaagacctttatgccatcattagtggttaagaagcaacgagcaaaaaacctttctgtaggctgagacctctcggtgcacctggtgaccctgggtggaggggacttgctgtgaagtcttcctcgccctctgccctcttgctgcttctccacattgccaggaaaagctgctgacgcctgccctcctctcttgagtcgagggctgaatctttctcctctaagcagtctggtcaggaaccttggtttcttgagaggcccccaagatgccgcagctccagggctcttcctcctcaccagaaatccctgggcttccacaatgtgaactcactcattgtcaggtgtccgtggagtgtttttggcatggtgacctgtctgggcccagcatgttgcagatgtgtatttatgcgcaatggtatgcatatctctgtgtgactgtcagtgttgcaagctggctggatccaaccatctcttctgaaataatgcatccaaagggttgatattctgggggaggtcactgcagaaggatggaactgacctttattccccagtgggcagttactgagctttcctcctcagagccatgctggcagccctgggacagagaacggtgtggctttggctgcctctgcatggaatcttgccccggactcctgaagactgcacaaggaatgaggaagatcagggacaacctgggaactgaataactttcaaagccagtgctcagcttctctgctccgtactagcgtttacaggtcttaattcaaaccagatgcctgtactagtttttagaccccaagtcaacctttctgagccacagcttcccgctgggaataatgatgcctgccctatctacctcacagacttgttatgaggataaagtgagattaaactgcctcaaagtgctttgtaaaaaaaaaaaaaaaaaaaaaaaa

SEQ ID NO: 1004 - protein, 365 aa, Homo sapiens
MMGRRRAFAVDGRDGAGEGLARGCIVPGVTSTYRRIPDAAHGCSSWERGDKFRGVGREALFLKLASRDSGVEMAVGDSPLAALPGLSQDSLDFESSGSSEPPAQVGRLLASQKLGEVLERSRRLPTAPTSLSGQHRSLRLASKPEREVPLGAGQQESMEADTDLEAGLEEEAVGGLGPGAWACLPGQGLRYLEHLCLVLEQMARLQQLYLQLRIQRPPGDPGEEESTRAPLPSPLHTPGNRGQGPWELLSQTEHTGAKAASPPKVEVPSANPPRLPETPVEPTYHLPSSQGHKRDISHWDKVKVLLNRICRRSHHHPEPPAPPDGSDPRIESRDLPERPQCRPHRKTFMPSLVVKKQRAKNLSVG

SEQ ID NO: 1005 - DNA, 4031 bp, Homo sapiens
cctcagtcctcccttggtggcctcgccgcggctctgctgggagacccggcgctggcggctgctgaggccggagcggagggcccgggagcgtgggagcaggagggtggcgcgcagccggtttcgcgtttggtcggccagggagctgccttcccaccagccggtcgaggaaacaacgggtcgggcttccggggagagggcccacacagtctcctcgccggcaccggcctcctccatttttccgggccttgcgtggagggttttggcggatgtttttgaacgaaggaatgtcatcggggctctctcgagcccctcaccccgccagctactctgggggtggcgtggcatagtgagaggagcgctaagttgttgggaggcctgggtccttttccccacgactctgaaagaggacagcgttcccaatgtcccagtttaagcgccagcggatcaacccgcttccagggggacgcaacttctcaggcacagcttcaacatctcttctgggccctcctcctggtttgctcactcctcctgtggccacagaactgtcccagaatgccaggcaccttcagggtggggagaaacagcgggtcttcactggtattgttaccagcttgcatgactactttggggttgtggatgaagaggtcttttttcagctaagtgtggtgaagggccgtctgccccagctgggtgagaaggtgctggtgaaggctgcatacaacccaggccaggcagtgccctggaatgctgtcaaggtgcaaacgctctccaaccagcccctactgaagtccccagcacctcctcttctgcatgtagcagccctgggccagaagcaagggatcctgggagctcagcctcagttgatcttccagcctcaccggattcccccactctttcctcagaagcctctgagtctcttccaaacatcccacacacttcacctgagccacctgaacagatttcctgcccggggccctcatggacggttggatcagggccgaagtgatgactatgactccaagaaacgcaaacagcgggctggtggagagccctggggtgctaagaagccaaggcatgacctgcctccttaccgggtccacctcactccttacactgtggacagccccatctgtgacttcctagaactccagcgccgttaccgcagcctcctggtcccctcagattttctgtccgtgcatctgagttggctatcagccttccccctgagccagcccttttccctccatcatccaagccggatccaggtctcttctgaaaaggaggcagctccagacgctggtgctgagcccatcactgcagacagtgaccccgcttatagttcgaaggtactgctgctctcttccccggggttggaggaattgtatcgttgttgcatgctctttgtggatgacatggctgagccaagggagacgccagagcatcctctgaagcagattaagtttttgctgggcaggaaagaagaggaggcagtgctggttgggggtgaatggtctccttccctggatggcctcgacccccaggctgacccgcaggtgctggtgcgtaccgccatccgctgtgcgcaggcccagactggcattgatttgagcggctgtaccaagtggtggcgctttgccgagtttcagtacctgcagccgggacccccccggcggcttcagacagtggtggtgtacctgccggatgtctggaccatcatgcctactttggaggagtgggaggccctgtgccagcagaaagctgcagaggcagctcccccaacccaggaggcacaaggggaaacggagcctactgaacaggcacctgatgccttggagcaagcagcagacacttctagacggaacgcagaaactccagaggccaccacacagcaggaaacggacactgatctcccagaggcccctccaccccccctagaacctgctgtcatcgcacgccctggctgtgtaaacctgtccctccatgggattgtggaggatcggaggccaaaggaaaggatctcttttgaggtgatggtgctggccgagctgtttctggagatgctccagagggattttggctatagagtttataagatgctactgagccttcctgaaaaggtcgtgtccccacctgaacctgagaaggaggaggcggccaaggaagaagccaccaaggaggaagaagccatcaaagaggaggtggtcaaggagcccaaggatgaggcacagaatgagggcccggctacagagtcagaggccccgctgaaggaggatgggcttttgcccaaaccactctcttctgggggagaggaagaagaaaaaccccggggcgaggcttctgaggacctgtgtgagatggccctggacccagaactgttgcttctgagggatgatggagaggaggagtttgcaggagcaaagctggaggattcggaggtccggtccgttgcctcaaaccagtcagagatggagttctcttcacttcaggacatgcccaaggagctggatccctctgctgtgctccccttagactgtctgcttgcttttgtgttctttgatgccaactggtgtggctacttgcaccggcgagacttagagaggatcctccttacccttgggatccggctcagtgcagagcaggccaagcagctggtcagcagggtggtgacccagaacatctgccagtaccggagccttcagtacagccgccaggagggcctggatggtggccttcccgaggaggtgctcttcggaaacctggacctgctgccccctcctgggaaaagcacgaagccaggtgctgcccccacagaacacaaagccttggtgtcccacaatggcagcctgattaacgtggggagcctgctgcagcgcgcggagcagcaggacagcggccggctctacctagagaacaagatccacacactggagctgaagctggaggagagccataaccgtttctcagccactgaagtaaccaataagacgctggcggcagagatgcaggagctgcgagtccggctggcggaggccgaggagaccgcccggacggcggagcgacagaagagccagctccagcggctgctgcaggagctccgcaggcgtctgacccccctgcagctggagatccagcgggtggtggaaaaggctgacagctgggtggagaaggaggagccggcacctagcaactgacggcctcgcacggaactgccatcctgtgagggcagcggtggcgcccggcaaagttggagcccttgcggtaccagaaagcagcgagagcgagacctgggagccagggcaggggtggctgaccccatgctcagcctctaggggacggcaggccatcaggctgggggctgtgctatgtgggatggatgtgtgaggaaccccggttccacttaacaactaaatacaacatcttttgcacccctagaatgtcattttgccctcaaccttggtatttctcctggggcccttttagtcttgtgctgactttctcctgtcctcttccagtttagaataagacaggggagaaaaaggcttttcgagtgtgggacaaggtctgatgtcagtgaacggaactgaagagcaagacatggagcctggctggggctaagcagccccctcctccggatggcacaggctctgctaggttccggacacaggcttctgggggaagggtctcccttggccatcacgggaatggagtccatgctagaaagagctcagtgttgggctgggtttgccagtagaacactgcgttccagtcaccccggtcttgccagaagaaaccagcacctctttcccgtggctcctgtgttcagaatgtggtattggctctggcccagccttctcccctgttacccataattcttgcctctttccataatccgtggtttcagtttgactttgtatataaagttggggttttttttttttttttttggcttgttttttaaataaaccaaagtcaaaaacaaaaaaaaaaaaaaaaaaaaaaaaaaaaaaaaaaaaaaaaaaaaaaaaaaaaaa

SEQ ID NO: 1006 - protein, 923 aa, Homo sapiens
MSQFKRQRINPLPGGRNFSGTASTSLLGPPPGLLTPPVATELSQNARHLQGGEKQRVFTGIVTSLHDYFGVVDEEVFFQLSVVKGRLPQLGEKVLVKAAYNPGQAVPWNAVKVQTLSNQPLLKSPAPPLLHVAALGQKQGILGAQPQLIFQPHRIPPLFPQKPLSLFQTSHTLHLSHLNRFPARGPHGRLDQGRSDDYDSKKRKQRAGGEPWGAKKPRHDLPPYRVHLTPYTVDSPICDFLELQRRYRSLLVPSDFLSVHLSWLSAFPLSQPFSLHHPSRIQVSSEKEAAPDAGAEPITADSDPAYSSKVLLLSSPGLEELYRCCMLFVDDMAEPRETPEHPLKQIKFLLGRKEEEAVLVGGEWSPSLDGLDPQADPQVLVRTAIRCAQAQTGIDLSGCTKWWRFAEFQYLQPGPPRRLQTVVVYLPDVWTIMPTLEEWEALCQQKAAEAAPPTQEAQGETEPTEQAPDALEQAADTSRRNAETPEATTQQETDTDLPEAPPPPLEPAVIARPGCVNLSLHGIVEDRRPKERISFEVMVLAELFLEMLQRDFGYRVYKMLLSLPEKVVSPPEPEKEEAAKEEATKEEEAIKEEVVKEPKDEAQNEGPATESEAPLKEDGLLPKPLSSGGEEEEKPRGEASEDLCEMALDPELLLLRDDGEEEFAGAKLEDSEVRSVASNQSEMEFSSLQDMPKELDPSAVLPLDCLLAFVFFDANWCGYLHRRDLERILLTLGIRLSAEQAKQLVSRVVTQNICQYRSLQYSRQEGLDGGLPEEVLFGNLDLLPPPGKSTKPGAAPTEHKALVSHNGSLINVGSLLQRAEQQDSGRLYLENKIHTLELKLEESHNRFSATEVTNKTLAAEMQELRVRLAEAEETARTAERQKSQLQRLLQELRRRLTPLQLEIQRVVEKADSWVEKEEPAPSN

SEQ ID NO: 1007 - DNA, 3749 bp, Homo sapiens
gtcgcgcttccggagaggcgcttccggtggcggcggcagcagcggctgtggtggttccgggtgtctttgtccccccggtgtcgctgccctggcccgcagccttttccccacgactctgaaagaggacagcgttcccaatgtcccagtttaagcgccagcggatcaacccgcttccagggggacgcaacttctcaggcacagcttcaacatctcttctgggccctcctcctggtttgctcactcctcctgtggccacagaactgtcccagaatgccaggcaccttcagggtggggagaaacagcgggtcttcactggtattgttaccagcttgcatgactactttggggttgtggatgaagaggtcttttttcagctaagtgtggtgaagggccgtctgccccagctgggtgagaaggtgctggtgaaggctgcatacaacccaggccaggcagtgccctggaatgctgtcaaggtgcaaacgctctccaaccagcccctactgaagtccccagcacctcctcttctgcatgtagcagccctgggccagaagcaagggatcctgggagctcagcctcagttgatcttccagcctcaccggattcccccactctttcctcagaagcctctgagtctcttccaaacatcccacacacttcacctgagccacctgaacagatttcctgcccggggccctcatggacggttggatcagggccgaagtgatgactatgactccaagaaacgcaaacagcgggctggtggagagccctggggtgctaagaagccaaggcatgacctgcctccttaccgggtccacctcactccttacactgtggacagccccatctgtgacttcctagaactccagcgccgttaccgcagcctcctggtcccctcagattttctgtccgtgcatctgagttggctatcagccttccccctgagccagcccttttccctccatcatccaagccggatccaggtctcttctgaaaaggaggcagctccagacgctggtgctgagcccatcactgcagacagtgaccccgcttatagttcgaaggtactgctgctctcttccccggggttggaggaattgtatcgttgttgcatgctctttgtggatgacatggctgagccaagggagacgccagagcatcctctgaagcagattaagtttttgctgggcaggaaagaagaggaggcagtgctggttgggggtgaatggtctccttccctggatggcctcgacccccaggctgacccgcaggtgctggtgcgtaccgccatccgctgtgcgcaggcccagactggcattgatttgagcggctgtaccaagtggtggcgctttgccgagtttcagtacctgcagccgggacccccccggcggcttcagacagtggtggtgtacctgccggatgtctggaccatcatgcctactttggaggagtgggaggccctgtgccagcagaaagctgcagaggcagctcccccaacccaggaggcacaaggggaaacggagcctactgaacaggcacctgatgccttggagcaagcagcagacacttctagacggaacgcagaaactccagaggccaccacacagcaggaaacggacactgatctcccagaggcccctccaccccccctagaacctgctgtcatcgcacgccctggctgtgtaaacctgtccctccatgggattgtggaggatcggaggccaaaggaaaggatctcttttgaggtgatggtgctggccgagctgtttctggagatgctccagagggattttggctatagagtttataagatgctactgagccttcctgaaaaggtcgtgtccccacctgaacctgagaaggaggaggcggccaaggaagaagccaccaaggaggaagaagccatcaaagaggaggtggtcaaggagcccaaggatgaggcacagaatgagggcccggctacagagtcagaggccccgctgaaggaggatgggcttttgcccaaaccactctcttctgggggagaggaagaagaaaaaccccggggcgaggcttctgaggacctgtgtgagatggccctggacccagaactgttgcttctgagggatgatggagaggaggagtttgcaggagcaaagctggaggattcggaggtccggtccgttgcctcaaaccagtcagagatggagttctcttcacttcaggacatgcccaaggagctggatccctctgctgtgctccccttagactgtctgcttgcttttgtgttctttgatgccaactggtgtggctacttgcaccggcgagacttagagaggatcctccttacccttgggatccggctcagtgcagagcaggccaagcagctggtcagcagggtggtgacccagaacatctgccagtaccggagccttcagtacagccgccaggagggcctggatggtggccttcccgaggaggtgctcttcggaaacctggacctgctgccccctcctgggaaaagcacgaagccaggtgctgcccccacagaacacaaagccttggtgtcccacaatggcagcctgattaacgtggggagcctgctgcagcgcgcggagcagcaggacagcggccggctctacctagagaacaagatccacacactggagctgaagctggaggagagccataaccgtttctcagccactgaagtaaccaataagacgctggcggcagagatgcaggagctgcgagtccggctggcggaggccgaggagaccgcccggacggcggagcgacagaagagccagctccagcggctgctgcaggagctccgcaggcgtctgacccccctgcagctggagatccagcgggtggtggaaaaggctgacagctgggtggagaaggaggagccggcacctagcaactgacggcctcgcacggaactgccatcctgtgagggcagcggtggcgcccggcaaagttggagcccttgcggtaccagaaagcagcgagagcgagacctgggagccagggcaggggtggctgaccccatgctcagcctctaggggacggcaggccatcaggctgggggctgtgctatgtgggatggatgtgtgaggaaccccggttccacttaacaactaaatacaacatcttttgcacccctagaatgtcattttgccctcaaccttggtatttctcctggggcccttttagtcttgtgctgactttctcctgtcctcttccagtttagaataagacaggggagaaaaaggcttttcgagtgtgggacaaggtctgatgtcagtgaacggaactgaagagcaagacatggagcctggctggggctaagcagccccctcctccggatggcacaggctctgctaggttccggacacaggcttctgggggaagggtctcccttggccatcacgggaatggagtccatgctagaaagagctcagtgttgggctgggtttgccagtagaacactgcgttccagtcaccccggtcttgccagaagaaaccagcacctctttcccgtggctcctgtgttcagaatgtggtattggctctggcccagccttctcccctgttacccataattcttgcctctttccataatccgtggtttcagtttgactttgtatataaagttggggttttttttttttttttttggcttgttttttaaataaaccaaagtcaaaaacaaaaaaaaaaaaaaaaaaaaaaaaaaaaaaaaaaaaaaaaaaaaaaaaaaaaaa

SEQ ID NO: 1008 - protein, 923 aa, Homo sapiens; identical to SEQ ID NO: 1006

SEQ ID NO: 1009 - DNA, 2281 bp, Homo sapiens
gaattccgaatcatgtgcagaatgctgaatcttcccccagccaggacgaataagacagcgcggaaaagcagattctcgtaattctggaattgcatgttgcaaggagtctcctggatcttcgcacccagcttcgggtagggagggagtccgggtcccgggctaggccagcccggcaggtggagagggtccccggcagccccgcgcgcccctggccatgtctttaatgccctgccccttcatgtggccttctgagggttcccagggctggccagggttgtttcccacccgcgcgcgcgctctcacccccagccaaacccacctggcagggctccctccagccgagaccttttgattcccggctcccgcgctcccgcctccgcgccagcccgggaggtggccctggacagccggacctcgcccggccccggctgggaccatggtgtttctctcgggaaatgcttccgacagctccaactgcacccaaccgccggcaccggtgaacatttccaaggccattctgctcggggtgatcttggggggcctcattcttttcggggtgctgggtaacatcctagtgatcctctccgtagcctgtcaccgacacctgcactcagtcacgcactactacatcgtcaacctggcggtggccgacctcctgctcacctccacggtgctgcccttctccgccatcttcgaggtcctaggctactgggccttcggcagggtcttctgcaacatctgggcggcagtggatgtgctgtgctgcaccgcgtccatcatgggcctctgcatcatctccatcgaccgctacatcggcgtgagctacccgctgcgctacccaaccatcgtcacccagaggaggggtctcatggctctgctctgcgtctgggcactctccctggtcatatccattggacccctgttcggctggaggcagccggcccccgaggacgagaccatctgccagatcaacgaggagccgggctacgtgctcttctcagcgctgggctccttctacctgcctctggccatcatcctggtcatgtactgccgcgtctacgtggtggccaagagggagagccggggcctcaagtctggcctcaagaccgacaagtcggactcggagcaagtgacgctccgcatccatcggaaaaacgccccggcaggaggcagcgggatggccagcgccaagaccaagacgcacttctcagtgaggctcctcaagttctcccgggagaagaaagcggccaaaacgctgggcatcgtggtcggctgcttcgtcctctgctggctgccttttttcttagtcatgcccattgggtctttcttccctgatttcaagccctctgaaacagtttttaaaatagtattttggctcggatatctaaacagctgcatcaaccccatcatatacccatgctccagccaagagttcaaaaaggcctttcagaatgtcttgagaatccagtgtctctgcagaaagcagtcttccaaacatgccctgggctacaccctgcacccgcccagccaggccgtggaagggcaacacaaggacatggtgcgcatccccgtgggatcaagagagaccttctacaggatctccaagacggatggcgtttgtgaatggaaatttttctcttccatgccccgtggatctgccaggattacagtgtccaaagaccaatcctcctgtaccacagcccgggtgagaagtaaaagctttttgcaggtctgctgctgtgtagggccctcaacccccagccttgacaagaaccatcaagttccaaccattaaggtccacaccatctccctcagtgagaacggggaggaagtctaggacaggaaagatgcagaggaaaggggaataatcttaggtacccaccccacttccttctcggaaggccagctcttcttggaggacaagacaggaccaatcaaagaggggacctgctgggaatggggtgggtggtagacccaactcatcaggcagcgggtagggcacagggaagagggagggtgtctcacaaccaaccagttcagaatgatacggaacagcatttccctgcagctaatgctttcttggtcactctgtgcccacttcaacgaaaaccaccatgggaaacagaatttcatgcacaatccaaaagactataaatataggattatgatttcatcatgaatattttgagcacacactctaagtttggagctatttcttgatggaagtgaggggattttattttcaggctcaacctactgacagccacatttgacatttatg

SEQ ID NO: 1010 - protein, 466 aa, Homo sapiens
MVFLSGNASDSSNCTQPPAPVNISKAILLGVILGGLILFGVLGNILVILSVACHRHLHSVTHYYIVNLAVADLLLTSTVLPFSAIFEVLGYWAFGRVFCNIWAAVDVLCCTASIMGLCIISIDRYIGVSYPLRYPTIVTQRRGLMALLCVWALSLVISIGPLFGWRQPAPEDETICQINEEPGYVLFSALGSFYLPLAIILVMYCRVYVVAKRESRGLKSGLKTDKSDSEQVTLRIHRKNAPAGGSGMASAKTKTHFSVRLLKFSREKKAAKTLGIVVGCFVLCWLPFFLVMPIGSFFPDFKPSETVFKIVFWLGYLNSCINPIIYPCSSQEFKKAFQNVLRIQCLCRKQSSKHALGYTLHPPSQAVEGQHKDMVRIPVGSRETFYRISKTDGVCEWKFFSSMPRGSARITVSKDQSSCTTARVRSKSFLQVCCCVGPSTPSLDKNHQVPTIKVHTISLSENGEEV

SEQ ID NO: 1011 - DNA, 2089 bp, Homo sapiens
gaattccgaatcatgtgcagaatgctgaatcttcccccagccaggacgaataagacagcgcggaaaagcagattctcgtaattctggaattgcatgttgcaaggagtctcctggatcttcgcacccagcttcgggtagggagggagtccgggtcccgggctaggccagcccggcaggtggagagggtccccggcagccccgcgcgcccctggccatgtctttaatgccctgccccttcatgtggccttctgagggttcccagggctggccagggttgtttcccacccgcgcgcgcgctctcacccccagccaaacccacctggcagggctccctccagccgagaccttttgattcccggctcccgcgctcccgcctccgcgccagcccgggaggtggccctggacagccggacctcgcccggccccggctgggaccatggtgtttctctcgggaaatgcttccgacagctccaactgcacccaaccgccggcaccggtgaacatttccaaggccattctgctcggggtgatcttggggggcctcattcttttcggggtgctgggtaacatcctagtgatcctctccgtagcctgtcaccgacacctgcactcagtcacgcactactacatcgtcaacctggcggtggccgacctcctgctcacctccacggtgctgcccttctccgccatcttcgaggtcctaggctactgggccttcggcagggtcttctgcaacatctgggcggcagtggatgtgctgtgctgcaccgcgtccatcatgggcctctgcatcatctccatcgaccgctacatcggcgtgagctacccgctgcgctacccaaccatcgtcacccagaggaggggtctcatggctctgctctgcgtctgggcactctccctggtcatatccattggacccctgttcggctggaggcagccggcccccgaggacgagaccatctgccagatcaacgaggagccgggctacgtgctcttctcagcgctgggctccttctacctgcctctggccatcatcctggtcatgtactgccgcgtctacgtggtggccaagagggagagccggggcctcaagtctggcctcaagaccgacaagtcggactcggagcaagtgacgctccgcatccatcggaaaaacgccccggcaggaggcagcgggatggccagcgccaagaccaagacgcacttctcagtgaggctcctcaagttctcccgggagaagaaagcggccaaaacgctgggcatcgtggtcggctgcttcgtcctctgctggctgccttttttcttagtcatgcccattgggtctttcttccctgatttcaagccctctgaaacagtttttaaaatagtattttggctcggatatctaaacagctgcatcaaccccatcatatacccatgctccagccaagagttcaaaaaggcctttcagaatgtcttgagaatccagtgtctctgcagaaagcagtcttccaaacatgccctgggctacaccctgcacccgcccagccaggccgtggaagggcaacacaaggacatggtgcgcatccccgtgggatcaagagagaccttctacaggatctccaagacggatggcgtttgtgaatggaaatttttctcttccatgccccgtggatctgccaggattacagtgtccaaagaccaatcctcctgtaccacagcccggggacacacacccatgacatgaagccagcttcccgtccacgactgttgtccttactgcccaaggaaggggagcatgaaacccaccactggtcctgcgacccactgtctttggaatccaccccaggagcccaggagccttgcctgacacttggatttacttctttatcaagcatccatctgactaaggcacaaatccaacatgttactgttactgatacaggaaaaacagtaacttaaggaatgatcatgaatgcaaagggaaagaggaaaagagccttcagggacaaatagctcgattttttgtaaatcagtttcatacaacctccctcccccatttcattcttaaaagttaattgagaatcatcagccacgtgtagggtgtgag

SEQ ID NO: 1012 - protein, 429 aa, Homo sapiens
MVFLSGNASDSSNCTQPPAPVNISKAILLGVILGGLILFGVLGNILVILSVACHRHLHSVTHYYIVNLAVADLLLTSTVLPFSAIFEVLGYWAFGRVFCNIWAAVDVLCCTASIMGLCIISIDRYIGVSYPLRYPTIVTQRRGLMALLCVWALSLVISIGPLFGWRQPAPEDETICQINEEPGYVLFSALGSFYLPLAIILVMYCRVYVVAKRESRGLKSGLKTDKSDSEQVTLRIHRKNAPAGGSGMASAKTKTHFSVRLLKFSREKKAAKTLGIVVGCFVLCWLPFFLVMPIGSFFPDFKPSETVFKIVFWLGYLNSCINPIIYPCSSQEFKKAFQNVLRIQCLCRKQSSKHALGYTLHPPSQAVEGQHKDMVRIPVGSRETFYRISKTDGVCEWKFFSSMPRGSARITVSKDQSSCTTARGHTPMT

SEQ ID NO: 1013 - DNA, 2304 bp, Homo sapiens
gaattccgaatcatgtgcagaatgctgaatcttcccccagccaggacgaataagacagcgcggaaaagcagattctcgtaattctggaattgcatgttgcaaggagtctcctggatcttcgcacccagcttcgggtagggagggagtccgggtcccgggctaggccagcccggcaggtggagagggtccccggcagccccgcgcgcccctggccatgtctttaatgccctgccccttcatgtggccttctgagggttcccagggctggccagggttgtttcccacccgcgcgcgcgctctcacccccagccaaacccacctggcagggctccctccagccgagaccttttgattcccggctcccgcgctcccgcctccgcgccagcccgggaggtggccctggacagccggacctcgcccggccccggctgggaccatggtgtttctctcgggaaatgcttccgacagctccaactgcacccaaccgccggcaccggtgaacatttccaaggccattctgctcggggtgatcttggggggcctcattcttttcggggtgctgggtaacatcctagtgatcctctccgtagcctgtcaccgacacctgcactcagtcacgcactactacatcgtcaacctggcggtggccgacctcctgctcacctccacggtgctgcccttctccgccatcttcgaggtcctaggctactgggccttcggcagggtcttctgcaacatctgggcggcagtggatgtgctgtgctgcaccgcgtccatcatgggcctctgcatcatctccatcgaccgctacatcggcgtgagctacccgctgcgctacccaaccatcgtcacccagaggaggggtctcatggctctgctctgcgtctgggcactctccctggtcatatccattggacccctgttcggctggaggcagccggcccccgaggacgagaccatctgccagatcaacgaggagccgggctacgtgctcttctcagcgctgggctccttctacctgcctctggccatcatcctggtcatgtactgccgcgtctacgtggtggccaagagggagagccggggcctcaagtctggcctcaagaccgacaagtcggactcggagcaagtgacgctccgcatccatcggaaaaacgccccggcaggaggcagcgggatggccagcgccaagaccaagacgcacttctcagtgaggctcctcaagttctcccgggagaagaaagcggccaaaacgctgggcatcgtggtcggctgcttcgtcctctgctggctgccttttttcttagtcatgcccattgggtctttcttccctgatttcaagccctctgaaacagtttttaaaatagtattttggctcggatatctaaacagctgcatcaaccccatcatatacccatgctccagccaagagttcaaaaaggcctttcagaatgtcttgagaatccagtgtctctgcagaaagcagtcttccaaacatgccctgggctacaccctgcacccgcccagccaggccgtggaagggcaacacaaggacatggtgcgcatccccgtgggatcaagagagaccttctacaggatctccaagacggatggcgtttgtgaatggaaatttttctcttccatgccccgtggatctgccaggattacagtgtccaaagaccaatcctcctgtaccacagcccggacgaagtctcgctctgtcaccaggctggagtgcagtggcatgatcttggctcactgcaacctccgcctcccgggttcaagagattctcctgcctcagcctcccaagcagctgggactacagggatgtgccaccaggccgacgccaccaggcccagctaatttttgtatttttagtagagacggggtttcaccatgttggccaggatgatctcgatctcttgacctcatgatctgcctgcctcagcctcccaaagtgctgggattacaggcgtgagccaccgtgcccggcccaactattttttttttttatcttttttaacagtgcaatcctttctgtggatgaaatcttgctcagaagctcaatatgcaaaagaaagaaaaacagcagggctggacggatgttgggagtggggtaagaccccaaccactcagaaccacccccccaacacacacacacattctctccatggtgactggtgaggggcctctagagggtacatagtacaccatggagcacggtttaagcaccactggactacacattcttctgtggcagttatcttaccttcccatagacacccagcccatagccattggtt

SEQ ID NO: 1014 - protein, 475 aa, Homo sapiens
MVFLSGNASDSSNCTQPPAPVNISKAILLGVILGGLILFGVLGNILVILSVACHRHLHSVTHYYIVNLAVADLLLTSTVLPFSAIFEVLGYWAFGRVFCNIWAAVDVLCCTASIMGLCIISIDRYIGVSYPLRYPTIVTQRRGLMALLCVWALSLVISIGPLFGWRQPAPEDETICQINEEPGYVLFSALGSFYLPLAIILVMYCRVYVVAKRESRGLKSGLKTDKSDSEQVTLRIHRKNAPAGGSGMASAKTKTHFSVRLLKFSREKKAAKTLGIVVGCFVLCWLPFFLVMPIGSFFPDFKPSETVFKIVFWLGYLNSCINPIIYPCSSQEFKKAFQNVLRIQCLCRKQSSKHALGYTLHPPSQAVEGQHKDMVRIPVGSRETFYRISKTDGVCEWKFFSSMPRGSARITVSKDQSSCTTARTKSRSVTRLECSGMILAHCNLRLPGSRDSPASASQAAGTTGMCHQADATRPS

SEQ ID NO: 1015 - DNA, 2001 bp, Homo sapiens
gaattccgaatcatgtgcagaatgctgaatcttcccccagccaggacgaataagacagcgcggaaaagcagattctcgtaattctggaattgcatgttgcaaggagtctcctggatcttcgcacccagcttcgggtagggagggagtccgggtcccgggctaggccagcccggcaggtggagagggtccccggcagccccgcgcgcccctggccatgtctttaatgccctgccccttcatgtggccttctgagggttcccagggctggccagggttgtttcccacccgcgcgcgcgctctcacccccagccaaacccacctggcagggctccctccagccgagaccttttgattcccggctcccgcgctcccgcctccgcgccagcccgggaggtggccctggacagccggacctcgcccggccccggctgggaccatggtgtttctctcgggaaatgcttccgacagctccaactgcacccaaccgccggcaccggtgaacatttccaaggccattctgctcggggtgatcttggggggcctcattcttttcggggtgctgggtaacatcctagtgatcctctccgtagcctgtcaccgacacctgcactcagtcacgcactactacatcgtcaacctggcggtggccgacctcctgctcacctccacggtgctgcccttctccgccatcttcgaggtcctaggctactgggccttcggcagggtcttctgcaacatctgggcggcagtggatgtgctgtgctgcaccgcgtccatcatgggcctctgcatcatctccatcgaccgctacatcggcgtgagctacccgctgcgctacccaaccatcgtcacccagaggaggggtctcatggctctgctctgcgtctgggcactctccctggtcatatccattggacccctgttcggctggaggcagccggcccccgaggacgagaccatctgccagatcaacgaggagccgggctacgtgctcttctcagcgctgggctccttctacctgcctctggccatcatcctggtcatgtactgccgcgtctacgtggtggccaagagggagagccggggcctcaagtctggcctcaagaccgacaagtcggactcggagcaagtgacgctccgcatccatcggaaaaacgccccggcaggaggcagcgggatggccagcgccaagaccaagacgcacttctcagtgaggctcctcaagttctcccgggagaagaaagcggccaaaacgctgggcatcgtggtcggctgcttcgtcctctgctggctgccttttttcttagtcatgcccattgggtctttcttccctgatttcaagccctctgaaacagtttttaaaatagtattttggctcggatatctaaacagctgcatcaaccccatcatatacccatgctccagccaagagttcaaaaaggcctttcagaatgtcttgagaatccagtgtctctgcagaaagcagtcttccaaacatgccctgggctacaccctgcacccgcccagccaggccgtggaagggcaacacaaggacatggtgcgcatccccgtgggatcaagagagaccttctacaggatctccaagacggatggcgtttgtgaatggaaatttttctcttccatgccccgtggatctgccaggattacagtgtccaaagaccaatcctcctgtaccacagcccggaggggaatggattgtagatatttcaccaagaattgcagagagcatatcaagcatgtgaattttatgatgccaccgtggagaaagggttcagaatgctgatctccaggtagctggagacctaggcagtctgcaaatgaggagtcagctggaagctatggctatgtattatgtgacatcgcttgttcctaagtgaaaactggatatcccaaccttctggcccagtaggtttcatggttaagacctggtagtgagaacattttaggaactatttgcttgggcaggcaatttttcactct

SEQ ID NO: 1016 - protein, 455 aa, Homo sapiens
MVFLSGNASDSSNCTQPPAPVNISKAILLGVILGGLILFGVLGNILVILSVACHRHLHSVTHYYIVNLAVADLLLTSTVLPFSAIFEVLGYWAFGRVFCNIWAAVDVLCCTASIMGLCIISIDRYIGVSYPLRYPTIVTQRRGLMALLCVWALSLVISIGPLFGWRQPAPEDETICQINEEPGYVLFSALGSFYLPLAIILVMYCRVYVVAKRESRGLKSGLKTDKSDSEQVTLRIHRKNAPAGGSGMASAKTKTHFSVRLLKFSREKKAAKTLGIVVGCFVLCWLPFFLVMPIGSFFPDFKPSETVFKIVFWLGYLNSCINPIIYPCSSQEFKKAFQNVLRIQCLCRKQSSKHALGYTLHPPSQAVEGQHKDMVRIPVGSRETFYRISKTDGVCEWKFFSSMPRGSARITVSKDQSSCTTARRGMDCRYFTKNCREHIKHVNFMMPPWRKGSEC

SEQ ID NO: 1017 - DNA, 1352 bp, Homo sapiens
gaggaagagagcagctcgcttctaactggactgcacgttggtgacagcgtcccaagctggtgacagacccactctgtaactttcagctagattcagccaccagatcccagaaacatgacccttgctgcctacaaagagaagatgaaggagctcccgctggtgtccttgttctgctcctgcttcctggccgatcccctgaataagtcgtcctacaaatatgaaggctggtgtgggagacagtgtaggaggaaggatgaaagccagcggaaagacagtgctgactggagagaaagaagagctcaggcagacacggtggacctgaattggtgcgtcatttccgacatggaagtcatcgagctgaacaaatgcacctcgggccaatcctttgaagtcatcctgaagccaccctcctttgatggggttcccgagttcaacgcctccctgccaaggcggcgagacccatccctggaagagatccagaagaaactagaagcggctgaggagcgaaggaagtaccaggaagcggagctcctgaaacacctagcagagaaacgggaacatgagagagaggtgatccaaaaggccattgaggaaaacaacaacttcatcaagatggctaaggaaaaactggcccagaagatggaatccaacaaggagaacagggaggcccacctcgccgccatgttggaacggctgcaagagaaggacaagcacgccgaggaggtgcggaaaaacaaggagctgaaggaagaggcctccaggtaaagcctagaggccaaagaactttccaggtcagccggacagctccagcagctccacgttccaggcagcctcgcccgccggctgcgctcccagcactggggtttggggggaggggggtggccaaggggcgtttcctctgcttttggtgtttgtacatgttaagaattgaccagtgaagccatcctatttgtttccggggaacaatgacggggtgggagaggggagaggagagagtttgggaaagggagatggagaagaactcaaggacattgcaaccctgcccggcgcagatctgattttcacatctctacctggacattgagcctccaggcaccatgttgaggagagatgaaaaccagggcggtagaacttcagggtgaaggacagagtcctgggtggggcagcggctgcagggcgcaccagagaacccagccagaggggttgtgagtaccagtggtgttgcttccaccctgcagcaggtgggatgaggtctgtgtgtgtgtgtgaaccatcattttttgatcatcatgaccaatgaaacattgactccaaaaaaaaaaaaaaaaaaaaaaaaaaaaaaaaaaaaaaaa

SEQ ID NO: 1018 - protein, 216 aa, Homo sapiens
MTLAAYKEKMKELPLVSLFCSCFLADPLNKSSYKYEGWCGRQCRRKDESQRKDSADWRERRAQADTVDLNWCVISDMEVIELNKCTSGQSFEVILKPPSFDGVPEFNASLPRRRDPSLEEIQKKLEAAEERRKYQEAELLKHLAEKREHEREVIQKAIEENNNFIKMAKEKLAQKMESNKENREAHLAAMLERLQEKDKHAEEVRKNKELKEEASR

SEQ ID NO: 1019 - DNA, 2196 bp, Homo sapiens
ctgggcgggtcatgcgccctggccttcgcgcatctcccaggttagctgcgtgtccgggtgctaggctgcagacccgccgccatgacgctgcgcgcggccgtcttcgaccttgacggggtgctggcgctgccagcggtgttcggcgtcctcggccgcacggaggaggccctggcgctgcccagaggacttctgaatgatgctttccagaaagggggaccagagggtgccactacccggcttatgaaaggagagatcacactttcccagtggataccactcatggaagaaaactgcaggaagtgctccgagaccgctaaagtctgcctccccaagaatttctccataaaagaaatctttgacaaggcgatttcagccagaaagatcaaccgccccatgctccaggcagctctcatgctcaggaagaaaggattcactactgccatcctcaccaacacctggctggacgaccgtgctgagagagatggcctggcccagctgatgtgtgagctgaagatgcactttgacttcctgatagagtcgtgtcaggtgggaatggtcaaacctgaacctcagatctacaagtttctgctggacaccctgaaggccagccccagtgaggtcgtttttttggatgacatcggggctaatctgaagccagcccgtgacttgggaatggtcaccatcctggtccaggacactgacacggccctgaaagaactggagaaagtgaccggaatccagcttctcaataccccggcccctctgccgacctcttgcaatccaagtgacatgagccatgggtacgtgacagtaaagcccagggtccgtctgcattttgtggagctgggctccggccctgctgtgtgcctctgccatggatttcccgagagttggtattcttggaggtaccagatccctgctctggcccaggcaggttaccgggtcctagctatggacatgaaaggctatggagagtcatctgctcctcccgaaatagaagaatattgcatggaagtgttatgtaaggagatggtaaccttcctggataaactgggcctctctcaagcagtgttcattggccatgactggggtggcatgctggtgtggtacatggctctcttctaccccgagagagtgagggcggtggccagtttgaatactcccttcataccagcaaatcccaacatgtcccctttggagagtatcaaagccaacccagtatttgattaccagctctacttccaagaaccaggagtggctgaggctgaactggaacagaacctgagtcggactttcaaaagcctcttcagagcaagcgatgagagtgttttatccatgcataaagtctgtgaagcgggaggactttttgtaaatagcccagaagagcccagcctcagcaggatggtcactgaggaggaaatccagttctatgtgcagcagttcaagaagtctggtttcagaggtcctctaaactggtaccgaaacatggaaaggaactggaagtgggcttgcaaaagcttgggacggaagatcctgattccggccctgatggtcacggcggagaaggacttcgtgctcgttcctcagatgtcccagcacatggaggactggattccccacctgaaaaggggacacattgaggactgtgggcactggacacagatggacaagccaaccgaggtgaatcagatcctcattaagtggctggattctgatgcccggaacccaccggtggtctcaaagatgtagaacgcagcgtgtgcccacgctcagcaggtgtgccatccttccacctgctggggcaccattcttagtatacagaggtggccttacacacatcttgcatggatggcagcattgttctgaaggggtttgcagaaaaaaaagattttctttacataaagtgaatcaaatttgacattattttagatcccagagaaatcaggtgtgattagttctccaggcatgaatgcatcgtccctttatctgtaagaacccttagtgtcctgtagggggacagaatggggtggccaggtggtgatttctctttgaccaatgcatagtttggcagaaaaatcagccgttcatttagaagaatcttagcagagattgggatgccttactcaataaagctaagatgactatgctgctggctgtctttgttcttggagaggtggagtgactgttcacggagaa

SEQ ID NO: 1020 - protein, 555 aa, Homo sapiens
MTLRAAVFDLDGVLALPAVFGVLGRTEEALALPRGLLNDAFQKGGPEGATTRLMKGEITLSQWIPLMEENCRKCSETAKVCLPKNFSIKEIFDKAISARKINRPMLQAALMLRKKGFTTAILTNTWLDDRAERDGLAQLMCELKMHFDFLIESCQVGMVKPEPQIYKFLLDTLKASPSEVVFLDDIGANLKPARDLGMVTILVQDTDTALKELEKVTGIQLLNTPAPLPTSCNPSDMSHGYVTVKPRVRLHFVELGSGPAVCLCHGFPESWYSWRYQIPALAQAGYRVLAMDMKGYGESSAPPEIEEYCMEVLCKEMVTFLDKLGLSQAVFIGHDWGGMLVWYMALFYPERVRAVASLNTPFIPANPNMSPLESIKANPVFDYQLYFQEPGVAEAELEQNLSRTFKSLFRASDESVLSMHKVCEAGGLFVNSPEEPSLSRMVTEEEIQFYVQQFKKSGFRGPLNWYRNMERNWKWACKSLGRKILIPALMVTAEKDFVLVPQMSQHMEDWIPHLKRGHIEDCGHWTQMDKPTEVNQILIKWLDSDARNPPVVSKM

SEQ ID NO: 1021 - DNA, 2859 bp, Homo sapiens
ctttccgcggcattctttgggcgtgagtcatgcaggtttgcagccagccccaaagggggtgtgtgcgcgagcagagcgctataaatacggcgcctcccagtgcccacaacgcggcgtcgccaggaggagcgcgcgggcacagggtgccgctgaccgaggcgtgcaaagactccagaattggaggcatgatgaagactctgctgctgtttgtggggctgctgctgacctgggagagtgggcaggtcctgggggaccagacggtctcagacaatgagctccaggaaatgtccaatcagggaagtaagtacgtcaataaggaaattcaaaatgctgtcaacggggtgaaacagataaagactctcatagaaaaaacaaacgaagagcgcaagacactgctcagcaacctagaagaagccaagaagaagaaagaggatgccctaaatgagaccagggaatcagagacaaagctgaaggagctcccaggagtgtgcaatgagaccatgatggccctctgggaagagtgtaagccctgcctgaaacagacctgcatgaagttctacgcacgcgtctgcagaagtggctcaggcctggttggccgccagcttgaggagttcctgaaccagagctcgcccttctacttctggatgaatggtgaccgcatcgactccctgctggagaacgaccggcagcagacgcacatgctggatgtcatgcaggaccacttcagccgcgcgtccagcatcatagacgagctcttccaggacaggttcttcacccgggagccccaggatacctaccactacctgcccttcagcctgccccaccggaggcctcacttcttctttcccaagtcccgcatcgtccgcagcttgatgcccttctctccgtacgagcccctgaacttccacgccatgttccagcccttccttgagatgatacacgaggctcagcaggccatggacatccacttccatagcccggccttccagcacccgccaacagaattcatacgagaaggcgacgatgaccggactgtgtgccgggagatccgccacaactccacgggctgcctgcggatgaaggaccagtgtgacaagtgccgggagatcttgtctgtggactgttccaccaacaacccctcccaggctaagctgcggcgggagctcgacgaatccctccaggtcgctgagaggttgaccaggaaatacaacgagctgctaaagtcctaccagtggaagatgctcaacacctcctccttgctggagcagctgaacgagcagtttaactgggtgtcccggctggcaaacctcacgcaaggcgaagaccagtactatctgcgggtcaccacggtggcttcccacacttctgactcggacgttccttccggtgtcactgaggtggtcgtgaagctctttgactctgatcccatcactgtgacggtccctgtagaagtctccaggaagaaccctaaatttatggagaccgtggcggagaaagcgctgcaggaataccgcaaaaagcaccgggaggagtgagatgtggatgttgcttttgcacctacgggggcatctgagtccagctccccccaagatgagctgcagccccccagagagagctctgcacgtcaccaagtaaccaggccccagcctccaggcccccaactccgcccagcctctccccgctctggatcctgcactctaacactcgactctgctgctcatgggaagaacagaattgctcctgcatgcaactaattcaataaaactgtcttgtgagctgatcgcttggagggtcctctttttatgttgagttgctgcttcccggcatgccttcattttgctatggggggcaggcaggggggatggaaaataagtagaaacaaaaaagcagtggctaagatggtatagggactgtcataccagtgaagaataaaagggtgaagaataaaagggatatgatgacaaggttgatccacttcaagaattgcttgctttcaggaagagagatgtgtttcaacaagccaactaaaatatattgctgcaaatggaagcttttctgttctattataaaactgtcgatgtattctgaccaaggtgcgacaatctcctaaaggaatacactgaaagttaaggagaagaatcagtaagtgtaaggtgtacttggtattataatgcataattgatgttttcgttatgaaaacatttggtgcccagaagtccaaattatcagttttatttgtaagagctattgcttttgcagcggttttatttgtaaaagctgttgatttcgagttgtaagagctcagcatcccaggggcatcttcttgactgtggcatttcctgtccaccgccggtttatatgatcttcatacctttccctggaccacaggcgtttctcggcttttagtctgaaccatagctgggctgcagtaccctacgctgccagcaggtggccatgactacccgtggtaccaatctcagtcttaaagctcaggcttttcgttcattaacattctctgatagaattctggtcatcagatgtactgcaatggaacaaaactcatctggctgcatcccaggtgtgtagcaaagtccacatgtaaatttatagcttagaatattcttaagtcactgtcccttgtctctctttgaagttataaacaacaaacttaaagcttagcttatgtccaaggtaagtattttagcatggctgtcaaggaaattcagagtaaagtcagtgtgattcacttaatgatatacattaattagaattatggggtcagaggtatttgcttaagtgatcataattgtaaagtatatgtcacattgtcacattaatgtcaaaaaaaaaaaaaaaaaa

SEQ ID NO: 1022 - protein, 501 aa, Homo sapiens
MQVCSQPQRGCVREQSAINTAPPSAHNAASPGGARGHRVPLTEACKDSRIGGMMKTLLLFVGLLLTWESGQVLGDQTVSDNELQEMSNQGSKYVNKEIQNAVNGVKQIKTLIEKTNEERKTLLSNLEEAKKKKEDALNETRESETKLKELPGVCNETMMALWEECKPCLKQTCMKFYARVCRSGSGLVGRQLEEFLNQSSPFYFWMNGDRIDSLLENDRQQTHMLDVMQDHFSRASSIIDELFQDRFFTREPQDTYHYLPFSLPHRRPHFFFPKSRIVRSLMPFSPYEPLNFHAMFQPFLEMIHEAQQAMDIHFHSPAFQHPPTEFIREGDDDRTVCREIRHNSTGCLRMKDQCDKCREILSVDCSTNNPSQAKLRRELDESLQVAERLTRKYNELLKSYQWKMLNTSSLLEQLNEQFNWVSRLANLTQGEDQYYLRVTTVASHTSDSDVPSGVTEVVVKLFDSDPITVTVPVEVSRKNPKFMETVAEKALQEYRKKHREE

SEQ ID NO: 1023 - DNA, 2979 bp, Homo sapiens
gggcagcctgctgtcggcttagaggggatgggcagtgtggagggcctggcagagcaagaggactcatccttccaaagggactttctctgggaagcctgctcctcgggccactgcgaaccctctctactctccgaagggaattgtccttcctggcttccactacttccacccctgaatgcacaggcagcccggcccaagtctcccactagggatgcagatggattcggtgtgaagggctggctgctgttgcctccggctcttgaaagtcaagttcagaggcgtgcaaagactccagaattggaggcatgatgaagactctgctgctgtttgtggggctgctgctgacctgggagagtgggcaggtcctgggggaccagacggtctcagacaatgagctccaggaaatgtccaatcagggaagtaagtacgtcaataaggaaattcaaaatgctgtcaacggggtgaaacagataaagactctcatagaaaaaacaaacgaagagcgcaagacactgctcagcaacctagaagaagccaagaagaagaaagaggatgccctaaatgagaccagggaatcagagacaaagctgaaggagctcccaggagtgtgcaatgagaccatgatggccctctgggaagagtgtaagccctgcctgaaacagacctgcatgaagttctacgcacgcgtctgcagaagtggctcaggcctggttggccgccagcttgaggagttcctgaaccagagctcgcccttctacttctggatgaatggtgaccgcatcgactccctgctggagaacgaccggcagcagacgcacatgctggatgtcatgcaggaccacttcagccgcgcgtccagcatcatagacgagctcttccaggacaggttcttcacccgggagccccaggatacctaccactacctgcccttcagcctgccccaccggaggcctcacttcttctttcccaagtcccgcatcgtccgcagcttgatgcccttctctccgtacgagcccctgaacttccacgccatgttccagcccttccttgagatgatacacgaggctcagcaggccatggacatccacttccatagcccggccttccagcacccgccaacagaattcatacgagaaggcgacgatgaccggactgtgtgccgggagatccgccacaactccacgggctgcctgcggatgaaggaccagtgtgacaagtgccgggagatcttgtctgtggactgttccaccaacaacccctcccaggctaagctgcggcgggagctcgacgaatccctccaggtcgctgagaggttgaccaggaaatacaacgagctgctaaagtcctaccagtggaagatgctcaacacctcctccttgctggagcagctgaacgagcagtttaactgggtgtcccggctggcaaacctcacgcaaggcgaagaccagtactatctgcgggtcaccacggtggcttcccacacttctgactcggacgttccttccggtgtcactgaggtggtcgtgaagctctttgactctgatcccatcactgtgacggtccctgtagaagtctccaggaagaaccctaaatttatggagaccgtggcggagaaagcgctgcaggaataccgcaaaaagcaccgggaggagtgagatgtggatgttgcttttgcacctacgggggcatctgagtccagctccccccaagatgagctgcagccccccagagagagctctgcacgtcaccaagtaaccaggccccagcctccaggcccccaactccgcccagcctctccccgctctggatcctgcactctaacactcgactctgctgctcatgggaagaacagaattgctcctgcatgcaactaattcaataaaactgtcttgtgagctgatcgcttggagggtcctctttttatgttgagttgctgcttcccggcatgccttcattttgctatggggggcaggcaggggggatggaaaataagtagaaacaaaaaagcagtggctaagatggtatagggactgtcataccagtgaagaataaaagggtgaagaataaaagggatatgatgacaaggttgatccacttcaagaattgcttgctttcaggaagagagatgtgtttcaacaagccaactaaaatatattgctgcaaatggaagcttttctgttctattataaaactgtcgatgtattctgaccaaggtgcgacaatctcctaaaggaatacactgaaagttaaggagaagaatcagtaagtgtaaggtgtacttggtattataatgcataattgatgttttcgttatgaaaacatttggtgcccagaagtccaaattatcagttttatttgtaagagctattgcttttgcagcggttttatttgtaaaagctgttgatttcgagttgtaagagctcagcatcccaggggcatcttcttgactgtggcatttcctgtccaccgccggtttatatgatcttcatacctttccctggaccacaggcgtttctcggcttttagtctgaaccatagctgggctgcagtaccctacgctgccagcaggtggccatgactacccgtggtaccaatctcagtcttaaagctcaggcttttcgttcattaacattctctgatagaattctggtcatcagatgtactgcaatggaacaaaactcatctggctgcatcccaggtgtgtagcaaagtccacatgtaaatttatagcttagaatattcttaagtcactgtcccttgtctctctttgaagttataaacaacaaacttaaagcttagcttatgtccaaggtaagtattttagcatggctgtcaaggaaattcagagtaaagtcagtgtgattcacttaatgatatacattaattagaattatggggtcagaggtatttgcttaagtgatcataattgtaaagtatatgtcacattgtcacattaatgtcaaaaaaaaaaaaaaaaaa

SEQ ID NO: 1024 - protein, 449 aa, Homo sapiens
MMKTLLLFVGLLLTWESGQVLGDQTVSDNELQEMSNQGSKYVNKEIQNAVNGVKQIKTLIEKTNEERKTLLSNLEEAKKKKEDALNETRESETKLKELPGVCNETMMALWEECKPCLKQTCMKFYARVCRSGSGLVGRQLEEFLNQSSPFYFWMNGDRIDSLLENDRQQTHMLDVMQDHFSRASSIIDELFQDRFFTREPQDTYHYLPFSLPHRRPHFFFPKSRIVRSLMPFSPYEPLNFHAMFQPFLEMIHEAQQAMDIHFHSPAFQHPPTEFIREGDDDRTVCREIRHNSTGCLRMKDQCDKCREILSVDCSTNNPSQAKLRRELDESLQVAERLTRKYNELLKSYQWKMLNTSSLLEQLNEQFNWVSRLANLTQGEDQYYLRVTTVASHTSDSDVPSGVTEVVVKLFDSDPITVTVPVEVSRKNPKFMETVAEKALQEYRKKHREE

SEQ ID NO: 1025 - DNA, 3631 bp, Homo sapiens
tgagtcccggccggagccccacggccgcgggcggcgcctaggacggcgatccgcgccctggaggatccgccggccgcccggctccactacagctccagccgcctgcagcggggccctcctgaggccccagaggaagagaccatgaaagtgaggtcggccggcggcgatggagatgccttgtgcgttacagaagaggacctggcgggtgacgacgaggacatgccgaccttcccatgcacccagaagggccggccagggccccgctgcagccgctgccagaagaacctatctttgcacacatcggtgcggattctttacctcttcctggccctgctcctggtggccgtggctgtgttggcctctctggttttcagaaaagtggactctctctccgaagacatctccttgacccagtctatttatgacaagaagcttgtgttaatgcagaaaaatctccagggcctggatccgaaagccctgaacaactgctctttctgccatgaagctgggcagctggggccagagatccgaaaactgcaggaggagctggagggaattcagaagctgcttctggcccaggaggtgcagctggaccagaccttacaggcccaggaggtgctctccaccaccagcagacaaatctcccaggagatgggcagttgctccttctccatccaccaggttaaccagtctctggggctcttcctggcccaggtgagaggctggcaggccaccacagctggcctggacctctctctgaaggacctcacccaggagtgctacgatgtcaaggctgcagtgcaccagatcaacttcaccgtggggcagacttccgagtggatccacgggatccagcggaagacagacgaggagaccctgaccctccagaagattgtcaccgactggcagaactacacacggctcttcagcggcctgcgcaccacctccaccaagactggagaggcggtcaagaacatccaggccaccctgggggcctcctcacagcgcatcagccagaactcagagagcatgcacgacctggtactccaggtcatgggcttgcagctgcagctggataacatctcgtccttcctggatgaccacgaagagaacatgcatgatcttcagtaccatacccactacgcccagaaccgcactgtggagaggtttgagtctctggaaggacgcatggcttctcacgagattgaaattggcaccatcttcaccaacatcaatgccaccgacaaccacgtgcacagcatgctcaagtacctggatgacgtgcggctctcctgcacgctgggcttccacacccatgccgaggagctctactacctgaacaagtctgtctccatcatgctgggcaccacagacctgctccgggagcgcttcagcctgctcagtgcccggctggacctcaacgtccggaacctctccatgatcgtggaggagatgaaggcagtggacacacagcatggagaaatccttcgcaatgtcaccatcctacgaggtgcccccggccctccaggaccaagaggattcaaaggagatatgggcgtgaaagggcctgttggcggcagaggcccgaaaggagaccccggcagcttgggccccctgggaccccagggtcctcaggggcaacctggagaggccgggcctgtgggagaaaggggccctgttggccctcgagggttcccaggcctcaaaggctcaaagggcagctttggaactggagggccgagaggacagccaggcccaaaaggggacatagggcccccagggccagaagggcccccggggtctccagggccctcagggcctcagggaaaaccgggaattgcagggaagacagggtcaccaggccagcggggggccatggggcctaagggtgaaccagggatccagggtccccctggtctcccggggcctccaggtccaccaggaagccagagcttctactgaggagggctgtggcagagccactgtcacacagaatgccggaggggcgcagagcagatccaggccccagaaagcctcacctacagacagctgtggtcctctgattccaatgagggggctccccagggctgaccctgcagctttgggctcccccatagtgactgtgccataggaaagcagcccctcctcacacatacatgtgcacatgcacacacatgcatgcacacacatgcacacatacacgcacatgcacacatacacatgcatgcacacatacacaggcatacatgcatgcacacacacatgcacgcacacacacatgcacacatacacgtgcacacatacacaggcacacatgcatgcacacatacacatgcacacacacatgcacacatatatgcacaggcacacacatgtacgcacacacacatgcactgcacacatatccatgcacacaaacacatatatacacatgcacatacacagatttttctgctggccaggtgggccaactgggtttccctggctgggcaggaggagagggcagaggaagaccccctctcctgtgactgagcctgccagggaggcagctacctcgggaggaaggtctcacatctgtctctgggcacccatgctggccagcagtttcccagggctccctggggttgaaaagccccaaggaaacctttgcgggtggggcgttactgccaaaactccagaggcaaagtggacctggcaaccacaagaccctccccataagcaggggaccagcatacccgggagctgtccctgtctgtcacagcacagtggggccacgaggctgacattctctggccttgcacacagtgccccctgagaagttcaacatttatttcttcacgtgtccagaaaattcctcaattcatccttgcctctgcccttcaggagcagcctggaaggaatccaagcaggagtttcatctgcatgggggcactctgcaggccctggaacattgggcctgagtggagatgggagacagaggcaggccagaaggttctctctgcacagctgcctcccttgctctccctgaggctggcctgccccattccccaagggggctcctctggagtggtggggaggattaggctgcagaagggccaaccccttgcaacagggcagctctcgcctcccgcacacggctctcctgatcacagctgcatgccgaccttgtcccaccgggacccacaatggcccgagccctctttgcatgggcagccagctggactaggagtgggaagggcctggacactcacagaggccccctctgtcatcactccttggcacccaccaacttcctgcacacactggcagagaggggcgctgggaaatcaccccacagggtggaggtctcctgttggctacactctaaagctgctttgccttcatgttcaaacagattcaggcaccaccccctccaccgcccgcaaggttagggcatagagttgtctccttcccaacacggacccagagagcagcccttccctgctcaaagcctttccgcaccctcctgactgtcctggatgtgcaactggtttgcactgcacaccccacggccatgtaactctcctgtccacatatgataataccattctgcatagtattactgactcagtaaagagctatttccaggagt

SEQ ID NO: 1026 - protein, 606 aa, Homo sapiens
MKVRSAGGDGDALCVTEEDLAGDDEDMPTFPCTQKGRPGPRCSRCQKNLSLHTSVRILYLFLALLLVAVAVLASLVFRKVDSLSEDISLTQSIYDKKLVLMQKNLQGLDPKALNNCSFCHEAGQLGPEIRKLQEELEGIQKLLLAQEVQLDQTLQAQEVLSTTSRQISQEMGSCSFSIHQVNQSLGLFLAQVRGWQATTAGLDLSLKDLTQECYDVKAAVHQINFTVGQTSEWIHGIQRKTDEETLTLQKIVTDWQNYTRLFSGLRTTSTKTGEAVKNIQATLGASSQRISQNSESMHDLVLQVMGLQLQLDNISSFLDDHEENMHDLQYHTHYAQNRTVERFESLEGRMASHEIEIGTIFTNINATDNHVHSMLKYLDDVRLSCTLGFHTHAEELYYLNKSVSIMLGTTDLLRERFSLLSARLDLNVRNLSMIVEEMKAVDTQHGEILRNVTILRGAPGPPGPRGFKGDMGVKGPVGGRGPKGDPGSLGPLGPQGPQGQPGEAGPVGERGPVGPRGFPGLKGSKGSFGTGGPRGQPGPKGDIGPPGPEGPPGSPGPSGPQGKPGIAGKTGSPGQRGAMGPKGEPGIQGPPGLPGPPGPPGSQSFY

SEQ ID NO: 1027 - DNA, 1711 bp, Homo sapiens
tgagtcccggccggagccccacggccgcgggcggcgcctaggacggcgatccgcgccctggaggatccgccggccgcccggctccactacagctccagccgcctgcagcggggccctcctgaggccccagaggaagagaccatgaaagtgaggtcggccggcggcgatggagatgccttgtgcgttacagaagaggacctggcgggtgacgacgaggacatgccgaccttcccatgcacccagaagggccggccagggccccgctgcagccgctgccagaagaacctatctttgcacacatcggtgcggattctttacctcttcctggccctgctcctggtggccgtggctgtgttggcctctctggttttcagaaaagtggactctctctccgaagacatctccttgacccagtctatttatgacaagaagcttgtgttaatgcagaaaaatctccagggcctggatccgaaagccctgaacaactgctctttctgccatgaagctgggcagctggggccagagatccgaaaactgcaggaggagctggagggaattcagaagctgcttctggcccaggaggtgcagctggaccagaccttacaggcccaggaggtgctctccaccaccagcagacaaatctcccaggagatgggcagttgctccttctccatccaccaggttaaccagtctctggggctcttcctggcccaggtgagaggctggcaggccaccacagctggcctggacctctctctgaaggacctcacccaggagtgctacgatgtcaaggctgcagtgcaccagatcaacttcaccgtggggcagacttccgagtggatccacgggatccagcggaagacagacgaggagaccctgaccctccagaagattgtcaccgactggcagaactacacacggctcttcagcggcctgcgcaccacctccaccaagactggagaggcggtcaagaacatccaggccaccctgggggcctcctcacagcgcatcagccagaactcagagagcatgcacgacctggtactccaggtcatgggcttgcagctgcagctggataacatctcgtccttcctggatgaccacgaagagaacatgcatgatcttcagtaccatacccactacgcccagaaccgcactgtggagaggtttgagtctctggaaggacgcatggcttctcacgagattgaaattggcaccatcttcaccaacatcaatgccaccgacaaccacgtgcacagcatgctcaagtacctggatgacgtgcggctctcctgcacgctgggcttccacacccatgccgaggagctctactacctgaacaagtctgtctccatcatgctgggcaccacagacctgctccgggagcgcttcagcctgctcagtgcccggctggacctcaacgtccggaacctctccatgatcgtggaggagatgaaggcagtggacacacagcatggagaaatccttcgcaatgtcaccatcctacgaggtcacactttgttttcacataatcggatatgatatgaagccagccataaagcccaggatgaccaagaatataatttgaaaatgaatttgtttactatccttaatggtaagcatcaccttaagcacatattatgccttgagacactagccaattgtggtacatgaaaataatttataaataaataaatttacctatattagg

SEQ ID NO: 1028 - protein, 466 aa, Homo sapiens
MKVRSAGGDGDALCVTEEDLAGDDEDMPTFPCTQKGRPGPRCSRCQKNLSLHTSVRILYLFLALLLVAVAVLASLVFRKVDSLSEDISLTQSIYDKKLVLMQKNLQGLDPKALNNCSFCHEAGQLGPEIRKLQEELEGIQKLLLAQEVQLDQTLQAQEVLSTTSRQISQEMGSCSFSIHQVNQSLGLFLAQVRGWQATTAGLDLSLKDLTQECYDVKAAVHQINFTVGQTSEWIHGIQRKTDEETLTLQKIVTDWQNYTRLFSGLRTTSTKTGEAVKNIQATLGASSQRISQNSESMHDLVLQVMGLQLQLDNISSFLDDHEENMHDLQYHTHYAQNRTVERFESLEGRMASHEIEIGTIFTNINATDNHVHSMLKYLDDVRLSCTLGFHTHAEELYYLNKSVSIMLGTTDLLRERFSLLSARLDLNVRNLSMIVEEMKAVDTQHGEILRNVTILRGHTLFSHNRI

SEQ ID NO: 1029 - DNA, 554 bp, Homo sapiens
atggttcactattcacttgaccctgacaaccgcacaaaatcatgcaaatcaagaggttcaaatcttcgtgttctctttaagaacactcgtgaaactgcccaggccatcaagggtatgcatatacgaaaagccacaaagtatctgaaaaatgtcactttacagaagcagtgtgtaccatttcgacgttacaatggtggagctggcagatgtgcctaggccaagcagtggggctggacacaaggtcggtggcccaaaaaagtgctgaatttttgctgcacattcttaaaaatgcagagagtaatgctgaacttaagggtttagatgtagattctctggtcattgagcatatcctagtgaacaaagcacctaagatgcaccgttggacctacagagctcatggtcggattaatccatacatgagctctccctgccacattgagatgatccttactgaaaaggaacggattgttcctaaaccagaaaaggaagttgcccagaggaaaaagatatcccagaagaaattgaagaaacaaaaacttatggcaggggagtaa

SEQ ID NO: 1030 - DNA, 1535 bp, Homo sapiens
cgcgtcgggctgcaggagaagatggcggtctccacaggagttaaagttcctcgtaattttcgcttgttggaagaacttgaagaaggacaaaaaggagtaggcgacggtacagttagctggggccttgaagatgatgaagatatgacacttacaaggtggacaggcatgattattgggccaccaaggacaaattatgaaaacagaatatatagcctgaaagtagaatgtggacctaaatacccagaagctcctccgtcagttagatttgtaacaaaaattaatatgaacggaataaataattccagtgggatggtggatgcccggagcataccagtgttagcaaaatggcaaaattcatatagcattaaagttgtacttcaagagctaagacgtctaatgatgtccaaagaaaatatgaagcttccacagccaccagaaggacaaacatacaacaattaattttagtggatctcaaacttgtcttaaatcaacaaccttctactcatgttaatgtcttgattaaatatcacaatgcaaaatacacattaagtaaaagaattccagctggtaaacatgacctggacatttgtaagaatatatttaatatatgtacacccattatgttttcaggtaacaggaggaaaaatgcagcacaattttttttctcttgaaaggcactgtcatttaaacataaacctggagtactcgaaatagaattcaggtttacaagatgaaagcgtgtggagaagtgtcagatggcagtggaagcatgtgtgtttctaaaaagtaaaaatctcaagaaaacagaaatggcatgctttacccatcttacttagtgaaagagagctgcagttgaaattgtttaaaaagtagcaggtacaatgaatattgtcacagatgtgttaatttttgaagcaatgtgggtgctgactactagtagtatcaaaaatatgttcaggattgttttgatacctgtatttataataaaaaatgttggggggagttgatgaattcctgttaaaagctgttcttgtgtgttacatgtaacagacatggtaaatatttgtttacagtctttgtttaacaaaccatgcatttaagtttaagtgaagtcaacaaaaaggaaataggtgtatggatatgtgattttgagattaaagttagtcttaaaatgtaaataaaatgtgaaacgtgtcctcagagactgtgccatttctattatgttgatgtatatgtacagtaccttgccagggaagcaaaaattggaattattgtagcttttcatgtatacacacttttatttaccctattttgtgtacttcttgtgaattataatttgcagactatttcagaaaagaaattatctagtttaatttcttctttggacaaggagtcctaggtattatattttgagtttgatttcaccagaaataataatattaaaaagatctttgcattctggcagttcttttaggattataggttgcaaattatccaaatatatatcccattttttaaagcataaaaaaaaaaaa

SEQ ID NO: 1031 - protein, 145 aa, Homo sapiens
MAVSTGVKVPRNFRLLEELEEGQKGVGDGTVSWGLEDDEDMTLTRWTGMIIGPPRTNYENRIYSLKVECGPKYPEAPPSVRFVTKINMNGINNSSGMVDARSIPVLAKWQNSYSIKVVLQELRRLMMSKENMKLPQPPEGQTYNN

SEQ ID NO: 1032 - DNA, 2452 bp, Homo sapiens
agctgcccgcgtcgcgtgtgtacccccgcgcactgaaggaggtccaccagccctcaccagcccccgcggaccgtgcaatggcccagcgtaagaatgccaagagcagcggcaacagcagcagcagcggctccggcagcggtagcacgagtgcgggcagcagcagccccggggcccggagagagacaaagcatggaggacacaagaatgggaggaaaggcggactctcaggaacttcattcttcacgtggtttatggtgattgcattgctgggcgtctggacatctgtagctgtcgtttggtttgatcttgttgactatgaggaagttctaggaaaactaggaatctatgatgctgatggtgatggagattttgatgtggatgatgccaaagttttattaggacttaaagagagatctacttcagagccagcagtcccgccagaagaggctgagccacacactgagcccgaggagcaggttcctgtggaggcagaaccccagaatatcgaagatgaagcaaaagaacaaattcagtcccttctccatgaaatggtacacgcagaacatgttgagggagaagacttgcaacaagaagatggacccacaggagaaccacaacaagaggatgatgagtttcttatggcgactgatgtagatgatagatttgagaccctggaacctgaagtatctcatgaagaaaccgagcatagttaccacgtggaagagacagtttcacaagactgtaatcaggatatggaagagatgatgtctgagcaggaaaatccagattccagtgaaccagtagtagaagatgaaagattgcaccatgatacagatgatgtaacataccaagtctatgaggaacaagcagtatatgaacctctagaaaatgaagggatagaaatcacagaagtaactgctccccctgaggataatcctgtagaagattcacaggtaattgtagaagaagtaagcatttttcctgtggaagaacagcaggaagtaccaccagaaacaaatagaaaaacagatgatccagaacaaaaagcaaaagttaagaaaaagaagcctaaacttttaaataaatttgataagactattaaagctgaacttgatgctgcagaaaaactccgtaaaaggggaaaaattgaggaagcagtgaatgcatttaaagaactagtacgcaaataccctcagagtccacgagcaagatatgggaaggcgcagtgtgaggatgatttggctgagaagaggagaagtaatgaggtgctacgtggagccatcgagacctaccaagaggtggccagcctacctgatgtccctgcagacctgctgaagctgagtttgaagcgtcgctcagacaggcaacaatttctaggtcatatgagaggttccctgcttaccctgcagagattagttcaactatttcccaatgatacttccttaaaaaatgaccttggcgtgggatacctcttgataggagataatgacaatgcaaagaaagtttatgaagaggtgctgagtgtgacacctaatgatggctttgctaaagtccattatggcttcatcctgaaggcacagaacaaaattgctgagagcatcccatatttaaaggaaggaatagaatccggagatcctggcactgatgatgggagattttatttccacctgggggatgccatgcagagggttgggaacaaagaggcatataagtggtatgagcttgggcacaagagaggacactttgcatctgtctggcaacgctcactctacaatgtgaatggactgaaagcacagccttggtggaccccaaaagaaacgggctacacagagttagtaaagtctttagaaagaaactggaagttaatccgagatgaaggccttgcagtgatggataaagccaaaggtctcttcctgcctgaggatgaaaacctgagggaaaaaggggactggagccagttcacgctgtggcagcaaggaagaagaaatgaaaatgcctgcaaaggagctcctaaaacctgtaccttactagaaaagttccccgagacaacaggatgcagaagaggacagatcaaatattccatcatgcaccccgggactcacgtgtggccgcacacagggcccacaaactgcaggctccgaatgcacctgggcttggtgattcccaaggaaggctgcaagattcgatgtgccaacgagaccaagacctgggaggaaggcaaggtgctcatctttgatgactcctttgagcacgaggtatggcaggatgcctcatctttccggctgatattcatcgtggatgtgtggcatccggaactgacaccacagcagagacgcagccttccagcaatttagcatgaattcatgcaagcttgggaaactctggagagaggctgcctttctggttccatctccttgggtgtgaggatagaatttcgaacaccaagagtcaa

SEQ ID NO: 1033 - protein, 758 aa, Homo sapiens
MAQRKNAKSSGNSSSSGSGSGSTSAGSSSPGARRETKHGGHKNGRKGGLSGTSFFTWFMVIALLGVWTSVAVVWFDLVDYEEVLGKLGIYDADGDGDFDVDDAKVLLGLKERSTSEPAVPPEEAEPHTEPEEQVPVEAEPQNIEDEAKEQIQSLLHEMVHAEHVEGEDLQQEDGPTGEPQQEDDEFLMATDVDDRFETLEPEVSHEETEHSYHVEETVSQDCNQDMEEMMSEQENPDSSEPVVEDERLHHDTDDVTYQVYEEQAVYEPLENEGIEITEVTAPPEDNPVEDSQVIVEEVSIFPVEEQQEVPPETNRKTDDPEQKAKVKKKKPKLLNKFDKTIKAELDAAEKLRKRGKIEEAVNAFKELVRKYPQSPRARYGKAQCEDDLAEKRRSNEVLRGAIETYQEVASLPDVPADLLKLSLKRRSDRQQFLGHMRGSLLTLQRLVQLFPNDTSLKNDLGVGYLLIGDNDNAKKVYEEVLSVTPNDGFAKVHYGFILKAQNKIAESIPYLKEGIESGDPGTDDGRFYFHLGDAMQRVGNKEAYKWYELGHKRGHFASVWQRSLYNVNGLKAQPWWTPKETGYTELVKSLERNWKLIRDEGLAVMDKAKGLFLPEDENLREKGDWSQFTLWQQGRRNENACKGAPKTCTLLEKFPETTGCRRGQIKYSIMHPGTHVWPHTGPTNCRLRMHLGLVIPKEGCKIRCANETKTWEEGKVLIFDDSFEHEVWQDASSFRLIFIVDVWHPELTPQQRRSLPAI

SEQ ID NO: 1034 - DNA, 1254 bp, Homo sapiens
cctactttacgatttattattcatggattgaagaaatcaaaatggctgaagataaagagacaaagcatggaggacacaagaatgggaggaaaggcggactctcaggaacttcattcttcacgtggtttatggtgattgcattgctgggcgtctggacatctgtagctgtcgtttggtttgatcttgttgactatgaggaagttctagccaaagcaaaggacttccgttataacttatcagaggtgcttcaaggaaaactaggaatctatgatgctgatggtgatggagattttgatgtggatgatgccaaagttttattagaaggacccagtggggtagccaagagaaaaactaaggctaaagttaaagaactcactaaagaagagctcaagaaggagaaagagaaacctgagtcaaggaaggaaagtaagaatgaagagagaaaaaaggggaagaaagaggatgtccgaaaggataagaaaattgctgatgcagacctatccaggaaggagtctcctaagggtaaaaaggacagagaaaaagagaaagtggacctagaaaaaagtgctaaaaccaaggaaaataggaaaaaatcaacaaatatgaaggatgtttctagtaaaatggcatcccgagacaaagatgacagaaaggaaagtagaagttctaccagatatgcacacttaacaaagggaaatacccagaaaagaaacggctaaagctctggcatcatcatcccagaacatggtcatgttccagattgcagtttgttacaaaaaagcatggaaaatgtaatattgctctgattggtgagggtgtgtaaattagccattgaatgtatcattggtgcttagcaagtaaattacctgaaatttaaatataccgtctcatacttctaaatgtaaaaacattttaaaaatgtcacagaatatgatgtaataacttctatttattgatcatttattgatcatgtattcagataaatgtatatgtatcatgaatttttatggattaatatattgaatactttcattgacgttaaataagaatattaagattttaaatgttaccctgtgcataatgccttgtaactttttcaagtatgctaaatactcagggagatggatttgctcgttgttttcttccctccttccccttcctgcttccctgttttctctttcgtggacacctccccaggctcatgtgccaccaccttccctcctctccagccctcccagccctcccgcagccttt

SEQ ID NO: 1035 - protein, 225 aa, Homo sapiens
MAEDKETKHGGHKNGRKGGLSGTSFFTWFMVIALLGVWTSVAVVWFDLVDYEEVLAKAKDFRYNLSEVLQGKLGIYDADGDGDFDVDDAKVLLEGPSGVAKRKTKAKVKELTKEELKKEKEKPESRKESKNEERKKGKKEDVRKDKKIADADLSRKESPKGKKDREKEKVDLEKSAKTKENRKKSTNMKDVSSKMASRDKDDRKESRSSTRYAHLTKGNTQKRNG

SEQ ID NO: 1036 - DNA, 2680 bp, Homo sapiens
cggaccgtgcaatggcccagcgtaagaatgccaagagcagcggcaacagcagcagcagcggctccggcagcggtagcacgagtgcgggcagcagcagccccggggcccggagagagacaaagcatggaggacacaagaatgggaggaaaggcggactctcaggaacttcattcttcacgtggtttatggtgattgcattgctgggcgtctggacatctgtagctgtcgtttggtttgatcttgttgactatgaggaagttctaggaaaactaggaatctatgatgctgatggtgatggagattttgatgtggatgatgccaaagttttattaggacttaaagagagatctacttcagagccagcagtcccgccagaagaggctgagccacacactgagcccgaggagcaggttcctgtggaggcagaaccccagaatatcgaagatgaagcaaaagaacaaattcagtcccttctccatgaaatggtacacgcagaacatgttgagggagaagacttgcaacaagaagatggacccacaggagaaccacaacaagaggatgatgagtttcttatggcgactgatgtagatgatagatttgagaccctggaacctgaagtatctcatgaagaaaccgagcatagttaccacgtggaagagacagtttcacaagactgtaatcaggatatggaagagatgatgtctgagcaggaaaatccagattccagtgaaccagtagtagaagatgaaagattgcaccatgatacagatgatgtaacataccaagtctatgaggaacaagcagtatatgaacctctagaaaatgaagggatagaaatcacagaagtaactgctccccctgaggataatcctgtagaagattcacaggtaattgtagaagaagtaagcatttttcctgtggaagaacagcaggaagtaccaccagatacttaaagcttcaaaaagactgcccctaccaccacaggaggaccagcctaaccatacgctccaaaagatggctgtgatagatcttgtgaagcaattactgagcagatcaagatctttgggaaggaacactaaagatgttttgaatgaattatagtccactggcattttagtgtatttttttttctttttacaaacacacatttctaaaaatgtcatgttacattcctgcatgtcccttttgatagcattagtggatccattggatttcttttttctttttgtgagacagcttttagtcttacctgaatttatgtgtgtttttccgacagtggttaataattatattggtgatgtagcagcaattgtgttggcagggttttcatatattattagtaattaacactaactgttggactgacttgtgtacactgtgttaaacatgatttaaaagctattaagagtactttgtgttagcactcttaaaaacgctaacagagatcatcattagctgtgaagatttgagttgtatatacctgcactgatattcttatcaaaaatttctacattagctttaagtgttcagattaacacttttgaaatttttgtagcttttagctgattaattagaaaaattaatatttcagtgaaagttttaaattatcatttatttatttttttaaatgagaggggaaagctgaaattccttgttaagacacaaggaaaaagaatggccctactattatcatgcaaaaatgctttgttggcacctcagattaatcatataatagctatagtctcttcagcatttgtttaaattttagaaaacctgtataaattactggtgcataacttaaagattattctgcctttggctaattgagtaattcccctccagcactagagaccgctcagtgctcttactagatgaactcagtaacgccttgagctgggttgattgaggatgtgtgaaaagctcacagagcccgatgcctgctgctatttcacggcaatgagcctttttctttctacactgaagattttcttcttatttaatgtggtttattttgggctcagaaataattgctctgttgaaaataatcctttgtcagaaaagaaggtagctaccacatcattttgaaaggaccatgagcaactataagcaaagccataagaagtggtttgatcgatatattaggggtagctcttgattttgttaacattaagataaggtgactttttccccctgcttttaggattaaaatcaaagatacttctatatttttatcactatagatcatagttattatacaatgtagtgagtcctgcatgggtactcgatgtgtaatgaaacctgaaataataagataataagaaaagcaataattttctaaagctgtgctgtcggtgatacagagacgatactcaaattataataaaactcttcattttgtgaattatagaagctactttttataaagccatatttttttagggaaactaaggagtgacatagaactgatgaatgagcaaaagtaagttttgctggatttttgtagaactctggacgttgaggattcattatgctgtggttaactttaaatatttttgaattccaaatatctgaattaatgagccttgtgtttacaaatatgtgccattgtgcaacatcggtggattttctaaaaataatgtaaatgtcttctattaaatgttgagtgcaataaaatccagaa

SEQ ID NO: 1037 - protein, 313 aa, Homo sapiens
MAQRKNAKSSGNSSSSGSGSGSTSAGSSSPGARRETKHGGHKNGRKGGLSGTSFFTWFMVIALLGVWTSVAVVWFDLVDYEEVLGKLGIYDADGDGDFDVDDAKVLLGLKERSTSEPAVPPEEAEPHTEPEEQVPVEAEPQNIEDEAKEQIQSLLHEMVHAEHVEGEDLQQEDGPTGEPQQEDDEFLMATDVDDRFETLEPEVSHEETEHSYHVEETVSQDCNQDMEEMMSEQENPDSSEPVVEDERLHHDTDDVTYQVYEEQAVYEPLENEGIEITEVTAPPEDNPVEDSQVIVEEVSIFPVEEQQEVPPDT

SEQ ID NO: 1038 - DNA, 1279 bp, Homo sapiens
gcggccgcgtcgacatgcagtgtgcctaaaacctgccagcagtacttttgagtttttttttttgttttgttttactttagcatttattattcatggattgaagaaatcaaaatggctgaagataaagagacaaagcatggaggacacaagaatgggaggaaaggcggactctcaggaacttcattcttcacgtggtttatggtgattgcattgctgggcgtctggacatctgtagctgtcgtttggtttgatcttgttgactatgaggaagttctaggaaaactaggaatctatgatgctgatggtgatggagattttgatgtggatgatgccaaagttttattagaaggacccagtggggtagccaagagaaaaactaaggctaaagttaaagaactcactaaagaagagctcaagaaggagaaagagaaacctgagtcaaggaaggaaagtaagaatgaagagagaaaaaaggggaagaaagaggatgtccgaaaggataagaaaattgctgatgcagacctatccaggaaggagtctcctaagggtaaaaaggacagagaaaaagagaaagtggacctagaaaaaagtgctaaaaccaaggaaaataggaaaaaatcaacaaatatgaaggatgtttctagtaaaatggcatcccgagacaaagatgacagaaaggaaagtagaagttctaccagatatgcacacttaacaaagggaaatacccagaaaagaaacggctaaagctctggcatcatcatcccagaacatggtcatgttccagattgcagtttgttacaaaaaagcatggaaaatgtaatattgctctgattggtgagggtgtgtaaattagccattgaatgtatcattggtgcttagcaagtaaattacctgaaatttaaatataccgtctcatacttctaaatgtaaaaacattttaaaaatgtcacagaatatgatgtaataacttctatttattgatcatttattgatcatgtattcagataaatgtatatgtatcatgaatttttatggattaatatattgaatactttcattgacgttaaataagaatattaagattttaaatgttaccctgtgcataatgccttgtaactttttcaagtatgctaaatactcagggagatggatttgctcgttgttttcttccctccttccccttcctgcttccctgttttctctttcgtggacacctccccaggctcatgtgccaccaccttccctcctctccagccctcccagccctcccgcagccttt

SEQ ID NO: 1039 - protein, 210 aa, Homo sapiens
MAEDKETKHGGHKNGRKGGLSGTSFFTWFMVIALLGVWTSVAVVWFDLVDYEEVLGKLGIYDADGDGDFDVDDAKVLLEGPSGVAKRKTKAKVKELTKEELKKEKEKPESRKESKNEERKKGKKEDVRKDKKIADADLSRKESPKGKKDREKEKVDLEKSAKTKENRKKSTNMKDVSSKMASRDKDDRKESRSSTRYAHLTKGNTQKRNG

SEQ ID NO: 1040 - DNA, 2773 bp, Homo sapiens
caagctctggtaggcaagtgcatgcagtgtgcctaaaacctgccagcagtacttttgagtttttttttttgttttgttttactttagcatttattattcatggattgaagaaatcaaaatggctgaagataaagagacaaagcatggaggacacaagaatgggaggaaaggcggactctcaggaacttcattcttcacgtggtttatggtgattgcattgctgggcgtctggacatctgtagctgtcgtttggtttgatcttgttgactatgaggaagttctagccaaagcaaaggacttccgttataacttatcagaggtgcttcaaggaaaactaggaatctatgatgctgatggtgatggagattttgatgtggatgatgccaaagttttattaggacttaaagagagatctacttcagagccagcagtcccgccagaagaggctgagccacacactgagcccgaggagcaggttcctgtggaggcagaaccccagaatatcgaagatgaagcaaaagaacaaattcagtcccttctccatgaaatggtacacgcagaacatgttgagggagaagacttgcaacaagaagatggacccacaggagaaccacaacaagaggatgatgagtttcttatggcgactgatgtagatgatagatttgagaccctggaacctgaagtatctcatgaagaaaccgagcatagttaccacgtggaagagacagtttcacaagactgtaatcaggatatggaagagatgatgtctgagcaggaaaatccagattccagtgaaccagtagtagaagatgaaagattgcaccatgatacagatgatgtaacataccaagtctatgaggaacaagcagtatatgaacctctagaaaatgaagggatagaaatcacagaagtaactgctccccctgaggataatcctgtagaagattcacaggtaattgtagaagaagtaagcatttttcctgtggaagaacagcaggaagtaccaccagatacttaaagcttcaaaaagactgcccctaccaccacaggaggaccagcctaaccatacgctccaaaagatggctgtgatagatcttgtgaagcaattactgagcagatcaagatctttgggaaggaacactaaagatgttttgaatgaattatagtccactggcattttagtgtatttttttttctttttagaaacacacatttctaaaaatgtcatgttacattcctgcatgtcccttttgatagcattagtggatccattggatttcttttttctttttgtgagacagcttttagtcttacctgaatttatgtgtgtttttccgacagtggttaataattatattggtgatgtagcagcaattgtgttggcagggttttcatatattattagtaattaacactaactgttggactgacttgtgtacactgtgttaaacatgatttaaaagctattaagagtactttgtgttagcactcttaaaaacgctaacagagatcatcattagctgtgaagatttgagttgtatatacctgcactgatattcttatcaaaaatttctacattagctttaagtgttcagattaacacttttgaaatttttgtagcttttagctgattaattagaaaaatttaatatttcagtgaaagttttaaattatcatttatttatttttttaaatgagaggggaaagctgaaattccttgttaagacacaaggaaaaagaatggccctactattatcatgcaaaaatgctttgttggcacctcagattaatcatataatagctatagtctcttcagcatttgtttaaattttagaaaacctgtataaattactggtgcataacttaaagattattctgcctttggctaattgagtaattcccctccagcactagagaccgctcagtgctcttactagatgaactcagtaacgccttgagctgggttgattgaggatgtgtgaaaagctcacagagcccgatgcctgctgctatttcacggcaatgagcctttttctttctacactgaagattttcttcttatttaatgtggtttattttgggctcagaaataattgctctgttgaaaataatcctttgtcagaaaagaaggtagctaccacatcattttgaaaggaccatgagcaactataagcaaagccataagaagtggtttgatcgatatattaggggtagctcttgattttgttaacattaagataaggtgactttttccccctgcttttaggattaaaatcaaagatacttctatatttttatcactatagatcatagttattatacaatgtagtgagtcctgcatgggtactcgatgtgtaatgaaacctgaaataataagataataagaaaagcaataattttctaaagctgtgctgtcggtgatacagagatgatactcaaattataataaaactcttcattttgtgaattatagaagctactttttataaagccatatttttttagggaaactaaggagtgacatagaactgatgaatgagtaaaagtaagttttgctggatttttgtagaactctggacgttgaggattcattatgctgtggttaactttaaatatttttgaattccaaatatctgaattaatgagccttgtctttacaaatatgtgccattgtgcaacatcggtggattttctaaaaataatgtaaatgtcttctattaaatgttgagtgcaataaaatacagaagaattctctaaaaaaaaaaaaaaaaaa

SEQ ID NO: 1041 - protein, 299 aa, Homo sapiens
MAEDKETKHGGHKNGRKGGLSGTSFFTWFMVIALLGVWTSVAVVWFDLVDYEEVLAKAKDFRYNLSEVLQGKLGIYDADGDGDFDVDDAKVLLGLKERSTSEPAVPPEEAEPHTEPEEQVPVEAEPQNIEDEAKEQIQSLLHEMVHAEHVEGEDLQQEDGPTGEPQQEDDEFLMATDVDDRFETLEPEVSHEETEHSYHVEETVSQDCNQDMEEMMSEQENPDSSEPVVEDERLHHDTDDVTYQVYEEQAVYEPLENEGIEITEVTAPPEDNPVEDSQVIVEEVSIFPVEEQQEVPPDT

SEQ ID NO: 1042 - DNA, 1485 bp, Homo sapiens
cttctccgctccttctaggatctccgcctggttcggcccgcctgcctccactcctgcctccaccatgtccatcagggtgatccagaagtcctacaaggtgtccacctctggcccccgggccttcagcagccgctcctacacgagtgggcccggtgcccacatcagctcctcgagcttctcctgagtgggcagcagcagctttcggggtggcctgggaggcggctatagtggggccagcggcatgggaggcatcaccgcagtcatggtcaaccagagcctactgagcccccttgtcctggaggtggaccccaacatccaggctgtgtgcacccaggagaaggagcagatcaagaccctcaacaacaagatgtggatgaagcttacatgaacaaggtagagctggagtctcgcctggaagggctgactgacgagatcaacttcctcaggcagctgtacgaaaaggagatccgggagctgcagtcccagatctcggacacatctgtggtgctgtccatggacaacagccgctccctggacatggacagcatcattgctgaggtcaaggcacagtacgaggatattgccaaccaaagacgggctgaggctgagagcatgtaccagatcaagtatgaggagctgcagagtctggctgggaagcacggggatgacctgtggcgcacaaagactgagatctctgagatgaactggaacatcagccagctccaggctgagattgagggcctcaaaggccagagggcttccctggaggccgccattgcagatgccgagcagcgtggagagctggccattaaggatgccaacgccaagttgtccgagctggaggctgccctgcagcgggccaagcaggacatggcacggcagctgcgtgagtaccaggagctgatgaacgtcaagctggccctggacatcgagatcgccacctacaggaagctgctggagggcaaagagagccggctgaagtctgggatgcagaacatgagtattcatacgaagaccaccagcggctatgcaggtggtctgagctcggcctatgggggcctcacaagccccggcctcagctacggcctgggctccagctttggctctggcgcaggctccagctccctcagccgcaccagttcctccagggccgtggttgtgaagaagatcgagacatgtgatgggaagctggtgtccgagtcctctgacatcctgcccaagtgaacagctgtggcagcccctcccagcctacccctcctgcgctgccccagagcctgagaaggaggccactattcagggtagcactgggaacaggagacccacctgaggctcagccctagccctcagcccacctggggagtttactacctggggaccccccttgcccatgcctccagctacaaaacaattcaattgcttttttttggtccaaaataaaacctcagctagctctgccaatgtcaaaaaaaaaaaaaaaaaaaaaaa

SEQ ID NO: 1043 - protein, 279 aa, Homo sapiens
MNKVELESRLEGLTDEINFLRQLYEKEIRELQSQISDTSVVLSMDNSRSLDMDSIIAEVKAQYEDIANQRRAEAESMYQIKYEELQSLAGKHGDDLWRTKTEISEMNWNISQLQAEIEGLKGQRASLEAAIADAEQRGELAIKDANAKLSELEAALQRAKQDMARQLREYQELMNVKLALDIEIATYRKLLEGKESRLKSGMQNMSIHTKTTSGYAGGLSSAYGGLTSPGLSYGLGSSFGSGAGSSSLSRTSSSRAVVVKKIETCDGKLVSESSDILPK

SEQ ID NO: 1044 - DNA, 1789 bp, Homo sapiens
accaagaagcagcttctccgctccttctaggatctccgcctggttcggcccgcctgcctccactcctgcctccaccatgtccatcagggtgatccagaagtcctacaaggtgtccacctctggcccccgggccttcagcagccgctcctacacgagtgggcccggtgcccacatcagctcctcgagcttctcctgagtgggcagcagcagctttcggggtggcctgggaggcggctatagtggggccagcggcatgggaggcatcaccgcagtcatggtcaaccagagcctactgagcccccttgtcctggaggtggaccccaacatccaggctgtgtgcacccaggagaaggagcagatcaagaccctcaacaacaagtttgcctccttcacagacaaggtacggttcctggagcagcagaacaagatgctggagaccaagtggagcctcctgcagcagcagaagatggctcggagcaacatggacaacatgttcgagagctacatcaacaaccttaggcggcagctggagactctgggccaggagaagctgaagctggaggcggagcttggcaacatgcagaggctggtggaggacttcaagaacaagtatgaggatgagatcaataagcatacagagatggagaatgaatttgtcctcatcaagaaggatgtggatgaagcttacatgaacaaggtagagctggagtctcgcctggaagggctgactgacgagatcaacttcctcaggcagctgtacgaaaaggagatccgggagctgcagtcccagatctcggacacatctgtggtgctgtccatggacaacagccgctccctggacatggacagcatcattgctgaggtcaaggcacagtacgaggatattgccaaccaaagacgggctgaggctgagagcatgtaccagatcaagtatgaggagctgcagagtctggctgggaagcacggggatgacctgtggcgcacaaagactgagatctctgagatgaactggaacatcagccagctccaggctgagattgagggcctcaaaggccagagggcttccctggaggccgccattgcagatgccgagcagcgtggagagctggccattaaggatgccaacgccaagttgtccgagctggaggctgccctgcagcgggccaagcaggacatggcacggcagctgcgtgagtaccaggagctgatgaacgtcaagctggccctggacatcgagatcgccacctacaggaagctgctggagggcaaagagagccggctgaagtctgggatgcagaacatgagtattcatacgaagaccaccagcggctatgcaggtggtctgagctcggcctatgggggcctcacaagccccggcctcagctacggcctgggctccagctttggctctggcgcaggctccagctccctcagccgcaccagttcctccagggccgtggttgtgaagaagatcgagacatgtgatgggaagctggtgtccgagtcctctgacatcctgcccaagtgaacagctgtggcagcccctcccagcctacccctcctgcgctgccccagagcctgagaaggaggccactattcagggtagcactgggaacaggagacccacctgaggctcagccctagccctcagcccacctggggagtttactacctggggaccccccttgcccatgcctccagctacaaaacaattcaattgcttttttttggtccaaaataaaacctcagctagctctgccaatgtcaaaaaaaaaaaaaaaaaaaaaaa

SEQ ID NO: 1045 - protein, 424 aa, Homo sapiens
MGGITAVMVNQSLLSPLVLEVDPNIQAVCTQEKEQIKTLNNKFASFTDKVRFLEQQNKMLETKWSLLQQQKMARSNMDNMFESYINNLRRQLETLGQEKLKLEAELGNMQRLVEDFKNKYEDEINKHTEMENEFVLIKKDVDEAYMNKVELESRLEGLTDEINFLRQLYEKEIRELQSQISDTSVVLSMDNSRSLDMDSIIAEVKAQYEDIANQRRAEAESMYQIKYEELQSLAGKHGDDLWRTKTEISEMNWNISQLQAEIEGLKGQRASLEAAIADAEQRGELAIKDANAKLSELEAALQRAKQDMARQLREYQELMNVKLALDIEIATYRKLLEGKESRLKSGMQNMSIHTKTTSGYAGGLSSAYGGLTSPGLSYGLGSSFGSGAGSSSLSRTSSSRAVVVKKIETCDGKLVSESSDILPK

SEQ ID NO: 1046 - DNA, 1574 bp, Homo sapiens
atgccgattactgatccagtagatgatgacggctcattctcagcagtcacagtccatcacgtagagtcatatttagggactacattcaaagaagaattggatgcagctatgaatgcaaggccacacaaggtggatggaagagttgtggaaccaaagagagccgtctcaagagaagattctcaaagaccaggtgcccacttaactgtgaaaaagatatttgttggtggcattaaagaagacactgaagaacatcacctaagagattattttgaacagtatggaaaaattgaagtgattgaaatcatgagtgaccgaggcagtggcaagaaaaggggctttgcctttgtaacctttgacgaccatgactccgtggataagattgtcattcagaaataccatactgtgaatggccacaactgtgaagttacaaaagccctgtcaaagcaagagatggctagtgcttcatccagccaaagaggtcgaagtggttctggaaactttggtggtggtcgtggaggtggtttcagtgggaacgacaactttggtcatggaggaaacttcagtggtcatggtggctttggtggcagccatggtggtggtggatatggtggcaatggggatggctataatggatttggtaatgatggaagcaattttggaggtggtggaagctacaaggattttggcaattacaacaatcagtcttcaaattttggacccatgaagggaggaaattttggaggcagaagctctggcccccatggtggtggaggccagtactttgcaaaaccacgaaaccaaggtggctatggcggttccagcagcagcagtagctatggcagtggcagaagattttaattaggaaacaaagctcagcaggagaggagagccagagaagtaacagggaagctacaggttacaacagatttgtgaactcagccaagcacagtggtggcagggcctagctgctacaaagaagacatgttttagacaaatactcatgtgtatgggcaaaaaactcgaggactgtatttgtgactaattgtataacaggttattttagtttctgttctgtggaaagtgtaaagcattccaacaaagggttttaatgtagatttttttttgcacccatgctgttgattgctaaatgtaatagtctgatcgtgacactgaataaatgtctttttttttaatgtgctgtgtaaagttagtctactctgaagccatcttggtaaatttccccaacagtgtgaagttagaattccttcagggtgatgccaggttctatttggaatttatatacaacctgcttgggtgaagaagccattgtcttcggaaaccttggtgtagttgaactgatagttactgttgtgacctgaagttcaccattaaaagggattatccaagcaaaatcatggaattattggttataaaagtgattgttggtacatcctatgcaatatatctaaattgaataatggtaccagataaaattatagatgggaatgaagcttgtgtatcatccattatcgtatgtaatcaataaacgatttaattctcttgaaaaaaaaaaa

SEQ ID NO: 1047 - protein, 285 aa, Homo sapiens
MPITDPVDDDGSFSAVTVHHVESYLGTTFKEELDAAMNARPHKVDGRVVEPKRAVSREDSQRPGAHLTVKKIFVGGIKEDTEEHHLRDYFEQYGKIEVIEIMSDRGSGKKRGFAFVTFDDHDSVDKIVIQKYHTVNGHNCEVTKALSKQEMASASSSQRGRSGSGNFGGGRGGGFSGNDNFGHGGNFSGHGGFGGSHGGGGYGGNGDGYNGFGNDGSNFGGGGSYKDFGNYNNQSSNFGPMKGGNFGGRSSGPHGGGGQYFAKPRNQGGYGGSSSSSSYGSGRRF

SEQ ID NO: 1048 - DNA, 1593 bp, Homo sapiens
atttgcctctcaagcagcctctggtcatctatctgcctttgagccatcaagatgccgatgtcttctcttccagcagctattttgtctcacatgacagctattaacaatgtgcctcctcctccacttcacagtataccaaacttgaaaaagtctaagcacattaattatggccagttgaatgcattatgccacattagaggacaacacagccggagtatgagcaatatcttatcagctcacgatacatttatgaagcaatatcctaaagtattcctgcaccaaaaacccagacttcctaaacttttcaaacaggaggaacaaagggaactcaatgaaggcaaagaggaaagtcaacatcaacaacctgatgattctaacaatatagctgtccatgttcagagagcacatggtggccatattttatatagaccaaaaagagccacagagaaatttgaagaattcctagctatcttaaagaaattgcccattcacaggacgccatatgaacacaaaactgtgtggaagttcctgaaaacaattccagatttaacctttcagctaaatgataagcatctgaaaacacttagtaagactgtcttttccgaaacctggttgaaaggcagcacagtggttgcaaatgatggattttatgtaatactgaaaggcctagctcgacctcaaacaaacgtgtataaaaatctgattgaaggaagtgattcaccagactcgttcatatctcagagtttccacagcttcatttggagtgaagaattcaaaaactctacacttgctgagatgtacctaccttcatatgactcaatgcttagcaaatggagtacctttgggactctggaagttatgcctcagaatgaatcggaaacacagatgttctcggtggtgacagaagacgattgtgaaattcttaaaatcccagcaaagggatatgcaaagataaaggaggaaaaaataaaacttgaaaatatgcaaaagttgaaattaatccgtatgtgtccttattatgaggaatggcctactttatccatatatgagctaattgcactccttaaatggaaaaaatttcctccaggtcatgtgatagtggaaagtggaaatataatttcttttgtgggttatattaactctggatgctgtaacatttatagaagtattataggatttgtgaaactacgatcaaataaagtgaaaagatctcaaaaacttgtttatatggggaaacttaaggagaaggagtcctttggtgagattagcgtccttcttcaagttcctttcacgtgcacaatcattaccaaaaaagaagttgagatggcaatcattgaagataaggacctatttgtggcctagatctagaaacaacctcagtgaacattaattaagaaagtattgactaaataatggaataattgcattctggaatactatcaaactaccagcaatgaatttggtctattgtgactacatatcctggattccccaggaaagtcccactttcgaattgcctttcaaacacagtttttattagcagtctttcttggtttggatactaaaataaatatagttatcattgcttgattt

SEQ ID NO: 1049 - protein, 436 aa, Homo sapiens
MPMSSLPAAILSHMTAINNVPPPPLHSIPNLKKSKHINYGQLNALCHIRGQHSRSMSNILSAHDTFMKQYPKVFLHQKPRLPKLFKQEEQRELNEGKEESQHQQPDDSNNIAVHVQRAHGGHILYRPKRATEKFEEFLAILKKLPIHRTPYEHKTVWKFLKTIPDLTFQLNDKHLKTLSKTVFSETWLKGSTVVANDGFYVILKGLARPQTNVYKNLIEGSDSPDSFISQSFHSFIWSEEFKNSTLAEMYLPSYDSMLSKWSTFGTLEVMPQNESETQMFSVVTEDDCEILKIPAKGYAKIKEEKIKLENMQKLKLIRMCPYYEEWPTLSIYELIALLKWKKFPPGHVIVESGNIISFVGYINSGCCNIYRSIIGFVKLRSNKVKRSQKLVYMGKLKEKESFGEISVLLQVPFTCTIITKKEVEMAIIEDKDLFVA

SEQ ID NO: 1050 - DNA, 4215 bp, Homo sapiens
acggtaggggagcagagtgggcaggccgggggtgagggctcgcgctccgggagctgcacggggctgcgtggaaagagcgccgagcggtggcgtcgttgtcgccccctcctcgtcgggaagaatcgtttggtctcctgccgtgcccggaatcccagtcagaagttccagcctgccactgttctctgatgccatgccagcaccaactcaactgttttttcctctcatccgtaactgtgaactgagcaggatctatggcactgcatgttactgccaccacaaacatctctgttgttcctcatcgtacattcctcagagtcgactgagatacacacctcatccagcatatgctaccttttgcaggccaaaggagaactggtggcagtacacccaaggaaggagatatgcttccacaccacagaaattttacctcacacctccacaagtcaatagcatccttaaagctaatgaatacagtttcaaagtgccagaatttgacggcaaaaatgtcagttctatccttggatttgacagcaatcagctgcctgcaaatgcacccattgaggaccggagaagtgcagcaacctgcttgcagaccagagggatgcttttgggggtttttgatggccatgcaggttgtgcttgttcccaggcagtcagtgaaagactcttttattatattgctgtctctttgttaccccatgagactttgctagagattgaaaatgcagtggagagcggccgggcactgctacccattctccagtggcacaagcaccccaatgattactttagtaaggaggcatccaaattgtactttaacagcttgaggacttactggcaagagcttatagacctcaacactggtgagtcgactgatattgatgttaaggaggctctaattaatgccttcaagaggcttgataatgacatctccttggaggcgcaagttggtgatcctaattcttttctcaactacctggtgcttcgagtggcattttctggagccactgcttgtgtggcccatgtggatggtgttgaccttcatgtggccaatactggcgatagcagagccatgctgggtgtgcaggaagaggacggctcatggtcagcagtcacgctgtctaatgaccacaatgctcaaaatgaaagagaactagaacggctgaaattggaacatccaaagagtgaggccaagagtgtcgtgaaacaggatcggctgcttggcttgctgatgccatttagggcatttggagatgtaaagttcaaatggagcattgaccttcaaaagagagtgatagaatctggcccagaccagttgaatgacaatgaatataccaagtttattcctcctaattatcacacacctccttatctcactgctgagccagaggtaacttaccaccgattaaggccacaggataagtttctggtgttggctactgatgggttgtgggagactatgcataggcaggatgtggttaggattgtgggtgagtacctaactggcatgcatcaccaacagccaatagctgttggtggctacaaggtgactctgggacagatgcatggccttttaacagaaaggagaaccaaaatgtcctcggtatttgaggatcagaacgcagcaacccatctcattcgccacgctgtgggcaacaacgagtttgggactgttgatcatgagcgcctctctaaaatgcttagtcttcctgaagagcttgctcgaatgtacagagatgacattacaatcattgtagttcagttcaattctcatgttgtaggggcgtatcaaaaccaagaatagtgagtggctctttcactggcaattctcaaatgatatacatttaaagggcagattttttaaaaagatactactataataaacatttccagttggtcattctaagcatttacccttttgatactctagctagtcaggtactccaaattgactttgcagcagggtggcagggtcaggagagtctggtcctgcctagctcagatttcatggcacctgcacttgaagcaagtcacttctttatcacaggtgtcttgaaacattagcttcttttaccaacctgagaaaattaggatgacctggcaaataagatcttgaataggccaaaagcaagtatcttgctgtgtgtagtctcttggttaaagtgaagaaacagtactgttcacacctttcttcactgagattccagtgtacatgagaacatatatttattgcatgattttctagatacacagtctatgcattattcatatacatttattttagcctaaagtggttttcaaatccagttcttcaagccataaatgaccaagatccaagcaatctgaatttgtttttgtgattatttgactggaatgcttcttaagtggaataactatactccgttatccacccgatttcctaatgtaattgaaagattttctattttgccacacacttggagacaataagggtttttagttttatctactcttctattgaagttaaagaaagaaaaaaagatttttttatttgtattaatgaaaagctttagtttaaaataaggagatccagaataaaaagaagagactgatctcttcaattattgtcatctgtagccaccagcacatcactcttatgtaatccccaaaggcttggcatgccgtaagtgtgtggtgggtagactgctgccggggaatcgtacttcttatttagtaatgataagacttttcattatttttggaattttaaagatgacataaataagtttaaatatcaatttggggagtaaggtttaatattgccatcgggtattgagacaggaggaagtttctgtttttctccatttagacataggtcaattaaaatatttgggtttaaaatgactaaatgctttaaacatattgtagcttaagatatatgtgttaagatatatacatgagaaactttaaaaggtaactactgtgcatgcctgatgcttaatagaatacttagtggcatcaaatgtttgcagcagtctccataattatattcagtcccttctaatactgtatcaatgtaaatgaaataaatatattcaaattggctttttgatatgcatcaagtggcattttgttcctgtgtttaatagtgatctgtatacagctgtgcacatattgtcatcacttattctagcatcactgttaaggctgtgattatgtttgatattcacctggattttaatacaagccaatatcagcttcccattgtgtaataacttgggtgtttaggagtcttttcacattttttggggatatgaactagatgttcaagaactccttctggactgtggatactgaatcagtgtactattggctgcagaatttgtttcaattgaaaatagactcaggaagattgctgctcagaatatcatataatgtttattttttgaggtgtttttgtttttatttgtgtgtttttttttttttaagtcagcttggaacttttttcctgggtagtatttgggagagggaaaggctgtactatatatttatttctaaatgttttgactgggcatttttcttttaatgaaatatgtggactgctctagcaaaccctattttcagctactatttgaatattcttgaacaccaccactgaagagtttcatatacaccaaataatgtctcatctctatagtacagggaatataaaattggtttcctgtggtcatgatcaagatagtagtattattacacaagaaacttggtctgcagtctggaagcttgtctgctctatagaaatgaaaatgcagcatgaagttgacattgtggaaatgaaagtaattgggtattagaaatctgaaagtactgtcatctaaaagcaattgtgattttattgtaattggttgtcactgttgtacggtgtctagaattaaagaatacatgtaaactttcatggtatttagcctttcttaaatttttttaaaatttaaactttctaacctatgtattcaacttctgtatttatatttaatcagtggttcatgttatataatacacccttaactagttaaatggaatgttggtatggtacagagtaccatattgctaagaaaactgtcttataaaagatgtatatgtgtgaagacatgaaagtttaatgtacagaatggttggagaaatgcctatggtgaattaaagcttcatatctgctttctgaaaaaaaaaaaaaaaaaa

SEQ ID NO: 1051 - protein, 537 aa, Homo sapiens
MPAPTQLFFPLIRNCELSRIYGTACYCHHKHLCCSSSYIPQSRLRYTPHPAYATFCRPKENWWQYTQGRRYASTPQKFYLTPPQVNSILKANEYSFKVPEFDGKNVSSILGFDSNQLPANAPIEDRRSAATCLQTRGMLLGVFDGHAGCACSQAVSERLFYYIAVSLLPHETLLEIENAVESGRALLPILQWHKHPNDYFSKEASKLYFNSLRTYWQELIDLNTGESTDIDVKEALINAFKRLDNDISLEAQVGDPNSFLNYLVLRVAFSGATACVAHVDGVDLHVANTGDSRAMLGVQEEDGSWSAVTLSNDHNAQNERELERLKLEHPKSEAKSVVKQDRLLGLLMPFRAFGDVKFKWSIDLQKRVIESGPDQLNDNEYTKFIPPNYHTPPYLTAEPEVTYHRLRPQDKFLVLATDGLWETMHRQDVVRIVGEYLTGMHHQQPIAVGGYKVTLGQMHGLLTERRTKMSSVFEDQNAATHLIRHAVGNNEFGTVDHERLSKMLSLPEELARMYRDDITIIVVQFNSHVVGAYQNQE

SEQ ID NO: 1052 - DNA, 2800 bp, Homo sapiens
gtctggcccctcccctccgcccgtcaccgcctccttgaagctgccgctgtcgctgctgctcgttcgagtcgcagatccttgccagcacattacagaatatttttgttgaaccttcttgagaattcagagaaactgctgagtgaccactgaacgaaaagatctaatcttaaggcttacgcctcactttgatgcccaggctggagtgctgtggctcaatcacagctcatcgcaacctcgacctcccgggctcaagtgatcctctcacctcagcgtcccgaacaggcgtgttccatccaccacatcagaacaatgtcgtatgtttttgtaaatgattcttctcagactaacgtgcccttgctgcaagcctgtattgatggggactttaattattccaagcggcttttggaaagtggctttgacccaaatattcgtgacagcaggggcagaacaggccttcaccttgcagcagctcgagggaatgtagacatctgccagttactgcataaattcggtgccgatcttctggccacagattatcaaggaaacacagctcttcacctctgtggccatgtggatactatccaatttttggtttccaatggactcaaaattgatatttgcaatcatcaaggtgctacccctttagttctggcaaagcgcagaggagtaaataaagatgtcatccgattgctggaatctttggaagaacaggaggtgaaaggatttaacagaggaacccactcgaaactggagaccatgcaaacagctgagagtgaaagtgccatggaaagccattcactcctcaatcccaacctgcagcaaggtgaaggagtcctctccagcttccgaaccacgtggcaggagtttgtggaggatctgggcttctggagagtattgctgttgatcttcgtcattgctttgctgtctcttggcattgcttattatgtgagtggggtgctacccttcgtggaaaaccagcctgaactggtgcattaaaggagctcatggaagatgaggcaattaattgcctgtttcctggcttccaatgtttgttctcagtttctcagaatttttcttagcgcaaagcagtgagggcagtacatgttctttttgcatttttaattattgtaatccttttagataatgatgtgttcatttgaactaactacatactatgatcaagtatattgcatcctaacgctacctctgactcaacctgactttgtaggaaagcctacacgtagccttgtttgataaaaacacggaagtgactagagaatggaagataaaggaagaagctaggaagtccttgctatcaaaaccttatcctaatataggaccaattgaagtattcaaaaagaaaaacagtatcttatatgattagtttttgttggtggttttgttttcatttatttttgcaagagccactttttatttactttctctagggataagagataaaacttgaagtacttttttcaaatcttgtgtgcaaattagtattgttagcatctatttggcttattttagtatttttaagtctagtcacaaaccaaacaaaacttttgaaaatgagctatattttgttcaaagataattgatttgatcttatatttatttgtttttaggataatttttgatctttttgtaaactgctttgcttgttaatatctgtgaaaaataaatgagttcattttgttcactttccaattttcccgagtatcctagtcatcaaagataacagttcatcagaattacagtcagaaaatcctttttctactgaatagttagcagggaaaaataattctgatatttaactgtcataattctgtagtgctattatagtgaaaaactcagttctataagctagctgtgttgtcacagttttatcatagttcataattatttcatgtgcaatcctatttggaggccctgttagacttttaacaatcccatccatatctgtaattctctgatggcaagaatggatggagcatttctgagttaacagtgctggacagtatcgtactgggtgtcataaactctttatgaatggtaatattatgtaaattgaaatctggccctcaaactatattgcagctttcagcagtatgtttgaaggcctcttttgttaatgattctgtaatgtatgaattatgttcttgagtggttaaaaaagaatatgaaggcttgataattatttattgggtaaagtcaggaaattgtagtgaaagaactaatggttttgttttttggaataaaggcacctaagctattgctaattgaattgctgctagaattagaaattatgctttagaatagaattggtatttctgtgattctttttgcttcttggtattttctcttgtatctatgtatctagtattgaggcttgctctttcatgtggctttatcctctctttaatagctgttgtaaaattcctgagtaactggctgcttcaggatcagcttgcagagtcttgcttttaggttagatacaaacaaagtaaatcatagttggtgtaaatccagcaaaaaacagctggctttggaatggagaacactacaattcaaatttgaagtatattcagaagaaaactttggaattagctttacatttgtttgtaaatctaaacaaatatgcaaaattggtcaaaatgtaagtatatagcatttttaaagattaatggttccttttatgtgctgatttctttgtattctgttctctgcattcatcattcaggaataccaccaataaatgtatttatatatcccttaaaaaaaaaaaaaaaaaaaaaaa

SEQ ID NO: 1053 - protein, 228 aa, Homo sapiens
MSYVFVNDSSQTNVPLLQACIDGDFNYSKRLLESGFDPNIRDSRGRTGLHLAAARGNVDICQLLHKFGADLLATDYQGNTALHLCGHVDTIQFLVSNGLKIDICNHQGATPLVLAKRRGVNKDVIRLLESLEEQEVKGFNRGTHSKLETMQTAESESAMESHSLLNPNLQQGEGVLSSFRTTWQEFVEDLGFWRVLLLIFVIALLSLGIAYYVSGVLPFVENQPELVH

SEQ ID NO: 1054 - DNA, 462 bp, Homo sapiens
atggccaagtccaagaatcacaccacacacaatcagtctcgaaaatggcccagaaatggcatcaagaaaccctgaccacaaagatacgaatctcttaaggaggtggaccccaagttcctgagaatcatgtgctttgccaagaagcacaccaagaagggcctaaagaagatgcaggccaacaatgccaaggccatgagtgcacttgccaaggctatcaaggcccttgtaaagcccaaggaggttaagcccaagatcccaaagagtgtcagctgcaagttcgattgacttgcctatattgcccaccccaagcttgggaagcatgcttatgcccacattgccaaggggctcagtctgtgccagccaaaggccaaggatcaaaccaaggcccaggctgcagctccagctacagttccagctcaggctcccaaaggtgcccagtcccctataaaagcttcagagtag

SEQ ID NO: 1055 - DNA, 4411 bp, Homo sapiens
gcgcgcggagccgcctcccctgggtcaggtctgatgggccggtgggcgcgctagtggtggccgccaccgccgaaaccgtcgacctcctgggccccagttccgcgtccagccccgcggcagcatggactacctgacgacgttcaccgagaagagtgggcgccttctgcggggcacggccaaccgcctgttggggttcgggggcggcggcgaagcccggcaggtgcgcttcgaagattacctgagggagccagcccagggggacctcgggtgcgggtccccgccccaccggcccccggcgccgtccagcccggagggacctgacactggccaaaagaagaccctagacaagaaagatggaagacgaatgtcttttcagaaacctaaagggactattgagtatactgttgaatcaagggattctttgaatagcatagccctgaagtttgatacaacacctaacgaacttgttcaattaaataagttattctcccgagcagttgttactggacaggttctgtatgttcctgatcctgaatatgtctccagtgttgagagctctccatctctaagccccgtaagtcctctgtcaccaacatcatctgaggctgaatttgataagaccactaatcctgatgtccatccaacagaagcaactccctcatctactttcactggtattcgacctgcacgagttgtatcttcaacttctgaggaggaggaagcatttactgagaaatttcttaaaattaattgcaaatatattaccagtggcaagggcacagtcagtggtgtgctgctagttacaccaaataatataatgtttgatccacataaaaatgaccctttggttcaagagaatggctgtgaggaatatggcatcatgtgtccaatggaagaggtgatgtcagctgcaatgtacaaagaaattttggatagcaaaataaaggaatctttacccatagatatagatcagctatcaggaagggacttctgccattcaaagaaaatgacaggaagtaacactgaggaaatagactcaagaatccgagatgcaggtaatgatagtgccagcactgctcctaggagcactgaggagtctctttctgaagatgtgttcacagaatcagaactttcccctatacgagaggagcttgtatcttcagatgaactgcgacaagataaatcttctggtgcgtcatcagaatctgtgcaaactgtcaatcaggctgaagtagaaagtctgacagtcaaatcagaatctactggtactcctggtcacttaagatctgatactgaacattctacaaatgaagttgggactttatgtcataaaactgatttaaataatcttgaaatggccattaaggaagatcagattgcagataactttcaaggaatatcaggtcctaaagaagacagcacaagtataaaaggtaattcagaccaggattcttttcttcatgagaattcgttacaccaagaagagagtcaaaaagaaaatatgccttgtggggaaacagcagaatttaaacaaaagcaaagtgttaacaaaggaaaacaaggaaaggagcaaaatcaggactcacagacagaggcagaagagctacgcaaactttggaaaacccatactatgcaacaaactaaacagcaaagggaaaatattcaacaagtgtcacaaaaagaagctaagcataaaattacatctgctgatggacacatagaaagttctgcacttttaaaagaaaagcaaaggcatcgattacataagttcttgtgtctcagagttggaaaaccaatgaggaaaacgtttgtatctcaagcaagtgctacaatgcaacagtatgcacagagagataagaaacatgaatattggtttgctgtgccacaagaaaggacagatcacttgtatgccttcttcattcagtggagtccagaaatatatgcagaagatactggcgaatataccagagaacctggatttatagtagtaaaaaagattgaggagtctgaaacaattgaggattctagtaatcaagcagcagccagagaatgggagattactacaagggaagacataaattcaaagcaggttgctacagtgaaagcagacctggagtctgaatcttttcgaccaaacctaagtgatcccagtgaacttttactgccagatcaaattgaaaagcttaccaagcatcttccaccaagaacaattggctatccatggactcttgtttatggtactggaaaacatggcacaagcttgaaaactctttatcgaacaatgacaggtttagacaccccagtgctgatggtgattaaagacagtgatggacaggtttttggtgcgttagcatctgagccactgaaagtgagtgatggcttttatggtactggagagacctttgtttttacattctgtccggagtttgaggtctttaagtggacaggagataatatgttttttatcaaaggagacatggattcactagctttcggtggtggaggaggagaatttgcgctttggcttgatggagatctctaccatggaagaagccattcttgtaaaacgtttgggaatcgtacactttctaagaaggaagatttctttatccaagatattgaaatctgggcttttgaataaataaaatgctctctgtcttagcaggagaatggcccaaacctgacatggacaagcattgtttggaaagttcaagaagcaatacagtgtaacatgtcacttgtgctttaaaattagtctgtatcaccatttattacagttataattttggagtttatttttcaaatcatgttcttgtcccagagttctttaggttaacactagggactgcgtccatgtactagtataacagcttgggtttgttagaatttgggcaacattttgattataatgacaacttcattttcacatgttactcagttccctaataggatggtgctcttttgttgaacctgtattgatttttttttttttaactatattgattcgtttactagaacagtctaattggggcattgaggaaatgaagactggatacttctgtatctgtgaagttggcacaggtaacatttggacatgttcatcttattcttaggaaggaaaaaatcacttgccaaaataatacatacttcatagaccactgagttctagtttttattcacactacaacattctctttaacgatgttgcaggtattctcaatttccttttaagaaaaatgaaatgtgaggagaattctggttgtaatagatgacagtacatatgatctgcaggtttgggcatatgctttcatcattaaattatctgataaagttacaagtcacaaaggagaatgagaacttaatgattctattggatttaatatattagcaagaaaacatactatttacatatgtgtagcttagtaaggcattaacataagtacaaaaactatgaaacagatgcatatttcctcaacatactgtgtcaggtatactgttttataatttggttgttttagccttattgcacaccaactcccaaaatataggttactcttgttcaaaaggaaaaaaaaaattgtgattttctttgagtggtatatgttattaattaccattagcatttgctcttataaagggcaatgattatagtagacaatattgtaactcagtagacttgttgaatatgcaaacttactgtcaagtgacctcaaaaaaaaaatgaaaagatagaatacactagtagttcttatcctcttttgtaggaaaccaataatagccattgtggcaataattcatcagttgattttaaagcttcatgttatgcaaaaaagaatcctgctgttatacatgtgacagtgactttgtgctgaaatttcagctattccagataaacattgtatatcttgtaaattaatgtttaaaggtgtagttttgttcttacagaaagtgttgattgccaggttgcttatagcactttaagttattctaaaaatgaaattataagccaaatatttggcttaagtagatttagttgtatagcacttacatatttagttcttttgaaagtttagataattatttaaagaaagcataatgctaatggaaaagaaaatctgatgttctattataatatgctattgctgaatatgaatagaaatacagggcatcatttccttgtctcattataagttagtaacaatatatagattaaatgtttacaatatagggaattgtaaataaatatatcagtttttttccccttcggtcttccacagcagtattattgtctttgtggagttgactaatgataatttaaaaatcctgtaatggatttctactaaaataaggtcatagtggcatataccaaataaaatcaaatacagaaatacaagaaaaaaaaaaaaaaaaa

SEQ ID NO: 1056 - protein, 758 aa, Homo sapiens
MSFQKPKGTIEYTVESRDSLNSIALKFDTTPNELVQLNKLFSRAVVTGQVLYVPDPEYVSSVESSPSLSPVSPLSPTSSEAEFDKTTNPDVHPTEATPSSTFTGIRPARVVSSTSEEEEAFTEKFLKINCKYITSGKGTVSGVLLVTPNNIMFDPHKNDPLVQENGCEEYGIMCPMEEVMSAAMYKEILDSKIKESLPIDIDQLSGRDFCHSKKMTGSNTEEIDSRIRDAGNDSASTAPRSTEESLSEDVFTESELSPIREELVSSDELRQDKSSGASSESVQTVNQAEVESLTVKSESTGTPGHLRSDTEHSTNEVGTLCHKTDLNNLEMAIKEDQIADNFQGISGPKEDSTSIKGNSDQDSFLHENSLHQEESQKENMPCGETAEFKQKQSVNKGKQGKEQNQDSQTEAEELRKLWKTHTMQQTKQQRENIQQVSQKEAKHKITSADGHIESSALLKEKQRHRLHKFLCLRVGKPMRKTFVSQASATMQQYAQRDKKHEYWFAVPQERTDHLYAFFIQWSPEIYAEDTGEYTREPGFIVVKKIEESETIEDSSNQAAAREWEITTREDINSKQVATVKADLESESFRPNLSDPSELLLPDQIEKLTKHLPPRTIGYPWTLVYGTGKHGTSLKTLYRTMTGLDTPVLMVIKDSDGQVFGALASEPLKVSDGFYGTGETFVFTFCPEFEVFKWTGDNMFFIKGDMDSLAFGGGGGEFALWLDGDLYHGRSHSCKTFGNRTLSKKEDFFIQDIEIWAFE

SEQ ID NO: 1057 - DNA, 1353 bp, Homo sapiens
tgcagccattgccttgagtgagtgtgccgctctccagcccgtttgaacgctccccgcagccaccgccacccattggaatggccaacaggggacctgcattatggcctgagccaggaggtgcagcagaagattgagaaacagtatgatgcagatctggagcagatcctgatccagtggatcaccacccagtgccgaaaggatgtgggccggtcccagcctggacgcgagaacttccagaactggctcaaggatggcacggtgttatgtgagctcaataatgcactgtaccccaaggggcaggtcccagtaaagaagatccaggcctccaccatggccttcaagcagatggagaagatctctcagttcctgcaagcagctgagcgctatggcattaacaccactgacatcttccaaactgtggacctctgggaaggaaagaacatggcctgtgtgcagcggacgctgaggaatctgggtgggttggcagtagcctgggatgatgggctcttctctggggatcccaactggttccctaagaaatccaaggagaatcctcggaacttctcggataaccagctgcaagagggcaagaacgtgatcgggctacagatggggggcatctcaggcaggcatgactggctactggatgccacaccagatcctttgatcccaccccaggccttgcccctgccctcccacgagtggttaatatacatgtagatatatattttagcagtgacattcccagagagccccagagctcttaagctcccttctgtcagggtgaggggttcagcctgtcctatcacctctgaggtgcctgttggcagcctctcccccgtgcttactaatacattcccttccccatacccatcaaaactggaccaactggcctcttcttttcccctgggatcaaaatttaggggcctcagtccctcaccgccatgccctggcctgttctgtctctcctttttccccctggcctgttctgtctctgagctctgtgccctccgttcattccatggctgggagtcagtgatgctgcctctgccttctgatgctggactggccttgcttctacaagtatgcttctcccacagctgtggctgcaggaacttaatttatagggaggagcctgtggcagctgctgccccagccacagctgcactgactgtgctcaccacacatctggggcagccttccctggcagaggccctcatggcttctcattttccattcccttcactgtggctaaggggtggggtgaggggacggagagggagggctgcctaccatggtctggggcttgaggaagatgagtttgtcgatttaaagaatttgtcatttctgaat

SEQ ID NO: 1058 - DNA, 1322 bp, Homo sapiens
acacactcattttagccagtgtccaggctatcagcagagaaagacaggtgggcagcatggctccgggcgaaaaggaaagtggggagggcccagccaagagcgccctccggaagatacgcacagccaccctggtcatcagcttggcccgaggttggcagcagtgggcgaatgagaacagcatcaggcaggcccaggagcctacaggctggctgccgggagggacccaggactcacctcaagctcctaaaccaatcacaccccctacttcacaccagaaagctcagagtgccccaaagtcgccaccccgcctgccagaaggacatggagatggacaaagctcagagaaagcccctgaggtttctcacatcaaaaagaaagaggtgtccaaaacggtggtcagcaagacttacgagagaggaggggacgtgagccacctcagccacaggtacgagagggatgctggtgtgcttgaacctgggcagccagagaatgacattgacagaatcctccacagccacggctccccaacgcggaggagaaaatgtgccaacctggtgtctgagctaaccaagggctggagagtgatggagcaggaggagcccacatggaggagtgacagcgtagacacagaggacagcggctatggaggagaggctgaggagaggcccgagcaggatggagtgcaggtggctgtggtcaggatcaagcgccccttgccctcccaggtaaacagatttacagagaaactcaactgcaaagcccaacagaaatatagcccagtgggcaacttgaaagggagatggcagcagtgggctgatgaacacatacaatcccagaagctcaatcctttcagtgaagagtttgattacgagctggccatgtccacccgcctacacaaaggagatgagggctatggccgccccaaagaaggaaccaaaactgctgaaagggccaagcgtgctgaggagcacatctacagggaaatgatggacatgtgcttcattatctgcacaatggctcgccacagacgagatggcaagatccaggttacttttggagatctctttgacagatacgttcgtatttcagataaagtagtgggcattctcatgcgtgccaggaaacatggactggtagactttgaaggagagatgctatggcaaggccgagatgaccatgttgtgattacgctactcaagtgaaccttcaaaaacaaaagccaaatttggcccactatggtcttaatgctaaatgctcatgtaggtaaaatgaaaatgcaaactctctgtaataagttagtaaatattaaacaatttttacat

SEQ ID NO: 1059 - protein, 381 aa, Homo sapiens
MAPGEKESGEGPAKSALRKIRTATLVISLARGWQQWANENSIRQAQEPTGWLPGGTQDSPQAPKPITPPTSHQKAQSAPKSPPRLPEGHGDGQSSEKAPEVSHIKKKEVSKTVVSKTYERGGDVSHLSHRYERDAGVLEPGQPENDIDRILHSHGSPTRRRKCANLVSELTKGWRVMEQEEPTWRSDSVDTEDSGYGGEAEERPEQDGVQVAVVRIKRPLPSQVNRFTEKLNCKAQQKYSPVGNLKGRWQQWADEHIQSQKLNPFSEEFDYELAMSTRLHKGDEGYGRPKEGTKTAERAKRAEEHIYREMMDMCFIICTMARHRRDGKIQVTFGDLFDRYVRISDKVVGILMRARKHGLVDFEGEMLWQGRDDHVVITLLK

SEQ ID NO: 1060 - DNA, 9990 bp, Homo sapiens
aatagtgttggtgtcttgaaactgacgtaatgcgcggagactgaggtcctgacaagcgataacatttctgataaagacccgatcttactgcaatctctagcgtcctcttttttggtgctgctggtttctccagacctcgcgtcctctcgattgctctctcgccttcctatttcttttttttttttttaaacaaaaaacaacaccccctcccctctcccacccggcaccgggcacatccttgctctatttcctttctctttctctctctctctctctctctctcttttttaataagggtgggggagggaaaggggggggaggcaggaaagacctttttctctcccccccgcaataatccaagatcaactctgcaaacaacagaagacggttcatggctttggccgccgcgccaccatctttcgggctgccgagggtgttcttgacgattaatcaacagatgtacagatcagctctcaaaatgtcttctgtgtcttctgagcgtcttctaagacaattgcattagcctcctgctagttgactaatagaattaataattgtaaaaagcactctaaagccacatgccttatgaagtcaatgctgggtatgattttacaaatatggtccggaaaaagaacccccctctgagaaacgttgcaagtgaaggcgagggccagatcctggagcctataggtacagaaagcaaggtatctggaaagaacaaagaattttctgcagatcagatgtcagaaaatacggatcagagtgatgctgcagaactaaatcataaggaggaacatagcttgcatgttcaagatccatcttctagcagtaagaaggacttgaaaagcgcagttctgagtgagaaggctggcttcaattatgaaagccccagtaagggaggaaactttccctcctttccgcatgatgaggtgacagacagaaatatgttggctttctcatctccagctgctgggggagtctgtgagcccttgaagtctccgcaaagagcagaggcagatgaccctcaagatatggcctgcaccccctcaggggactcactggagacaaaggaagatcagaagatgtcaccaaaggctacagaggaaacagggcaagcacagagtggtcaagccaattgtcaaggtttgagcccagtttcagtggcctcaaaaaacccacaagtgccttcagatgggggtgtaagactgaataaatccaaaactgacttactggtgaatgacaacccagacccggcacctctgtctccagagcttcaggactttaaatgcaatatctgtggatatggttactacggcaacgaccccacagatctgattaagcacttccgaaagtatcacttaggactgcataaccgcaccaggcaagatgctgagctggacagcaaaatcttggcccttcataacatggtgcagttcagccattccaaagacttccagaaggtcaaccgttctgtgttttctggtgtgctgcaggacatcaattcttcaaggcctgttttactaaatgggacctatgatgtgcaggtgacttcaggtggaacattcattggcattggacggaaaacaccagattgccaagggaacaccaagtatttccgctgtaaattctgcaatttcacttatatgggcaactcatccaccgaattagaacaacattttcttcagactcacccaaacaaaataaaagcttctctcccctcctctgaggttgcaaaaccttcagagaaaaactctaacaagtccatccctgcacttcaatccagtgattctggagacttgggaaaatggcaggacaagataacagtcaaagcaggagatgacactcctgttgggtactcagtgcccataaagcccctcgattcctctagacaaaatggtacagaggccaccagttactactggtgtaaattttgtagtttcagctgtgagtcatctagctcacttaaactgctagaacattatggcaagcagcacggagcagtgcagtcaggcggccttaatccagagttaaatgataagctttccaggggctctgtcattaatcagaatgatctagccaaaagttcagaaggagagacaatgaccaagacagacaagagctcgagtggggctaaaaagaaggacttctccagcaagggagccgaggataatatggtaacgagctataattgtcagttctgtgacttccgatattccaaaagccatggccctgatgtaattgtagtggggccacttctccgtcattatcaacagctccataacattcacaagtgtaccattaaacactgtccattctgtcccagaggactttgcagcccagaaaagcaccttggagaaattacttatccgtttgcttgtagaaaaagtaattgttcccactgtgcactcttgcttctgcacttgtctcctggggcggctggaagctcgcgagtcaaacatcagtgccatcagtgttcattcaccacccctgacgtagatgtactcctctttcactatgaaagtgtgcatgagtcccaagcatcggatgtcaaacaagaagcaaatcacctgcaaggatcggatgggcagcagtctgtcaaggaaagcaaagaacactcatgtaccaaatgtgattttattacccaagtggaagaagagatttcccgacactacaggagagcacacagctgctacaaatgccgtcagtgcagttttacagctgccgatactcagtcactactggagcacttcaacactgttcactgccaggaacaggacatcactacagccaacggcgaagaggacggtcatgccatatccaccatcaaagaggagcccaaaattgacttcagggtctacaatctgctaactccagactctaaaatgggagagccagtttctgagagtgtggtgaagagagagaagctggaagagaaggacgggctcaaagagaaagtttggaccgagagttccagtgatgaccttcgcaatgtgacttggagaggggcagacatcctgcgggggagtccgtcatacacccaagcaagcctggggctgctgacgcctgtgtctggcacccaagagcagacaaagactctaagggatagtcccaatgtggaggccgcccatctggcgcgacctatttatggcttggctgtggaaaccaagggattcctgcagggggcgccagctggcggagagaagtctggggccctcccccagcagtatcctgcatcgggagaaaacaagtccaaggatgaatcccagtccctgttacggaggcgtagaggctccggtgttttttgtgccaattgcctgaccacaaagacctctctctggcgaaagaatgcaaatggcggatatgtatgcaacgcgtgtggcctctaccagaagcttcactcgactcccaggcctttaaacatcattaaacaaaacaacggtgagcagattattaggaggagaacaagaaagcgccttaacccagaggcacttcaggctgagcagctcaacaaacagcagaggggcagcaatgaggagcaagtcaatggaagcccgttagagaggaggtcagaagatcatctaactgaaagtcaccagagagaaattccactccccagcctaagtaaatacgaagcccagggttcattgactaaaagccattctgctcagcagccagtcctggtcagccaaactctggatattcacaaaaggatgcaacctttgcacattcagataaaaagtcctcaggaaagtactggagatccaggaaatagttcatccgtatctgaagggaaaggaagttctgagagaggcagtcctatagaaaagtacatgagacctgcgaaacacccaaattattcaccaccaggcagccctattgaaaagtaccagtacccactttttggacttccctttgtacataatgacttccagagtgaagctgattggctgcggttctggagtaaatataagctctccgttcctgggaatccgcactacttgagtcacgtgcctggcctaccaaatccttgccaaaactatgtgccttatcccaccttcaatctgcctcctcatttttcagctgttggatcagacaatgacattcctctagatttggcgatcaagcattccagacctgggccaactgcaaacggtgcctccaaggagaaaacgaaggcaccaccaaatgtaaaaaatgaaggtcccttgaatgtagtaaaaacagagaaagttgatagaagtactcaagatgaactttcaacaaaatgtgtgcactgtggcattgtctttctggatgaagtgatgtatgctttgcatatgagttgccatggtgacagtggacctttccagtgcagcatatgccagcatctttgcacggacaaatatgacttcacaacacatatccagaggggcctgcataggaacaatgcacaagtggaaaaaaatggaaaacctaaagagtaaaaccttagcacttagcacaattaaatagaaataggttttcttgatgggaattcaatagcttgtaatgtcttatgaagacctattaaaaaaatacttcatagagcctgccttatccaacatgaaattcccttcttttgttattctttcttttgatgagtaggttaccaagattaaaaagtgagataaatggtcaatgagaaagaatggaagatggtaaacaatcactttttaaaacctgttaagtcaaaaccatcttggctaatatgtactggggaaataatccataagagatatcaccagactagaattaatatatttataaagaaagagaccaaaactgtctagaatttgaaagggtttacatattattatactaaagcagtactggactggccattggaccatttgttccaaaacccataaattgttgcctaaatttataatgatcatgaaaccctaggcagaggaggagaaattgaaggtccagggcaatgaaagaaaaatggcgccctctcaatttagtcttctctcattggccatgtttcagattttgacctagaaatgcgagctgtggttaggcttggttagagtgcagcaagcaacatgacagatggtggcacgctgtttttacccagccctgcctgtacatacacatgcacaccctctctgatatttttgtcctttagatgttcaaatactcagtagtccttttgtttgcggtttagattcattttgtccacacatgtacccattttaaaaaacaatgtcctcgatgcttctgtagtgatttcattttagccaggtatttctttcttgtgtgtgatgaaccagtatggatttgcttttctaagcctcctgttggttactaatctcacttggcacattataactaaaggaatcccctcaattcaaaagcatagatggatacaaatgtcagaccgtgggtttaatttgtttagaacacatggcatttcttcacaaggtaacctgctgtatttatttattttcttttggttaaatataatttccaaactttgtggtcaggcagcgtctaaggttacgttaccacagactgacagttggtatatgtaccagccaatcccttcattaaatgtatacagatttagttaagtagcattaaataggattcttagaagtatgtcctcatagaacttttaatacttaaggctttgtaaaaactatccatgaagggaaagctcctcagcataactgctcagggaaatagggctaaataactgaacattaaataattggttaaaggtgctgttagtcgagcctcaatgcttgctacaaggatgtatgtacaaggactgactttaataatttgcattatattgtcccaaccagtagtttattttttgccacggagatgtagaagatattacaagctactggatgcactgtcagattaacttatttcattaaagaagttgggagaacaaataggaaaaaaaaaacttatttttctagtaaatattaatgtattacatttcaaataatggtgcctgacatattgaataattattttctacagtgtacgtatgcaacaaagatattccatcatgcattagagtcagttctggctctgcctagctgtttacatttgcaaatgtagcaaacaaggtaatgaagcaactatttctattgcagtagatatccttttgtgtgtgtgtgtgtgcattaaagttgtaaacggtaacatgaaacaaatgaaagttcttgctataatggtatggaaaacaagaaggaaatgaaaatatttttatgcctacttaggaaaaaaagggtagcacttattcattccaagtacttttttttttttaatttttaagctcttaactcacattgttatgcttaagatgataaacatatatcctctttttattgctttgtctatgtttcatatgaaacatttcagaaattattttgataagtgttgctggaatctgcaacgctgatttttttttgcattctgtagtcgcatttgcactccatttttacattaattcgcagttgctttgtatcattgttttgtttgggttttgtttctttttcacagtgccgggtcttcgtttcttaaagttggatggcaggtagagttcaaccagttcgtgactgttgtagcgaatgaagttaaaaaaatgtctttctgatgttgtgttgtcattttcatttttgcatttttttgtttgcatattaaaaaaagagaaaagagaaagcaagagacagaaatcaggactaagtcctctgcttcagtttcattgttaacgggccttattctgatctcacctgtcgcgtagctctaatattcacataaactgaaataaagaagtggaatgaggagctttgacattcaaattatgtgatgtaatttatcttccttaggaattttgatggatgcatctcaaaatgtatagccagacttgagaggtgacaattaaagatctaaaaaagagaggagattcccccaaacaacaatatttaattttcttagtaaaaagaataacagaatgcatcgtggcaatccttaagcaacattatctatgtggactgcttaaatcagcaaaacaccagaagtttggttaacttgggcaatatgacaagtattactttttgggcaaaactactcattaagcaatttctctagtgtgtcggacacaaataggttctttatttttggcatgtatgcctttttattttcattcaattttttttttttctcagacagacatagtagtatcaactagcattggaaaatacatatcactattcttggaatatttatggtcagtctactttttagtaaaatatttttggatagcgttgacacgatagatcttattccatacttctttattattgataattttattttcattttttgctttcattattatacatattttggtggagaagaggttgggcttttttgaaagagacaaaaatttattataacactaaacactccttttttgacatattaaagcctttattccatctctcaagatatattataaaatttatttttttaatttaagatttctgaattattttatcttaaattgtgattttaaacgagctattatggtacggaactttttttaatgaggaatttcatgatgatttaggaattttctctcttggaaaaggcttcccctgtgatgaaaatgatgtgccagctaaaattgtgtgccatttaaaaactgaaaatattttaaaattatttgtctatattctaaattgagctttggatcaaactttaggccaggaccagctcatgcgttctcattcttccttttctcactctttctctcatcactcacctctgtattcattctgttgtttgggatagaaaaatcataaagagccaacccatctcagaacgttgtggattgagagagacactacatgactccaagtatatgagaaaaggacagagctctaattgataactctgtagttcaaaaggaaaagagtatgcccaattctctctacatgacatattgagattttttttaatcaacttttaagatagtgatgttctgttctaaactgttctgttttagtgaaggtagatttttataaaacaagcatggggattcttttctaaggtaatattaatgagaagggaaaaaagtatctttaacagctctttgttgaagcctgtggtagcacattatgtttataattgcacatgtgcacataatctattatgatccaatgcaaatacagctccaaaaatattaaatgtatatatattttaaaatgcctgaggaaatacatttttcttaataaactgaagagtctcagtatggctattaaaataattattagcctcctgttgtgtggctgcaaaacatcacaaagtgaccggtcttgagacctgtgaactgctgccctgtttagtaaataaaattaatgcatttctagagggggaatatctgccatccagtggtggaaatgtggagtaaagaagctggtggtctgcttctgtgctgtatgccagccttttgccttaagttgagaggaggtcaactttagctactgtctttggtttgagagccatggcaaaaaaaaaaaaagaaaaaaagatcaagtcgtctttggtgagccagtaaggtgaaagcttgctgactgtccaaggcacaagagaaaattgaggaattgaaatgcaacctgagtatcaaactaaatattctaatcaaaggtaggtactgttaggtggaattctatcagcaggcaactgcaaatgagaagaagatagaaggacgcccgtcgggactttggagggcattgttattttcccaaagaaagacggccaagggcagaggcatggattctttgcagagcacttccttttggtttttcagtactgtttcatagacagtgggctcacatgttcctgatagtgctgcagttgcttagaaagcatcccagttaattgcagtaattagaacttctggaatatgctagggcagaagtatgtcaagtatgtcacatgaagaaaatgtgaaattcaagagtaatccacacgtgagaaactagacaatgtacattcatgtgttctcttgaaaggaaagggagagctgtaagcttcactctgtcctacaccggagaaaagcaggaataactttaccgtggaaataatgtttagcttttatcagagaaaattgtccttctagagcatagagtcccaaaactcaattctggttttcccctgttttttttttttttttttttcccaacatatgaactgcagcatatcactttttctttttgtgcctcaggttcctcacctgtaaaattgaaaaatatatgtattaataatattattaataataataatggtaatgtagtacttgtttgtaaagcactttgagatccttggttgaaaggcaccataggagtgccaagtattattatgtggccaagggggttatttaaactgtcagttcccaaaggccaggaaaggttggggtcatttttcttaaagacgagctgtaaatatcaactaggcagccaatagtgttgactatgaagatgcaaaactattactaggctgataaaatcatagtttcttaatggctaccaataaggcaaatatcacaataataaacgccaaattccttagggcggactatttgacaaccacatggaaaactttgggggaggcatgaggggggaacatctcaaaatgccaatgtaaaatttaacttacagcaatattcaccagcagaaaatgtctttcatatggaatgatttcatgttgctaagaaaaagaattcaatttgtagtcctgatttgaatactagaatgttggctataatagttctgttcttacaacacatgaaattttttcgttttattttattttgttttcatagtgcatgttcatttctactcacaaacatgttcttggtgtatttcttatgcaaacaatcttcaggcagcaaagatgtctgttacatctaaacttgaataataaagttttaccaccagttacaca

SEQ ID NO: 1061 - protein, 1294 aa, Homo sapiens
MPYEVNAGYDFTNMVRKKNPPLRNVASEGEGQILEPIGTESKVSGKNKEFSADQMSENTDQSDAAELNHKEEHSLHVQDPSSSSKKDLKSAVLSEKAGFNYESPSKGGNFPSFPHDEVTDRNMLAFSSPAAGGVCEPLKSPQRAEADDPQDMACTPSGDSLETKEDQKMSPKATEETGQAQSGQANCQGLSPVSVASKNPQVPSDGGVRLNKSKTDLLVNDNPDPAPLSPELQDFKCNICGYGYYGNDPTDLIKHFRKYHLGLHNRTRQDAELDSKILALHNMVQFSHSKDFQKVNRSVFSGVLQDINSSRPVLLNGTYDVQVTSGGTFIGIGRKTPDCQGNTKYFRCKFCNFTYMGNSSTELEQHFLQTHPNKIKASLPSSEVAKPSEKNSNKSIPALQSSDSGDLGKWQDKITVKAGDDTPVGYSVPIKPLDSSRQNGTEATSYYWCKFCSFSCESSSSLKLLEHYGKQHGAVQSGGLNPELNDKLSRGSVINQNDLAKSSEGETMTKTDKSSSGAKKKDFSSKGAEDNMVTSYNCQFCDFRYSKSHGPDVIVVGPLLRHYQQLHNIHKCTIKHCPFCPRGLCSPEKHLGEITYPFACRKSNCSHCALLLLHLSPGAAGSSRVKHQCHQCSFTTPDVDVLLFHYESVHESQASDVKQEANHLQGSDGQQSVKESKEHSCTKCDFITQVEEEISRHYRRAHSCYKCRQCSFTAADTQSLLEHFNTVHCQEQDITTANGEEDGHAISTIKEEPKIDFRVYNLLTPDSKMGEPVSESVVKREKLEEKDGLKEKVWTESSSDDLRNVTWRGADILRGSPSYTQASLGLLTPVSGTQEQTKTLRDSPNVEAAHLARPIYGLAVETKGFLQGAPAGGEKSGALPQQYPASGENKSKDESQSLLRRRRGSGVFCANCLTTKTSLWRKNANGGYVCNACGLYQKLHSTPRPLNIIKQNNGEQIIRRRTRKRLNPEALQAEQLNKQQRGSNEEQVNGSPLERRSEDHLTESHQREIPLPSLSKYEAQGSLTKSHSAQQPVLVSQTLDIHKRMQPLHIQIKSPQESTGDPGNSSSVSEGKGSSERGSPIEKYMRPAKHPNYSPPGSPIEKYQYPLFGLPFVHNDFQSEADWLRFWSKYKLSVPGNPHYLSHVPGLPNPCQNYVPYPTFNLPPHFSAVGSDNDIPLDLAIKHSRPGPTANGASKEKTKAPPNVKNEGPLNVVKTEKVDRSTQDELSTKCVHCGIVFLDEVMYALHMSCHGDSGPFQCSICQHLCTDKYDFTTHIQRGLHRNNAQVEKNGKPKE

SEQ ID NO: 1062 - DNA, 6463 bp, Homo sapiens
atcctgggctcccagctggagaggcggaggcagctccagggggctggaagtggaagcgcagcggcagaaggagagggagagagaaagagagagaggctaattaaaaaaggatactccgagggaagagagcaagggcggtgcgccgccaaggaccaactagcggcggagcttcgatcttgcctaggcgcggagagctcccaacctgggctggaaccttgcccagcacaggtggctgctacaccccatgtaaaaagcggaaaataaaatgaagattttccagcgcaagatgcggtactggttgcttccaccttttttggcaattgtttatttctgcaccattgtccaaggtcaagtggctccacccacaaggttaagatataatgtaatatctcatgacagtatacagatttcatggaaggctccaagagggaaatttggtggttacaaacttcttgtgactccaacttcaggtggaaaaactaaccagctgaatctgcagaacactgcaactaaagcaattattcaaggccttatgccagaccagaattacacagttcaaattattgcatacaataaagataaagaaagcaagccagctcaaggccaattcagaattaaagatttagaaaaaagaaaggatccaaagcccagagtcaaagttgtggacagaggaaatgggagtagaccatcttcaccagaagaagtgaaatttgtctgtcaaactccagcaattgctgacattgtaatcctggtcgatggttcatggagtattggaagattcaacttcagactggttcggcatttcttggaaaacctggttacagcattcgatgtgggctcagagaagacacgaattggtcttgcacagtatagtggtgaccccagaatagaatggcacttgaatgcatttagcacaaaagatgaagtgattgaagctgtccgaaacctcccatataaaggaggaaatacactaacaggtcttgctttgaactacatttttgaaaatagcttcaaaccagaagcaggatcaaggactggagtatccaaaattggcattttaatcacagatggaaaatcccaagatgacattattccaccatctagaaatcttcgtgagtctggtgtagaactgtttgccataggggtgaaaaacgcggatgtgaatgagctgcaggagatcgcctctgaaccagacagcactcatgtgtacaatgttgccgaattcgatctgatgcacacagttgtggagagtctgaccaggactctctgctctagagtggaagaacaggacagagaaattaaagcctcagcccatgccatcactgggccgcctacggagttgattacttctgaagtcactgccagaagctttatggttaactggactcatgccccaggaaatgtggaaaaatacagagttgtgtattatcctaccaggggtggaaaaccagacgaggtggtggtagatggaactgtatcttccacagtgttgaaaaacttgatgtctttaactgaatatcagatagcagtctttgcaatctatgcccacactgctagtgaaggcctacggggaactgaaactacacttgctttaccgatggcttctgaccttctactgtacgacgtgactgagaacagcatgcgagtcaaatgggatgcagtgcctggggcctcaggttacctgatcctttatgctcctctaacagagggcctggctggggatgaaaaagagatgaaaattggagagacccacacagatattgaattgagtgggttgttgcccaatacagaatacacagtcacagtttatgccatgtttggagaagaggccagtgatcctgttacgggacaagaaacaacattggctttaagtccaccaagaaacctgagaatctccaatgttggctctaacagtgctcgattaacctgggacccaacttcaagacagatcaatggttatcgaattgtatataacaatgcagatgggactgaaatcaatgaggttgaagtcgatcctattactaccttccctctgaagggcttgacacctctcacagagtatactattgctattttctccatctatgatgaaggacagtcagagcctctgactggagtttttaccaccgaggaagttccagcccagcaatacttagaaattgatgaggtgacgacagacagttttagggtgacctggcatcccctctcagctgatgaagggctacacaaattgatgtggattccagtctatggggggaagactgaggaggttgtcctgaaagaagagcaggactcacatgttattgaaggcctggagcccggtacggagtatgaagtttcactattggccgtacttgatgatggaagcgagagtgaggtggtgactgctgtcgggaccacacttgacagtttttggacagaaccagctacaaccatagtgcctaccacatctgtgacttcagttttccagacgggaatcagaaacctagttgtaggtgatgaaactacttctagcctgcgggtaaaatgggacatttctgacagcgatgtgcagcagtttagggtgacctacatgacagctcaaggggaccctgaggaagaagtcataggaacggttatggtgcctggaagccagaacaacctccttctgaagcctctgcttcctgatactgaatacaaagtcacagtgactcccatctacacggatggcgaaggcgtcagcgtctccgctcctggaaaaaccttaccatcctcggggccccagaacttgcgggtgtccgaggaatggtataaccggttgcgcattacgtgggaccccccatcttccccggtgaaaggctatagaattgtctacaaacctgtcagtgttcctggtccaacactggaaacgtttgtgggagctgacattaacaccatccttatcacaaacctcctcagcggaatggactacaatgtgaagatatttgcctcccaggcctcaggcttcagcgacgccctgacaggcatggtgaaaacattgttcttgggtgttaccaatctccaagccaaacatgttgaaatgaccagcttgtgtgcccactggcaggtacatcgccatgccacagcctatagggttgttatagaatccctccaggataggcaaaagcaagaatccactgtgggtggagggacaaccaggcattgcttctatggacttcagcctgattctgaatataaaatcagtgtttatacaaagctccaggagattgaaggacctagtgtgagcataatggaaaaaacacaatcacttcctacacgaccaccaacttttcctccaaccattccaccagcaaaagaagtatgtaaggcggccaaggctgacctggtatttatggtggatggatcctggagcattggagatgaaaatttcaataagatcatcagctttctatacagcactgttggagccctgaacaagattggcacagatggaacccaagttgcaatggttcagttcactgatgatcccagaacagaatttaaactaaatgcttacaaaaccaaagagactcttcttgatgcaattaaacacatttcatacaaaggaggaaatacaaaaacaggaaaagcaattaagtatgttcgagataccttgttcactgcagagtcaggtacaagaaggggcatcccaaaggttatcgtggttataactgatggaagatcacaagatgatgtgaacaaaatctccagggagatgcaattagatggctatagcatttttgcaattggtgtggccgatgcagattactcggagttggttagcattggcagtaagcccagcgcacgccatgtcttctttgtggatgactttgacgcctttaagaaaatcgaagatgagttaattacttttgtctgcgaaacagcatcagcaacctgtccagtggtacacaaggatggcattgatcttgcaggatttaagatgatggaaatgtttggtttggttgaaaaagatttttcatcagtggaaggggtttctatggagcctggtaccttcaatgtgtttccatgttaccaactccataaagatgccctggtttcccagccaaccaggtacttgcacccagaaggattgccctccgactacacaatcagttttctattccggattcttcctgacactccacaggagccatttgctctttgggagattttaaataaaaattctgacccattggttggggttattttagacaatggtgggaaaactctaacatatttcaactatgaccagagtggggattttcaaactgttactttcgaaggacctgaaattaggaaaattttttatggaagctttcacaagctacacattgttgtcagtgagactttggtcaaagtggttattgactgcaagcaagtgggtgagaaggcaatgaacgcatcagctaatatcacgtcagatggtgtagaagtgctagggaaaatggttcgatcaagaggaccaggtggaaactctgcaccgttccagttacagatgtttgatattgtttgctccacatcatgggccaatacagacaaatgctgtgaacttccaggcctgagagatgatgagtcttgcccagaccttccccattcctgctcctgttctgaaaccaatgaagtggctctgggaccagcgggcccaccaggtggtccaggactccgaggaccaaagggccagcaaggtgaaccgggtccaaagggaccagatggccctcggggtgaaattggtctgccaggacctcagggtccacctggacctcaaggaccaagtggtctgtccattcaaggaatgcccggaatgccaggagaaaaaggagagaaaggagatactggccttccaggtccacagggtatcccaggaggcgttggttcaccaggacgtgatggctcaccaggccagaggggccttccgggaaaggatggatcctcgggacctccaggaccaccagggccaataggcattcctggcacccctggagtcccagggatcacaggaagcatgggaccgcaaggcgccctgggaccacctggtgtccctggagcaaagggggaacgaggagagcggggtgacctgcagtctcaagccatggtgagatcagtggcgcgtcaagtatgcgaacagctcatccagagtcacatggccaggtacactgccatcctcaaccagattcccagccactcctcatccatccggactgtccaagggcctcctggggagcctgggaggccaggctcacctggagcccctggtgaacaaggacccccaggcacaccaggcttccccggaaatgcaggcgtgccagggaccccaggagaacgaggtctaactggtatcaaaggagaaaaaggaaatccaggcgttggaacccaaggtccaagaggcccccctggaccagcaggaccttcaggggagagtcggcctggcagccctgggccccctggctctcctggaccaagaggcccaccaggtcatctgggggttcctggaccccaaggtccttctggccagcctggatattgtgacccctcatcatgttctgcctatggtgtgagagctccccatccagatcagccagagttcacccctgtccaagatgagctggaagccatggaactgtggggccctggagtctgatagcctcaggagaaatttgaagaccaactgcaagaactcttaaggaatcttgtttgagaaaatgttgttatgtggtttgtatgctacttttggggggcagggctcatttcagcagcctaaatctcctccttggataatgttaatattattattattattaacaaaaaatatatatttttaaaaagttcccttaatctatgacatggtagcaatgatttccctttggtgtcttaatggcatgtcagataatttgtttttccagagaagagagctcaaagaggaattgggaaaaataaattgaactctggaatcttctctctcaagtcctaaaatgaacaaacagatatgattgtgtttgagggaaatatgtccctagcaggaaaagaattcaaagaggttcaaagaatatgtcacttactcctacttgctgtaggaataaccttgctgataagaaaaaaagggacaatattggagaaactacctcttgtttaattgatctgtccaactctgagatcacttggtaactggtttcatgtgtatccaaaaatcagcatttggatttaagctttctgaatttggtagtttaagaaacagatttagtttttcaatggttttaactcatgtgaaataatgattttccaccagctctgatgcaaagagatataattttaatgaacgatttatccagcagtgtgttccaggggttgcctctccttatctacggggattactttgtacatgcagataagttttcgcaaacctatttccattttcttttgtaagcaaataaaactttaaaacaaaaaa

SEQ ID NO: 1063 - protein, 1796 aa, Homo sapiens
MKIFQRKMRYWLLPPFLAIVYFCTIVQGQVAPPTRLRYNVISHDSIQISWKAPRGKFGGYKLLVTPTSGGKTNQLNLQNTATKAIIQGLMPDQNYTVQIIAYNKDKESKPAQGQFRIKDLEKRKDPKPRVKVVDRGNGSRPSSPEEVKFVCQTPAIADIVILVDGSWSIGRFNFRLVRHFLENLVTAFDVGSEKTRIGLAQYSGDPRIEWHLNAFSTKDEVIEAVRNLPYKGGNTLTGLALNYIFENSFKPEAGSRTGVSKIGILITDGKSQDDIIPPSRNLRESGVELFAIGVKNADVNELQEIASEPDSTHVYNVAEFDLMHTVVESLTRTLCSRVEEQDREIKASAHAITGPPTELITSEVTARSFMVNWTHAPGNVEKYRVVYYPTRGGKPDEVVVDGTVSSTVLKNLMSLTEYQIAVFAIYAHTASEGLRGTETTLALPMASDLLLYDVTENSMRVKWDAVPGASGYLILYAPLTEGLAGDEKEMKIGETHTDIELSGLLPNTEYTVTVYAMFGEEASDPVTGQETTLALSPPRNLRISNVGSNSARLTWDPTSRQINGYRIVYNNADGTEINEVEVDPITTFPLKGLTPLTEYTIAIFSIYDEGQSEPLTGVFTTEEVPAQQYLEIDEVTTDSFRVTWHPLSADEGLHKLMWIPVYGGKTEEVVLKEEQDSHVIEGLEPGTEYEVSLLAVLDDGSESEVVTAVGTTLDSFWTEPATTIVPTTSVTSVFQTGIRNLVVGDETTSSLRVKWDISDSDVQQFRVTYMTAQGDPEEEVIGTVMVPGSQNNLLLKPLLPDTEYKVTVTPIYTDGEGVSVSAPGKTLPSSGPQNLRVSEEWYNRLRITWDPPSSPVKGYRIVYKPVSVPGPTLETFVGADINTILITNLLSGMDYNVKIFASQASGFSDALTGMVKTLFLGVTNLQAKHVEMTSLCAHWQVHRHATAYRVVIESLQDRQKQESTVGGGTTRHCFYGLQPDSEYKISVYTKLQEIEGPSVSIMEKTQSLPTRPPTFPPTIPPAKEVCKAAKADLVFMVDGSWSIGDENFNKIISFLYSTVGALNKIGTDGTQVAMVQFTDDPRTEFKLNAYKTKETLLDAIKHISYKGGNTKTGKAIKYVRDTLFTAESGTRRGIPKVIVVITDGRSQDDVNKISREMQLDGYSIFAIGVADADYSELVSIGSKPSARHVFFVDDFDAFKKIEDELITFVCETASATCPVVHKDGIDLAGFKMMEMFGLVEKDFSSVEGVSMEPGTFNVFPCYQLHKDALVSQPTRYLHPEGLPSDYTISFLFRILPDTPQEPFALWEILNKNSDPLVGVILDNGGKTLTYFNYDQSGDFQTVTFEGPEIRKIFYGSFHKLHIVVSETLVKVVIDCKQVGEKAMNASANITSDGVEVLGKMVRSRGPGGNSAPFQLQMFDIVCSTSWANTDKCCELPGLRDDESCPDLPHSCSCSETNEVALGPAGPPGGPGLRGPKGQQGEPGPKGPDGPRGEIGLPGPQGPPGPQGPSGLSIQGMPGMPGEKGEKGDTGLPGPQGIPGGVGSPGRDGSPGQRGLPGKDGSSGPPGPPGPIGIPGTPGVPGITGSMGPQGALGPPGVPGAKGERGERGDLQSQAMVRSVARQVCEQLIQSHMARYTAILNQIPSHSSSIRTVQGPPGEPGRPGSPGAPGEQGPPGTPGFPGNAGVPGTPGERGLTGIKGEKGNPGVGTQGPRGPPGPAGPSGESRPGSPGPPGSPGPRGPPGHLGVPGPQGPSGQPGYCDPSSCSAYGVRAPHPDQPEFTPVQDELEAMELWGPGV

SEQ ID NO: 1064 - DNA, 1113 bp, Homo sapiens
gacgcatttccggttcccttcgtttaggtcggctggaaattatgtcctccgtcggttttccgcagtttttccaccaagcgagatatttttgggagttattccctaaataactgcattatatgctcctttcatgacgaaattgctgccgtggagaagactggaggaaactcgaggaagagggagaagccgacaagtgctcgacgggctaggaactgtcctgcttgggtgttagcgtttcccgccgggccagtaaggctgagtgacccggcgtggctactaggagaaggacgtacggtcctgctagtagaggaatatgtcgagtttctctagggcgccccagcaatgggccacttttgctagaatatggtatctcttagatgggaaaatgcagccacctggcaaacttgctgctatggcatctataagacttcagggattacataaacctgtgtaccatgcactgagtgactgtggggatcatgttgttataatgaacacaagacacattgcattttctggaaacaaatgggaacaaaaagtatactcttcgcatactggctacccaggtggatttagacaagtaacagctgctcagcttcacctgagggatccagtggcaattgtaaaactagctatttatggcatgctgccaaaaaaccttcacagaagaacaatgatggaaaggttgcatctttttccagatgagtatattccagaagatattcttaagaatttagtagaggagcttcctcaaccacgaaaaatacctaaacgtctagatgagtacacacaagaagaaatagacgccttcccaagattgtggactccacctgaagattatcggctataagagaataagaattgcagaaaataacagtgaagtgattgaaactttcttctgatgagtttctctaacctacaggatggagtaaaacaactgctacagttcagcacctgttttatgtgccgaatcactgtggggaaaggtcaggaaggtatagtccttcaataggaaattgtaattaaaatataattttatagaaccatttttatgtaatctgatttgaatgttatagttgataataataaaatcacttacttggttgactaaaa

SEQ ID NO: 1065 - protein, 178 aa, Homo sapiens
MSSFSRAPQQWATFARIWYLLDGKMQPPGKLAAMASIRLQGLHKPVYHALSDCGDHVVIMNTRHIAFSGNKWEQKVYSSHTGYPGGFRQVTAAQLHLRDPVAIVKLAIYGMLPKNLHRRTMMERLHLFPDEYIPEDILKNLVEELPQPRKIPKRLDEYTQEEIDAFPRLWTPPEDYRL

SEQ ID NO: 1066 - DNA, 3081 bp, Homo sapiens
gatgtggaagccgagacctaaagttggggggtgatctctgaggagatggatcggtacctgctgctggtgatctggggggaaggaaaattcccgtcggcggccagtagggaggcagaacatgggccagaggtgtcgtcgggtgagggtactgagaatcagccggacttcacagcagcaaatgtttatcacctcttgaaaagaagcattagtgcttcaattaatccagaagatagtactttccctgcctgttcagtgggaggtatacctggttccaagaagtggttctttgcagtgcaggcaatatatggattttatcagttttgtagttctgattggcaagagatacattttgatacagaaaaagataaaattgaagatgttcttcaaacgaatatcgaagaatgtttgggtgctgttgagtgttttgaagaagaagacagtaatagcagggaatcattatccttggctgatctctatgaagaagctgcagaaaatttgcatcagctgtcagacaagcttcctgctcctggtagagcaatggtagatataatactgttgctttctgacaaagatcctcctaaattgaaagactatttacctactgtaggagcattaaaacatttgagagaatggtattcagcaaagatcactatagcaggaaatcattgtgaaataaactgtcagaaaattgcagaatacctttctgctaatgttgtatctttagaagatctcagaaatgttattgactcaaaggaattatggagggggaaaatacagatatgggaaagaaagtttggatttgaaattagttttcctgaattttgtttaaagggagtcacacttaagaattttagtacttctaatttaaatactgacttccttgccaaaaagatcataccatcaaaggataagaatattttgccaaaggttttccattattatggccctgctttagaatttgtgcagatgataaaattatcagatctaccctcctgctatatgtcggatattgaatttgagttaggattgacaaacagtaccaaacagaattctgtgttgctgttggagcagatttcttctctgtgtagcaaggttggtgctctttttgtattgccatgtaccattagtaacatactgattccacctcccaaccaactcagttcaagaaaatggaaggaatatatagctaaaaagcctaaaacaatcagtgttccagatgttgaagtgaaaggagagtgttctagctattatctcttgttacaaggtaatggcaatagaagatgtaaagccacattgattcactcagccaaccagatcaatggctcatttgcactcaatttaattcatggaaagatgaaaacaaagacagaagaagccaaattgagttttccttttgacttattatcacttccacatttttctggggagcagattgtacagagagagaaacagttagctaatgttcaagttttagctttggaagaatgcctaaaaagacgaaagttggcaaagcagcctgaaacagtttctgttgctgaactcaaaagtctgttagtactcacaaggaaacactttttagattattttgatgctgtgattcctaaaatgattctaagaaagatggacaaaattaaaaccttcaatatattaaatgattttagtccagtggaacctaattcctcaagtctaatggaaaccaatcctctggaatggccagaaaggcatgttcttcaaaatttggaaacttttgaaaaaactaaacaaaaaatgagaactggttcattacctcattcatctgaacagttgctgggccacaaagagggtcctcgggactcaatcacattgttggatgctaaagaattgctgaagtactttacctcagatggattacccattggagatcttcaacctttaccgattcaaaagggggaaaagacttttgttttgacaccagaacttagtcctgggaaacttcaggtcttaccttttgagaaagcctcagtatgtcattatcatggaattgaatattgcttggatgaccgaaaagctttggaaagagatggaggattttctgaacttcagtctcgtcttattcgttatgaaactcaaactacctgcaccagagaaagttttccagtacctactgtgttgagccctcttccatctcctgtagtttcgtcagatcctggaagtgtccctgacggagaagttttacaaaatgaacttcgaactgaagtatcccgattgaaacggagatctaaagatctgaattgcctttatcccagaaaaagacttgtgaaatctgaaagttcagagtctcttctttctcagacaactggtaatagtaatcactatcatcatcatgtgacatccagaaagccacaaacagaacggtccttaccagtgacttgtccattggttccaattcctagctgtgaaactccaaaacttgctacaaagaccagttcaggtcaaaaaagtatgcatgaatcaaaaacatcaaggcaaattaaggaatcaagatcacagaaacacacacggatactgaaagaagtagttactgaaaccctgaagaaacacagtattaccgagactcatgaatgtttcactgcatgcagccagcgtctctttgaaatctctaagttctatctaaaggatcttaaaacttcaaggggtctatttgaagaaatgaagaaaacagcaaacaacaatgctgtacaggtgattgactgggtattagaaaagacaagcaagaaatgatacataatcattctctttaagacaattataaattggatggagctattattcactacttcttttcttagtttgaaaattataaacaaattttaagctttattcaaagaatagatgttatatttctaaagaatttcatgaatatatattctatatttgtatagtttgagggatgctatgttaatgtatttttaattagatacatattttgtaaagtgttactatattttaaagttatttttatatgttttaaaatgtttactcttatttaattattacaataaacagaatttttttttttttaaaaaaaaaaaaaaaaaaaaa

SEQ ID NO: 1067 - protein, 904 aa, Homo sapiens
MDRYLLLVIWGEGKFPSAASREAEHGPEVSSGEGTENQPDFTAANVYHLLKRSISASINPEDSTFPACSVGGIPGSKKWFFAVQAIYGFYQFCSSDWQEIHFDTEKDKIEDVLQTNIEECLGAVECFEEEDSNSRESLSLADLYEEAAENLHQLSDKLPAPGRAMVDIILLLSDKDPPKLKDYLPTVGALKHLREWYSAKITIAGNHCEINCQKIAEYLSANVVSLEDLRNVIDSKELWRGKIQIWERKFGFEISFPEFCLKGVTLKNFSTSNLNTDFLAKKIIPSKDKNILPKVFHYYGPALEFVQMIKLSDLPSCYMSDIEFELGLTNSTKQNSVLLLEQISSLCSKVGALFVLPCTISNILIPPPNQLSSRKWKEYIAKKPKTISVPDVEVKGECSSYYLLLQGNGNRRCKATLIHSANQINGSFALNLIHGKMKTKTEEAKLSFPFDLLSLPHFSGEQIVQREKQLANVQVLALEECLKRRKLAKQPETVSVAELKSLLVLTRKHFLDYFDAVIPKMILRKMDKIKTFNILNDFSPVEPNSSSLMETNPLEWPERHVLQNLETFEKTKQKMRTGSLPHSSEQLLGHKEGPRDSITLLDAKELLKYFTSDGLPIGDLQPLPIQKGEKTFVLTPELSPGKLQVLPFEKASVCHYHGIEYCLDDRKALERDGGFSELQSRLIRYETQTTCTRESFPVPTVLSPLPSPVVSSDPGSVPDGEVLQNELRTEVSRLKRRSKDLNCLYPRKRLVKSESSESLLSQTTGNSNHYHHHVTSRKPQTERSLPVTCPLVPIPSCETPKLATKTSSGQKSMHESKTSRQIKESRSQKHTRILKEVVTETLKKHSITETHECFTACSQRLFEISKFYLKDLKTSRGLFEEMKKTANNNAVQVIDWVLEKTSKK

SEQ ID NO: 1068 - DNA, 8453 bp, Homo sapiens
gcagtggtttctcctccttcctcccaggaagggccaggaaaatggccctggtcctggagatcttcaccctgctggcctccatctgctgggtgtcggccaatatcttcgagtaccaggtggatgcccagccccttcgtccctgtgagctgcagagggaaacggcctttctgaagcaagcagactacgtgccccagtgtgcagaggatggcagcttccagactgtccagtgccagaacgacggccgctcctgctggtgtgtgggtgccaacggcagtgaagtgctgggcagcaggcagccaggacggcctgtggcttgtctgtcattttgtcagctacagaaacagcagatcttactgagtggctacattaacagcacagacacctcctacctccctcagtgtcaggattcaggggactacgcgcctgttcagtgtgatgtgcagcaggtccagtgctggtgtgtggacgcagaggggatggaggtgtatgggacccgccagctggggaggccaaagcgatgtccaaggagctgtgaaataagaaatcgtcgtcttctccacggggtgggagataagtcaccaccccagtgttctgcggagggagagtttatgcctgtccagtgcaaatttgtcaacaccacagacatgatgatttttgatctggtccacagctacaacaggtttccagatgcatttgtgaccttcagttccttccagaggaggttccctgaggtatctgggtattgccactgtgctgacagccaagggcgggaactggctgagacaggtttggagttgttactggatgaaatttatgacaccatttttgctggcctggaccttccttccaccttcactgaaaccaccctgtaccggatactgcagagacggttcctcgcagttcaatcagtcatctctggcagattccgatgccccacaaaatgtgaagtggagcggtttacagcaaccagctttggtcacccctatgttccaagctgccgccgaaatggcgactatcaggcggtgcagtgccagacggaagggccctgctggtgtgtggacgcccaggggaaggaaatgcatggaacccggcagcaaggggagccgccatcttgtgctgaaggccaatcttgtgcctccgaaaggcagcaggccttgtccagactctactttgggacctcaggctacttcagccagcacgacctgttctcttccccagagaaaagatgggcctctccaagagtagccagatttgccacatcctgcccacccacgatcaaggagctctttgtggactctgggcttctccgcccaatggtggagggacagagccaacagttttctgtctcagaaaatcttctcaaagaagccatccgagcaatttttccctcccgagggctggctcgtcttgcccttcagtttaccaccaacccaaagagactccagcaaaacctttttggagggaaatttttggtgaatgttggccagtttaacttgtctggagcccttggcacaagaggcacatttaacttcagtcaatttttccagcaacttggtcttgcaagcttcttgaatggagggagacaagaagatttggccaagccactctctgtgggattagattcaaattcttccacaggaacccctgaagctgctaagaaggatggtactatgaataagccaactgtgggcagctttggctttgaaattaacctacaagagaaccaaaatgccctcaaattccttgcttctctcctggagcttccagaattccttctcttcttgcaacatgctatctctgtgccagaagatgtggcaagagatttaggtgatgtgatggaaacggtactcagctcccagacctgtgagcagacacctgaaaggctatttgtcccatcatgcacgacagaaggaagctatgaggatgtccaatgcttttccggagagtgctggtgtgtgaattcctggggcaaagagcttccaggctcaagagtcagaggtggacagccaaggtgccccacagactgtgaaaagcaaagggctcgcatgcaaagcctcatgggcagccagcctgctggctccaccttgtttgtccctgcttgtactagtgagggacatttcctgcctgtccagtgcttcaactcagagtgctactgtgttgatgctgagggtcaggccattcctggaactcgaagtgcaatagggaagcccaagaaatgccccacgccctgtcaattacagtctgagcaagctttcctcaggacggtgcaggccctgctctctaactccagcatgctacccaccctttccgacacctacatcccacagtgcagcaccgatgggcagtggagacaagtgcaatgcaatgggcctcctgagcaggtcttcgagttgtaccaacgatgggaggctcagaacaagggccaggatctgacgcctgccaagctgctagtgaagatcatgagctacagagaagcagcttccggaaacttcagtctctttattcaaagtctgtatgaggctggccagcaagatgtcttcccggtgctgtcacaatacccttctctgcaagatgtcccactagcagcactggaagggaaacggccccagcccagggagaatatcctcctggagccctacctcttctggcagatcttaaatggccaactcagccaatacccggggtcctactcagacttcagcactcctttggcacattttgatcttcggaactgctggtgtgtggatgaggctggccaagaactggaaggaatgcggtctgagccaagcaagctcccaacatgtcctggctcctgtgaggaagcaaagctccgtgtactgcagttcattagggaaacggaagagattgtttcagcttccaacagttctcggttccctctgggggagagtttcctggtggccaagggaatccggctgaggaatgaggacctcggccttcctccgctcttcccgccccgggaggctttcgcggagcagtttctgcgtgggagtgattacgccattcgcctggcggctcagtctaccttaagcttctatcagagacgccgcttttccccggacgactcggctggagcatccgcccttctgcggtcgggcccctacatgccacagtgtgatgcgtttggaagttgggagcctgtgcagtgccacgctgggactgggcactgctggtgtgtagatgagaaaggagggttcatccctggctcactgactgcccgctctctgcagattccacagtgcccgacaacctgcgagaaatctcgaaccagtgggctgctttccagttggaaacaggctagatcccaagaaaacccatctccaaaagacctgttcgtcccagcctgcctagaaacaggagagtatgccaggctgcaggcatcgggggctggcacctggtgtgtggaccctgcatcaggagaagagttgcggcctggctcgagcagcagtgcccagtgcccaagcctctgcaatgtgctcaagagtggagtcctctccaggagagtcagcccaggctatgtcccagcctgcagggcagaggatgggggcttttccccagtgcaatgtgaccaggcccagggcagctgctggtgtgtcatggacagcggagaagaggtgcctgggacgcgcgtgaccgggggccagcccgcctgtgagagcccgcggtgtccgctgccattcaacgcgtcggaggtggttggtggaacaatcctgtgtgagacaatctcgggccccacaggctctgccatgcagcagtgccaattgctgtgccgccagggctcctggagcgtgtttccaccagggccattgatatgtagcctggagagcggacgctgggagtcacagctgcctcagccccgggcctgccaacggccccagctgtggcagaccatccagacccaagggcactttcagctccagctcccgccgggcaagatgtgcagtgctgactacgcggatttgctgcagactttccaggttttcatattggatgagctgacagcccgcggcttctgccagatccaggtgaagacttttggcaccctggtttccattcctgtctgcaacaactcctctgtgcaggtgggttgtctgaccagggagcgtttaggagtgaatgttacatggaaatcacggcttgaggacatcccagtggcttctcttcctgacttacatgacattgagagagccttggtgggcaaggatctccttgggcgcttcacagatctgatccagagtggctcattccagcttcatctggactccaagacgttcccagcggaaaccatccgcttcctccaaggggaccactttggcacctctcccaggacatggtttgggtgctcggaaggattctaccaagtcttgacaagtgaggccagtcaggacggactgggatgcgttaagtgtcctgaaggaagctattcccaagatgaggaatgcattccttgtcctgttggattctaccaagaacaggcagggagcttggcctgtgtcccatgtcctgtgggcagaacgaccatttctgctggagctttcagccagactcactgtgtcactgactgtcagaggaacgaagcaggcctgcaatgtgaccagaatggccagtatcgagccagccagaaggacaggggcagtgggaaggccttctgtgtggacggcgaggggcggaggctgccatggtgggaaacagaggcccctcttgaggactcacagtgtttgatgatgcagaagtttgagaaggttccagaatcaaaggtgatcttcgacgccaatgctcctgtggctgtcagatccaaagttcctgattctgagttccccgtgatgcagtgcttgacagattgcacagaggacgaggcctgcagcttcttcaccgtgtccacgacggagccagagatttcctgtgatttctatgcttggacaagtgacaatgttgcctgcatgacttctgaccagaaacgagatgcactggggaactcaaaggccaccagctttggaagtcttcgctgccaggtgaaagtgaggagccatggtcaagattctccagctgtgtatttgaaaaagggccaaggatccaccacaacacttcagaaacgctttgaacccactggtttccaaaacatgctttctggattgtacaaccccattgtgttctcagcctcaggagccaatctaaccgatgctcacctcttctgtcttcttgcatgcgaccgtgatctgtgttgcgatggcttcgtcctcacacaggttcaaggaggtgccatcatctgtgggttgctgagctcacccagtgtcctgctttgtaatgtcaaagactggatggatccctctgaagcctgggctaatgctacatgtcctggtgtgacatatgaccaggagagccaccaggtgatattgcgtcttggagaccaggagttcatcaagagtctgacacccttagaaggaactcaagacacctttaccaattttcagcaggtttatctctggaaagattctgacatggggtctcggcctgagtctatgggatgtagaaaagacacagtgccaaggccagcatctccaacagaagcaggtttgacaacagaacttttctcccctgtggacctcaaccaggtcattgtcaatggaaatcaatcactatccagccagaagcactggcttttcaagcacctgttttcagcccagcaggcaaacctatggtgcctttctcgttgtgtgcaggagcactctttctgtcagctcgcagagataacagagagtgcatccttgtacttcacctgcaccctctacccagaggcacaggtgtgtgatgacatcatggagtccaatgcccagggctgcagactgatcctgcctcagatgccaaaggccctgttccggaagaaagttatactggaagataaagtgaagaacttttacactcgcctgccgttccaaaaactgatggggatatccattagaaataaagtgcccatgtctgaaaaatctatttctaatgggttctttgaatgtgaacgacggtgcgatgcggacccatgctgcactggctttggatttctaaatgtttcccagttaaaaggaggagaggtgacatgtctcactctgaacagcttgggaattcagatgtgcagtgaggagaatggaggagcctggcgcattttggactgtggctctcctgacattgaagtccacacctatcccttcggatggtaccagaagcccattgctcaaaataatgctcccagtttttgccctttggttgttctgccttccctcacagagaaagtgtctctggactcgtggcagtccctggccctctcttcagtggttgttgatccatccattaggcactttgatgttgcccatgtcagcactgctgccaccagcaatttctctgctgtccgagacctctgtttgtcggaatgttcccaacatgaggcctgtctcatcaccactctgcaaacccaacctggggctgtgagatgtatgttctatgctgatactcaaagctgcacacatagtctgcagggtcagaactgccgacttctgcttcgtgaagaggccacccacatctaccggaagccaggaatctctctgctcagctatgaggcatctgtaccttctgtgcccatttccacccatggccggctgctgggcaggtcccaggccatccaggtgggtacctcatggaagcaagtggaccagttccttggagttccatatgctgccccgcccctggcagagaggcgcttccaggcaccagagcccttgaactggacaggctcctgggatgccagcaagccaagggccagctgctggcagccaggcaccagaacatccacgtctcctggagtcagtgaagattgtttgtatctcaatgtgttcatccctcagaatgtggcccctaacgcgtctgtgctggtgttcttccacaacaccatggacagggaggagagtgaaggatggccggctatcgacggctccttcttggctgctgttggcaacctcatcgtggtcactgccagctaccgagtgggtgtcttcggcttcctgagttctgggtccggagaggtgagtggcaactgggggctgctggaccaggtggcggctctgacctgggtgcagacccacatccgaggatttggcggggaccctcggcgcgtgtccctggcagcagaccgtggcggggctgatgtggccagcatccaccttctcacggccagggccaccaactcccaacttttccggagagctgtgctgatgggaggctccgcactctccccggccgccgtcatcagccatgagagggctcagcagcaggcaattgctttggcaaaggaggtcagttgccccatgtcatccagccaagaagtggtgtcctgcctccgccagaagcctgccaatgtcctcaatgatgcccagaccaagctcctggccgtgagtggccctttccactactggggtcctgtgatcgatggccacttcctccgtgagcctccagccagagcactgaagaggtctttatgggtagaggtcgatctgctcattgggagttctcaggacgacgggctcatcaacagagcaaaggctgtgaagcaatttgaggaaagtcgaggccggaccagtagcaaaacagccttttaccaggcactgcagaattctctgggtggcgaggactcagatgcccgcgtcgaggctgctgctacatggtattactctctggagcactccacggatgactatgcctccttctcccgggctctggagaatgccacccgggactactttatcatctgccctataatcgacatggccagtgcctgggcaaagagggcccgaggaaacgtcttcatgtaccatgctcctgaaaactacggccatggcagcctggagctgctggcggatgttcagtttgccttggggcttcccttctacccagcctacgaggggcagttttctctggaggagaagagcctgtcgctgaaaatcatgcagtacttttcccacttcatcagatcaggaaatcccaactacccttatgagttctcacggaaagtacccacatttgcaaccccctggcctgactttgtaccccgtgctggtggagagaactacaaggagttcagtgagctgctccccaatcgacagggcctgaagaaagccgactgctccttctggtccaagtacatctcgtctctgaagacatctgcagatggagccaagggcgggcagtcagcagagagtgaagaggaggagttgacggctggatctgggctaagagaagatctcctaagcctccaggaaccaggctctaagacctacagcaagtgaccagcccttgagctccccaaaaacctcacccgaggctgcccactatggtcatctttttctctaaaatagccacttaccttcaataaagtatctacatgcggtgaa

SEQ ID NO: 1069 - protein, 2768 aa, Homo sapiens
MALVLEIFTLLASICWVSANIFEYQVDAQPLRPCELQRETAFLKQADYVPQCAEDGSFQTVQCQNDGRSCWCVGANGSEVLGSRQPGRPVACLSFCQLQKQQILLSGYINSTDTSYLPQCQDSGDYAPVQCDVQQVQCWCVDAEGMEVYGTRQLGRPKRCPRSCEIRNRRLLHGVGDKSPPQCSAEGEFMPVQCKFVNTTDMMIFDLVHSYNRFPDAFVTFSSFQRRFPEVSGYCHCADSQGRELAETGLELLLDEIYDTIFAGLDLPSTFTETTLYRILQRRFLAVQSVISGRFRCPTKCEVERFTATSFGHPYVPSCRRNGDYQAVQCQTEGPCWCVDAQGKEMHGTRQQGEPPSCAEGQSCASERQQALSRLYFGTSGYFSQHDLFSSPEKRWASPRVARFATSCPPTIKELFVDSGLLRPMVEGQSQQFSVSENLLKEAIRAIFPSRGLARLALQFTTNPKRLQQNLFGGKFLVNVGQFNLSGALGTRGTFNFSQFFQQLGLASFLNGGRQEDLAKPLSVGLDSNSSTGTPEAAKKDGTMNKPTVGSFGFEINLQENQNALKFLASLLELPEFLLFLQHAISVPEDVARDLGDVMETVLSSQTCEQTPERLFVPSCTTEGSYEDVQCFSGECWCVNSWGKELPGSRVRGGQPRCPTDCEKQRARMQSLMGSQPAGSTLFVPACTSEGHFLPVQCFNSECYCVDAEGQAIPGTRSAIGKPKKCPTPCQLQSEQAFLRTVQALLSNSSMLPTLSDTYIPQCSTDGQWRQVQCNGPPEQVFELYQRWEAQNKGQDLTPAKLLVKIMSYREAASGNFSLFIQSLYEAGQQDVFPVLSQYPSLQDVPLAALEGKRPQPRENILLEPYLFWQILNGQLSQYPGSYSDFSTPLAHFDLRNCWCVDEAGQELEGMRSEPSKLPTCPGSCEEAKLRVLQFIRETEEIVSASNSSRFPLGESFLVAKGIRLRNEDLGLPPLFPPREAFAEQFLRGSDYAIRLAAQSTLSFYQRRRFSPDDSAGASALLRSGPYMPQCDAFGSWEPVQCHAGTGHCWCVDEKGGFIPGSLTARSLQIPQCPTTCEKSRTSGLLSSWKQARSQENPSPKDLFVPACLETGEYARLQASGAGTWCVDPASGEELRPGSSSSAQCPSLCNVLKSGVLSRRVSPGYVPACRAEDGGFSPVQCDQAQGSCWCVMDSGEEVPGTRVTGGQPACESPRCPLPFNASEVVGGTILCETISGPTGSAMQQCQLLCRQGSWSVFPPGPLICSLESGRWESQLPQPRACQRPQLWQTIQTQGHFQLQLPPGKMCSADYADLLQTFQVFILDELTARGFCQIQVKTFGTLVSIPVCNNSSVQVGCLTRERLGVNVTWKSRLEDIPVASLPDLHDIERALVGKDLLGRFTDLIQSGSFQLHLDSKTFPAETIRFLQGDHFGTSPRTWFGCSEGFYQVLTSEASQDGLGCVKCPEGSYSQDEECIPCPVGFYQEQAGSLACVPCPVGRTTISAGAFSQTHCVTDCQRNEAGLQCDQNGQYRASQKDRGSGKAFCVDGEGRRLPWWETEAPLEDSQCLMMQKFEKVPESKVIFDANAPVAVRSKVPDSEFPVMQCLTDCTEDEACSFFTVSTTEPEISCDFYAWTSDNVACMTSDQKRDALGNSKATSFGSLRCQVKVRSHGQDSPAVYLKKGQGSTTTLQKRFEPTGFQNMLSGLYNPIVFSASGANLTDAHLFCLLACDRDLCCDGFVLTQVQGGAIICGLLSSPSVLLCNVKDWMDPSEAWANATCPGVTYDQESHQVILRLGDQEFIKSLTPLEGTQDTFTNFQQVYLWKDSDMGSRPESMGCRKDTVPRPASPTEAGLTTELFSPVDLNQVIVNGNQSLSSQKHWLFKHLFSAQQANLWCLSRCVQEHSFCQLAEITESASLYFTCTLYPEAQVCDDIMESNAQGCRLILPQMPKALFRKKVILEDKVKNFYTRLPFQKLMGISIRNKVPMSEKSISNGFFECERRCDADPCCTGFGFLNVSQLKGGEVTCLTLNSLGIQMCSEENGGAWRILDCGSPDIEVHTYPFGWYQKPIAQNNAPSFCPLVVLPSLTEKVSLDSWQSLALSSVVVDPSIRHFDVAHVSTAATSNFSAVRDLCLSECSQHEACLITTLQTQPGAVRCMFYADTQSCTHSLQGQNCRLLLREEATHIYRKPGISLLSYEASVPSVPISTHGRLLGRSQAIQVGTSWKQVDQFLGVPYAAPPLAERRFQAPEPLNWTGSWDASKPRASCWQPGTRTSTSPGVSEDCLYLNVFIPQNVAPNASVLVFFHNTMDREESEGWPAIDGSFLAAVGNLIVVTASYRVGVFGFLSSGSGEVSGNWGLLDQVAALTWVQTHIRGFGGDPRRVSLAADRGGADVASIHLLTARATNSQLFRRAVLMGGSALSPAAVISHERAQQQAIALAKEVSCPMSSSQEVVSCLRQKPANVLNDAQTKLLAVSGPFHYWGPVIDGHFLREPPARALKRSLWVEVDLLIGSSQDDGLINRAKAVKQFEESRGRTSSKTAFYQALQNSLGGEDSDARVEAAATWYYSLEHSTDDYASFSRALENATRDYFIICPIIDMASAWAKRARGNVFMYHAPENYGHGSLELLADVQFALGLPFYPAYEGQFSLEEKSLSLKIMQYFSHFIRSGNPNYPYEFSRKVPTFATPWPDFVPRAGGENYKEFSELLPNRQGLKKADCSFWSKYISSLKTSADGAKGGQSAESEEEELTAGSGLREDLLSLQEPGSKTYSK

SEQ ID NO: 1070 - DNA, 3730 bp, Homo sapiens
ggaggagccgggcgcgcctgccacgcaaaactaccgggctggcagggcggcgggcgcggtgcgcgatcccgggtggcggcggcaacggcggtggtgacggcggcgactgcagcggccggctctcacctctcccctgtgcacccgcatctcgccgcgccgccgagcagccagcagtccccgggtcgcccagcccacgcgcgcacggccgagcccagcgcacaatagcggcgacagccatggggaaaccggcgaggaaaggatgcgagtggaagcgcttcctgaagaataactgggtgttgctgtccaccgtggccgcggtggtgctaggcattaccacaggagtcttggttcgagaacacagcaacctctcaactctagagaaattctactttgcttttcctggagaaattctaatgcggatgctgaaactcatcattttgccattaattatatccagcatgattacaggtgttgctgcactggattccaacgtatccggaaaaattggtctgcgcgctgtcgtgtattatttctgtaccactctcattgctgttattctaggtattgtgctggtggtgagcatcaagcctggtgtcacccagaaagtgggtgaaattgcgaggacaggcagcacccctgaagtcagtacggtggatgccatgttagatctcatcaggaatatgttccctgagaatcttgtccaggcctgttttcagcagtacaaaactaagcgtgaagaagtgaagcctcccagcgatccagagatgaacatgacagaagagtccttcacagctgtcatgacaactgcaatttccaagaacaaaacaaaggaatacaaaattgttggcatgtattcagatggcataaacgtcctgggcttgattgtcttttgccttgtctttggacttgtcattggaaaaatgggagaaaagggacaaattctggtggatttcttcaatgctttgagtgatgcaaccatgaaaatcgttcagatcatcatgtgttatatgccactaggtattttgttcctgattgctgggaagatcatagaagttgaagactgggaaatattccgcaagctgggcctttacatggccacagtcctgactgggcttgcaatccactccattgtaattctcccgctgatatatttcatagtcgtacgaaagaaccctttccgatttgccatgggaatggcccaggctctcctgacagctctcatgatctcttccagttcagcaacactgcctgtcaccttccgctgtgctgaagaaaataaccaggtggacaagaggatcactcgattcgtgttacccgttggtgcaacaatcaacatggatgggactgcgctctatgaagcagtggcagcggtgtttattgcacagttgaatgacctggacttgggcattgggcagatcatcaccatcagtatcacggccacatctgccagcatcggagctgctggcgtgccccaggctggcctggtgaccatggtgattgtgctgagtgccgtgggcctgcccgccgaggatgtcaccctgatcattgctgtcgactggctcctggaccggttcaggaccatggtcaacgtccttggtgatgcttttgggacgggcattgtggaaaagctctccaagaaggagctggagcagatggatgtttcatctgaagtcaacattgtgaatccctttgccttggaatccacaatccttgacaacgaagactcagacaccaagaagtcttatgtcaatggaggctttgcagtagacaagtctgacaccatctcattcacccagacctcacagttctagggcccctggctgcagatgactggaaacaaggaaggacatttccgtgagagtcatctcaaacactgcttaaggaaaagagaaacactaatggccaagtgtacatttgatttgatatacagacctccagattattttctatatttggattcacagcctttgcgctctgggttttgggatttgggtgtggggtaagttgaagggaaatcaatttaaaggaaagttctattatctgggttttagaaattctataagagacaaagtttggaagtacataaagtaataactgttagaattaggtaatggatatgaaagagaaaatgctttctcatgcatagacaagtgttttgggtttttaaaaaaaatattctgtcattggttacaaatttttactcaggctttctattggcatggatttcctttgacctctcacttttttataaattataatgcatctaaaccacctgtccccagttaatgtgccaaaatgtcaatttttaacttatctccagccaatttcaaagaaaacagaccagcatagttctgcaataacagttttaagatgggcatagggtttggaagaaagggagaaggattcttttttcaatgtactgtattgggacgctggtaactgttaacccagtgttcagcatagagctatatatatatatatatgtatatatttattattttcatataatttgccagacagagatcagaattgaaccgtcaatgtgaaataaagagttctccttgtacttgaataataaccacgattccaacccaggtctgctttggggcttatcagaactcctttctaaggagcactagaatgagaaatcatgttgttcgatcgtttcacatctgtatatcagctctaaagcagagatgtattatggtgatactccaaggtggcatagccattcatttacaacttccagatttgagctgcctggagggaatccatatcagctctgcataagattatatacaaagctgtcactcacaaaaggctggatgtgctttcatccaactggaaggctttattcttccaagttcattcatactcaaagaggccagtactttgccatccttgcacttctgttatcagggcccaaataacagtggcaagctaccaactaagttgtattttaataaagattccatgggttgaacaagccacgttgcagaaaaagagcttcccctaacctgggttgttgcagagtaaatcccacgacataagctggtatcagtggttcgggggaaatagttccattctatgactcttgtctcctcctccaggaggactgttctaactagtaatcttggccctattcattacatcctctgcttgtcattctgctaatttatgaagatagtttattatagtctgtacttcagttctcatcttgtaaataatgcttaacataaacttgtacttacactgaaatccaaaatagtcatgtttctgcagtattctgtagccaacttaaacctgtgctttcatgtttaagaaatgagaaattgtgccaaagatagcagaagagtagataagtgctcagtattgacgacctacatctgaaatctacaacataatgatactgaattgttatgtaaacatcataaatagtaaataatgattcaatgtgaattttaaaatgcaaatattgctattgtttataggaaataaatctaaatataaatgaaattgaatcagtaatttatcttgggctaaatggttctaccccttactaggttgccccaattagtggcactagttggcagagctgttcatgagctgccagttatcattttggagtcagtttgaaaccagcctcttaacacactgctgttaactcataaaagagaagagtgttccatttcagtctcaataaacacttccctcattctttcaaaaaaaa

SEQ ID NO: 1071 - protein, 524 aa, Homo sapiens
MGKPARKGCEWKRFLKNNWVLLSTVAAVVLGITTGVLVREHSNLSTLEKFYFAFPGEILMRMLKLIILPLIISSMITGVAALDSNVSGKIGLRAVVYYFCTTLIAVILGIVLVVSIKPGVTQKVGEIARTGSTPEVSTVDAMLDLIRNMFPENLVQACFQQYKTKREEVKPPSDPEMNMTEESFTAVMTTAISKNKTKEYKIVGMYSDGINVLGLIVFCLVFGLVIGKMGEKGQILVDFFNALSDATMKIVQIIMCYMPLGILFLIAGKIIEVEDWEIFRKLGLYMATVLTGLAIHSIVILPLIYFIVVRKNPFRFAMGMAQALLTALMISSSSATLPVTFRCAEENNQVDKRITRFVLPVGATINMDGTALYEAVAAVFIAQLNDLDLGIGQIITISITATSASIGAAGVPQAGLVTMVIVLSAVGLPAEDVTLIIAVDWLLDRFRTMVNVLGDAFGTGIVEKLSKKELEQMDVSSEVNIVNPFALESTILDNEDSDTKKSYVNGGFAVDKSDTISFTQTSQF

SEQ ID NO: 1072 - DNA, 4705 bp, Homo sapiens
ggaaaaaaatccgtctctaaaaaagcaatcacaaagaagaggaaaactgtcataaagtcacctactgtaccagagtttcagggaaaatggtatcatcggaggcaagctgtaaaagaattacatagtacattgatacgtcttttaaatgaattgctgccatgggaaccaaagttaatgaaggctttccaaagaaacaggagccgcctgaagaaagactatgatgatttcagaagacaacctgatcatgatacatttaatagagaactatggaccactgatgaaggtgaaggagatcttggaaaagactctcctaagggagaaatcagtaagtctatagactcaacagaacctctggatatcctggagaaagatcactttgattcagatgatatgaagttgtcagaaatagattttcctatggctagaagcaagctgttgaaaaaggaattgccttcaaaagacttaccgaagacactgcttaaaacacttaaacgacagtccaaacaaactgattatgtggatgacagcacaaaagagctttctccaaggaagaaggcaaagttaagcacaaatgagacaacagttgagaatctagaaagtgatgtgcagattgactgtttcagtgaatcaaagcatacagagccatcatttccagagtcatttgcctcattggattcagtaccagtgtctactctccagaaagggaccaaacccattcaggctttgcttgcaaagaatattgggaataaagtgaccttaacaaatcaactgcctccttccacaggtagaaatgctcttgctgtggaaaaaccagttttatctcctccggaagcaagcccgataaagccagcattgacctgccacaccaatacaaaaggtcctttacaaatggtatacaaaatgccctgtggccagtggttgccaatagatcttcaaaatagctctgtaaagattcaggtgcagcctatggtggatcctaaaacaggagaaaaaatcatgcagcaagttcttattctgcctaagaattttgtgattcagcataaagaaggaaaagcagttgcaaaagaagtgccaccacttcaacagaaaggtacagaacaacattgttcatctttcccacagacaacaaatataaattcttctttagcatcagtttttgtcaactcaccaggaactgtttctacccaactaccaaatacagctttcaacaaaacaattacacctttatcaaatataagtagtgctagaccacagcctttgtcgcctgtaacctctgtaagtaacttattaacaccatcagttaagactagccagagtgaggcaggaaaagccaagaatgcagtttcagcagccacattctccttgcccagtgcttcaccgaccatttcctccacaggtcagcctctgtcatcaacaacaacactaaatgggtctacaaatcctggtagttccttcaactgttttgcacaacagactgctgattcttctgaagcaaagcaagagctgaaaactgtgtgcataagagattcacagtcaattcttgttaggacacgaggtgggaacactggagttgtaaaagtacagaccaacccagatcaaaattcacccaatactgtatcttcaagttcagttttcacttttgctcctcagctgcaggcatttctggtgccaaaatcaacaacttcttcctctgctttttcacctgtagctggaacaactactacatctagtctttcaccttttagccaaacaccaacttctgtttccattccagctagctttgccccatccatggggaaaaatctcaaacttacattaggccacaccactggcagtggtgatttgggccacgtgatagataaaacttcacacatgccctcttctcccttgaagtcctctatttgttctagtactctactaccatcaacaacaagtagttcggtaagtgtaattagcatatcagcagcaaattttggacaaaacaatgcaaatattattcatactccaactaaacagcaacaagtagattatatcacaaaaagttaccctgttacaaggtcagaagcaacagcagcaacaaatggagatgtaatcagtgggactccagttcagaaacttatgctggtatcagctccatctattctttcttctggcaatggaactgcaattaatatgacacctgcgctgacatctacaggtgtttctgcccagaaattagtttttattaatgccccagttcctagtggtacatcaaccccaactcttgttgcagaatcattaaaacaaactcttcctcctccattgcataaagcatatgttaagactccagagcaaccccaaatagtactgattccgtctacagtgggcacaccaataaaaataaattcatcaccagctgtgtctcagataaaggatgtgaaaattggactaaacataggtcaagcaattgtaaatacttcaggcactgtgccagctataccatcaattaacatattacaaaatgtaaccccaaaaggagaagacaaaagtagcaagggctatattttgccattgtcaacaagtggtaattcagttccagtaagctcaaattttgtgagtcagaatattacccctgttaatgaatcagtggtttcttcagcaagagcagtaaatgtgctttcagttaccggagcaaatttatctttgggttcctttccagtgacctcagcctctgcttcagctggggcacaacctcctgttttagtcagtggaaatgatacctcttcaagaattatgcctattttgtcaaatagactttgctcatcaagtctcggaaacactgtggctatatcaactgtgaaaacaggacaccttgcatcatctgttctgatttcaactacacaaccagtagtgtctcctaaatgtttaacatcagctttgcaaattcctgttacggttgccttacctacacctgcgactacatcccctaaaataataaacacagttccacattcggcagcagtaccaggagccacacgttctgtatctatttctaaaagacaatctcggacttcactccagttccattcaccagggatttcaactacagtgccaacaaatgtaaacacaaataaacctcaaactgaattgtcgtccctttcaacaagtccaggtaaaataactaatacgtccaattttgcttctctgccaaatcagcaagctttagtaaaaacccccagttacagttctgctccaggtggcactaccattcacacggcttcggcaccatccaatgtaactagtctagtcgggagtcagttcagtgaaccttgtattcagcaaaaaatagtcatcaataccagtacacctttggcacctggtactcagattatgattaacggaacccggtttattgttccaccacaaggtcttggagctggcagccatgttctccttatatctactaatccaaaatatggagcccccttagttcttaacagtggccaaggcattcaatctacaccaatagataactctgcccagaagatcacactagcatcaaataattccttaagtggccaacctctacaacatcctctaagaagccctacaaaatttataaactcttttgggaatgcaagttctatacccacagtacatacatcaccacaactcataaacacaactgctaaggttcctgttccacctcctgtaccaacagtatcactgacttcagtaattaagtctccagctactcttttggctaagacatctttggtttctgccatttgccccagtaatcctccactgccaagtagcacttcagtgtttcatttggacccacctgtcaaaaaattgttggttagcccagaaggagccattttgaataccataaatactccagcatctaaggtttcttcactctctccatctctctctcagattgttgtatctgccagtcgaagtcctgcgtctgtcttccctgcttttcagtcgtcgggcttagagaagcctgacagagctgcatcttgaatttagactaaaagagccagtttttaaataatggggcattgttttgactcccataaaaattttcaatgtttattatactgttgaaagcatactatacattgtgtgtgtgtgtgtgtgtgtgtgtgtgtgtgtgtgtgtgtgtgtgtgtgtgttttaatgtatcttttcattagcttgcaacaaggctttgttttcttggggagggaaagatctgttccatttcacttactgttctgaggagggtttcaaggttctgtgtttaaagtcaggatttacctgtctgtagaacataaagtgaacaaagtttgaatagtttagagtaagctagccttttgcacatttacattgacatgtttcttcttgaatttggactgttgcagcatatctatgatatggtattcagtgtcattagtgaaatcttatttttgtttctgtaaaaaaaaaaatacatatatatatttatgcattgtgaaaaatgcagtccatgatgtaaaattgtacatattccagaatccctaacaacctgtactaaatatatgtacaaagaactatgctgtcttatttatgttttgtttacataatgtatagttttttaagtattttagtaattttggaccagtgaactgttagcaacaatgcagaagaatctgcatgtaataaactgagttgctgtaaaaaaaaaaaaaaaaaaaca

SEQ ID NO: 1073 - protein, 1278 aa, Homo sapiens
MKAFQRNRSRLKKDYDDFRRQPDHDTFNRELWTTDEGEGDLGKDSPKGEISKSIDSTEPLDILEKDHFDSDDMKLSEIDFPMARSKLLKKELPSKDLPKTLLKTLKRQSKQTDYVDDSTKELSPRKKAKLSTNETTVENLESDVQIDCFSESKHTEPSFPESFASLDSVPVSTLQKGTKPIQALLAKNIGNKVTLTNQLPPSTGRNALAVEKPVLSPPEASPIKPALTCHTNTKGPLQMVYKMPCGQWLPIDLQNSSVKIQVQPMVDPKTGEKIMQQVLILPKNFVIQHKEGKAVAKEVPPLQQKGTEQHCSSFPQTTNINSSLASVFVNSPGTVSTQLPNTAFNKTITPLSNISSARPQPLSPVTSVSNLLTPSVKTSQSEAGKAKNAVSAATFSLPSASPTISSTGQPLSSTTTLNGSTNPGSSFNCFAQQTADSSEAKQELKTVCIRDSQSILVRTRGGNTGVVKVQTNPDQNSPNTVSSSSVFTFAPQLQAFLVPKSTTSSSAFSPVAGTTTTSSLSPFSQTPTSVSIPASFAPSMGKNLKLTLGHTTGSGDLGHVIDKTSHMPSSPLKSSICSSTLLPSTTSSSVSVISISAANFGQNNANIIHTPTKQQQVDYITKSYPVTRSEATAATNGDVISGTPVQKLMLVSAPSILSSGNGTAINMTPALTSTGVSAQKLVFINAPVPSGTSTPTLVAESLKQTLPPPLHKAYVKTPEQPQIVLIPSTVGTPIKINSSPAVSQIKDVKIGLNIGQAIVNTSGTVPAIPSINILQNVTPKGEDKSSKGYILPLSTSGNSVPVSSNFVSQNITPVNESVVSSARAVNVLSVTGANLSLGSFPVTSASASAGAQPPVLVSGNDTSSRIMPILSNRLCSSSLGNTVAISTVKTGHLASSVLISTTQPVVSPKCLTSALQIPVTVALPTPATTSPKIINTVPHSAAVPGATRSVSISKRQSRTSLQFHSPGISTTVPTNVNTNKPQTELSSLSTSPGKITNTSNFASLPNQQALVKTPSYSSAPGGTTIHTASAPSNVTSLVGSQFSEPCIQQKIVINTSTPLAPGTQIMINGTRFIVPPQGLGAGSHVLLISTNPKYGAPLVLNSGQGIQSTPIDNSAQKITLASNNSLSGQPLQHPLRSPTKFINSFGNASSIPTVHTSPQLINTTAKVPVPPPVPTVSLTSVIKSPATLLAKTSLVSAICPSNPPLPSSTSVFHLDPPVKKLLVSPEGAILNTINTPASKVSSLSPSLSQIVVSASRSPASVFPAFQSSGLEKPDRAAS

SEQ ID NO: 1074 - DNA, 4606 bp, Homo sapiens
gacagagcgcaatggcggcaaccgcgtctgcaggggtgccggcgaccgtgtcagaaaagcaagagttttaccagcttctgaagaacctgatcaatccaagctgtatggtgcggaggcaagcagaggaaatctatgaaaatatcccaggtctgtgtaagactaccttcctcttagatgccgtcagaaatagaagagcaggttatgaggtgagacaaatggctgccgcactgctacgacggcttttgtcctctgggtttgaggaggtttatccaaatctgcctgctgatgttcagagagatgtcaagattgaactgattctggctgttaagttagaaacacatgctagcatgaggaaaaaactttgtgatatttttgcagtgctggccaggaatttgatagatgaggatggcactaaccactggccggaaggtctgaagtttcttattgattcaatctactccaaaaatgtggttctatgggaagttgcacttcacgttttctggcactttcctgggatttttgggacccaagagcggcatgatttggatatcatcaaacggttgttggaccagtgtattcaagatcaagaacatccagcaatcaggacattatccgctagagctgcagctgcatttgtacttgctaatgagaataatattgctcttttcaaagactttgcagacttgcttcctggaatcttacaggctgtgaatgactcatgctaccaggatgatgattcagtgctagaatcccttgttgagattgcagataccgtacctaagtacttgggtccttatttagaagatactctacagttgagtttgaagttatgtggagactctaggcttagtaatctgcagcgccagctggccctcgaagttatagtgaccttgtctgaaactgccactccgatgttgaaaaaacatacaaatattattgcacaggcagttcctcatatattagcaatgatggttgatctacaagatgatgaggactgggtaaatgctgatgaaatggaagaagatgattttgacagcaatgcagttgctgcggagagtgcactagacagactggcttgtgggcttggtggaaaagttgttttaccaatgaccaaggagcatatcatgcagatgcttcagagccctgactggaagtatcgacatgctggattaatggccttatctgccattggagaaggatgccatcaacaaatggaatcaattctagatgaaacagttaactccgttttgctttttcttcaggatcctcatccaagggtgagggctgcagcctgtactacacttggacagatggctacagattttgcacctaatttccaaaagaaatttcatgaaacagtgattgcagctctgttacgtaccatggaaaatcaaggtaatcagcgtgtgcaatcacatgcagcttctgctcttattatttttattgaagactgccctaaatcattgctagttctatatgtggatagtatggtgaaaaatctacattccgtcttggtgattaaacttcaagagttgattcggaatggaactaagttggctttggaacaacttgtgacaaccattgcatcagttgcagatacaatagaagaaaaatttgtcccatattatgatatattcatgccctcactaaagcacattgttgagcttgctgttcagaaggaactcaagcttctgagaggaaaaactatcgagtgcattagccatattggtcttgctgttgggaaggaaaaatttatgcaagatgcatcaaatgtgatgcagctgttgttgaagacacaatcagacttaaataatatggaagatgatgaccctcagacctcttacatggtttcagcatgggctagaatgtgtaaaattcttggaaaagattttcaacagtaccttccactggttatcgagcctcttattaagactgcttcagctaaacctgatgttgctctcttagacacacaggatgtggaaaatatgagtgacgatgatggctggcaatttgtaaatcttggagaccagcagagttttggaattaaaacttcaggacttgaagcaaaagcaactgcttgccaaatgttggtttactatgctaaggagttaagggaagggtttgtggaatatacagaacaagttgtgaagctgatggttcctttactgaaattttatttccatgacaatgttcgagtggcagcagcagagtccatgccttttctcctggaatgtgcaagaattcgtggcccagagtatcttgcacagatgtggcaattcatatgtgaccccttaatcaaggctattggtactgaaccagatacagatgtgctctcagaaataatgaattcttttgcaaagtccattgaagttatgggagatggttgccttaatgatgaacacttggaagaactgggaggaatactgaaagcaaaacttgaagggcactttaaaaaccaagaattgagacaggtgaaaagacaggaagaaaactatgatcaacaggttgagatgtctctgcaagatgaggatgaatgtgatgtttatattctgaccaaagtatcagatattttgcactcattatttagtacttataaggaaaagattttaccatggtttgaacaactacttccattaattgtaaatctaatttgttcaagtaggccatggccagacagacagtggggattgtgcatatttgatgacatcatagagcactgcagtccaacttcatttaaatatgtagaatattttcggtggccaatgctactaaatatgcgagataacaaccctgaagtcaggcaagctgctgcttatggcctgggtgtcatggcacagtttggtggagatgattatcgttctttatgttcagaagctgttccacttctggtaaaagttattaagtgtgcaaattccaaaaccaaaaaaaatgtcattgctacagagaactgtatctcagcaatagggaagattttgaagtttaagcctaactgtgtaaatgtagatgaagttcttccacactggttatcatggcttccactgcatgaagataaagaggaagctattcagactttgagttttctctgtgacctaattgaaagtaaccacccagttgtaattggtccaaataattccaatcttcccaaaataatcagtataattgcagaaggaaaaattaatgagactattaactatgaggatccttgtgccaaacgcctagctaatgtcgtgcgtcaggtacagacttctgaagatttatggttggaatgtgtatcacaacttgatgatgaacagcaggaagccttacaggagttgctaaattttgcttgaagcactttaatataacttgaatattatctattataaaagtaactacaaataagtgttgtgaatagattttattataaatcagagaactgttttctccctgctaagcagtttatagttcttctccatgtttctccagaattaatcagtgttagtcctctgtttatctcgcatgttttatcttccaaacacagaccttggtgataacctgtgcttcaaactgtcttaaacaatgtttgtcacctttcccctagttgatgtaaagtatataaattgttgctatttgtttgaactattattgatgctagccaagcagtatacttgatgtgaagatgtcatgctatcacaatatgctaagagctcacaaaaataagatagaatttccaggacaaacatctttggaattgtgagtgaaggatatagtggcaggcttgtccctctttaattaatactcttggtatttgtggtgatgggaggatgctgttactaggagagttttgagatactgcagtggatgtgggatgtatatgaacttcttcataatgtactcctgggaactgggtaggacatatccatattgtagttcccaaggtgtctggttgagagttagagaacttttaaatttctttagccagacaggtctctatttttttaagttatccaggactccaagaaccatagttactgaaaagggagtcctgatacatctaatattggtagcatgtaacagtgtttgacaaagagtaagtaagcagtattcttgggagtcagtgttatgtgtttcagcagagtattattttgtatatgtatgccattttctccctgcaaagcagctcaacaagagaaaaagctctagttatagggcttaaattgatttctatttcaaataatttcctaagagattctagagtagaactgaagagtattctattggaaaagtgaaaggaaagaaatgtaattttctttgaacatgaaaaagaaaacaactttgagagtagtcatttagcagtagatgtgcattattatgagaaaacagttctataagtccagggttaattatattaattggaatgtcagtctttaatgtcgagcttattgtagggtagaaaagagctttctactcagctaacgattactcattgatccaaaacttaaatacatctataatttcctggggctattgtgagtactgtgtatgtatttagcaaatatttaagacctagtaagtgctcaataaattgtagctgttattgctgttgttgtttgtacctctaaaaaaa

SEQ ID NO: 1075 - protein, 1105 aa, Homo sapiens
MAATASAGVPATVSEKQEFYQLLKNLINPSCMVRRQAEEIYENIPGLCKTTFLLDAVRNRRAGYEVRQMAAALLRRLLSSGFEEVYPNLPADVQRDVKIELILAVKLETHASMRKKLCDIFAVLARNLIDEDGTNHWPEGLKFLIDSIYSKNVVLWEVALHVFWHFPGIFGTQERHDLDIIKRLLDQCIQDQEHPAIRTLSARAAAAFVLANENNIALFKDFADLLPGILQAVNDSCYQDDDSVLESLVEIADTVPKYLGPYLEDTLQLSLKLCGDSRLSNLQRQLALEVIVTLSETATPMLKKHTNIIAQAVPHILAMMVDLQDDEDWVNADEMEEDDFDSNAVAAESALDRLACGLGGKVVLPMTKEHIMQMLQSPDWKYRHAGLMALSAIGEGCHQQMESILDETVNSVLLFLQDPHPRVRAAACTTLGQMATDFAPNFQKKFHETVIAALLRTMENQGNQRVQSHAASALIIFIEDCPKSLLVLYVDSMVKNLHSVLVIKLQELIRNGTKLALEQLVTTIASVADTIEEKFVPYYDIFMPSLKHIVELAVQKELKLLRGKTIECISHIGLAVGKEKFMQDASNVMQLLLKTQSDLNNMEDDDPQTSYMVSAWARMCKILGKDFQQYLPLVIEPLIKTASAKPDVALLDTQDVENMSDDDGWQFVNLGDQQSFGIKTSGLEAKATACQMLVYYAKELREGFVEYTEQVVKLMVPLLKFYFHDNVRVAAAESMPFLLECARIRGPEYLAQMWQFICDPLIKAIGTEPDTDVLSEIMNSFAKSIEVMGDGCLNDEHLEELGGILKAKLEGHFKNQELRQVKRQEENYDQQVEMSLQDEDECDVYILTKVSDILHSLFSTYKEKILPWFEQLLPLIVNLICSSRPWPDRQWGLCIFDDIIEHCSPTSFKYVEYFRWPMLLNMRDNNPEVRQAAAYGLGVMAQFGGDDYRSLCSEAVPLLVKVIKCANSKTKKNVIATENCISAIGKILKFKPNCVNVDEVLPHWLSWLPLHEDKEEAIQTLSFLCDLIESNHPVVIGPNNSNLPKIISIIAEGKINETINYEDPCAKRLANVVRQVQTSEDLWLECVSQLDDEQQEALQELLNFA

SEQ ID NO: 1076 - DNA, 5101 bp, Homo sapiens
cggaacccggtcgaaagggtcctctctggcgtccttctgcttccgtgggtttctggataggctgcgttttgttctcaggggatgcaagttcttcctttcagggttgaagcgtgagagaggttggtttttgaaacgggagtgtttcaggttattgaggtccaaaaagaaataaagtttttgtttacgtctgtatggcttgtaagatatctcccggggccaattcagcatctctacctggccatcctaacaaggtgatttgtgaaagggtgagacttcagagcctgttccctctcctcccaagtgatcagaacactaccgttcaagaggatgctcacttcaaagctttcttccagagtgaagatagtccaagtcctaagagacagcgcctctctcattcagtctttgattatacatcagcatcaccagctccctcaccaccaatgcgaccatgggagatgacatcaaataggcagcccccttcagttcgaccaagccaacatcacttctcaggggaacgatgcaacacacctgcacgcaacagaagaagtcctcctgtcaggcgccagagaggaagaagggatcgtctgtctcgacataattccattagtcaagatgaaaactatcaccatctcccttacgcacagcagcaagcaatagaggagcctcgagccttccaccctccgaatgtatctccccgtctgctacatcctgctgctcatccaccccagcagaatgcagtcatggttgacatacatgatcagctccatcaaggaacagtccctgtttcttacacagtaacaacagtggcaccacatgggattccactctgcacaggccagcacatccctgcttgtagtacacagcaggtcccaggatgctctgtggttttcagtggacagcacctccctgtctgtagtgtgcctcctccaatgcttcaggcatgttcagttcagcacttaccagtaccatatgctgcattcccaccccttatttctagtgatccatttcttatacatcctcctcacctttctccccatcatcctcctcatttgccaccaccaggccagtttgtccctttccaaacacagcaatcacgatcgcctctgcaaaggatagaaaatgaagtggaactcttaggagaacatcttccagtaggaggttttacttaccctccatcagcccaccccccaacattacctccatcagctcccttgcagttcttaacacatgatcctttgcatcaggaggtgtcctttggagtaccttatcctccatttatgcctcggaggcttacaggacgtagtagataccgatcccagcagccaataccacctcccccttatcatcccagcttactgccatatgtgttatcaatgcttccagtgccacctgcagtgggcccaactttcagctttgaattagatgtagaagatggagaagtagaaaattacgaggccctgttaaacctggcagagcgactgggagaggcaaagcctcgtggactgactaaagcagatattgaacaacttccttcttatcggttcaatcctaacaaccaccagtcagaacagactttgtgtgtagtatgcatgtgtgattttgagtcaaggcagctacttagagtcttaccctgtaaccacgagttccatgccaagtgtgttgacaaatggcttaaggcaaatcgtacttgcccaatttgccgagctgatgcttcagaagtgcatcgggattcagaatgaccaacctaagaagcacaaatttagtttgggtgttcctcatcacatgtatatacggactatccattgaacttaatctgtgtggcttccagccctccctttaccaaaagggtcaatggacctttctttgcactgtgtgacttaatcaactataaaagcttacaattagtcttcacagttatgggattgttatactaaccgtgtgattggaactccaaagactttttctttagcttaattttgtgtgtgcactaacattccctggtttttgtgtgatcattccgagtgttgctgcaagattacagtggacgtgatcttttagcatgtgcttttataaaaagtggtagctacagatgatatagcaatctaccttatatagagccttcagaaactgtgagtggaaatgaatgcgcagcgtatgactgttggtgataagtgtatctgtgtgagtgtgtgcaactacttgtgtgagggcatggtagctaacgtgtgtatgagatcctatataccagcatgtaccaagaatgtgtgtgtagttttaattatgctgcaatgtataatctggtgtgttatttaaacagcactagtactgtacactggtttttttcccttgtgtttgctgttgcacactgattgctgagggtgcatcaattacaagcattgaatactccatccccttccctcccagtgaatggaatgagaaaagccttcttcctttgcttcaggcagctgtcaccttctctttattggtggtcctaagtgggtcacttaagaaaaaaaagtgtaacaaattctcgctccatgaacctggtttttttttattctgttgtggaaatttttaaatctccaacttgctgtttccaaaaagaaggtgcaatatcatatatcatcagttagcaatattagcatttcaatcagtgatttgaatgttgatacttttttttcctttacatttccagtaagtttcttacagaaagtacctgtgattttttttaatgtttagatttgtagtctagtctattctgaagatatttgattaatatatttctaagaagaccactagtcccatgaagtctcaccttgttgacttccaccagaacaaaacctgttaattcagcttgacttctcatatgtgttctgtgttcaagctcctgtgggcaactcaattgttttaagaaaactctatttctgttcatattaattcacttgccagactccaattctgaaagttgtctagttcttccttcatcacacgtgcttctcatcgaaaccctggtttcaggatggatcaagtgctgttacagctcatgttccttagacctgatttgttttgatattttactgcctttccttttaatttttgtttgaatgagaaaagtttaatacaacaggtgtccagaatacttgcagtataaatgaagatttggtttttgtataaaaaaataatgctgttaaacaggagttgaccttcatttagttgatgtaatacatagctgtatggggttttttttagtaagttctttgagcataattcactttaaagtcatttttccagcaatgtttaaattactttctcattcttttagtgtattcaacattgtctgcctcttcctgcagttgatgtaattgctttgtttgcaatagcacaagctgcattattccagtcaggactgtgataacttgctgccagccccactcaactttcagttggctctgtgtcagttttccattcagtgttaactacttgttactgccatgctgcttgccctcccttgaagtgtctataagctcatcacagcctagagttaagtaaagtcaattcacagaagcacaattttgccctttgcgagacattgttgcctctatctagtcctacaagtagggttttgcatactgtgtttgcccctagggttgtcagtgcatcagaaatacttctaaatagtggtaaaaatgcacatggttaatgcacatgttacttttaaatcattaggatatccctcacctgttcctgatgaataaaaagtgtgttaaagaccaaaattcttggcataataatcagctacatacaaatcacatatagtttaatcttttttaatgaaaaaaaatcatgtttaaaatggcaaaagcccatcttatacacttttatatagctgcaaaaaatttatatctgtacagatctaacactacgacactcagtattcattttattgaagcatgcaagtaaagcactttttctaatttatatagaggtatctaattaacacagcacattgtactaatgactaggagtagcagctttttcttctctccctctatgaattcttataatgtccctttttctgtaagtttttgagaggcaattggcaatttaggaggcagcagggtctgttttggtcaaatcttgaatttcgttgttgcactctagtgactgatctttgggaatgtcttgtctttgcatggggctcatagagatgtgtgcagacttgcttattgtggttagtgtgtatcaggaacacacacacaggtgttctgaccagctcaggcttgccacagtgagcaactctgtggctagcaaaagagaagtttatttgtgcccagccattggtcaccttgggtgatgcaccagatagcaggcagatgttggttcattggccttcgtcctctttcctcctaaaataatattggctttaccatcttaactcagctgtgggttttttgtgggttcttgtttgttttttggcatgaattgtcatctttggtgtttttttaacccccagcccctcaaaaaaataaggcctccaggtatcaagatctcatattaggattttctgtccttaattttttgagcaaaatctggaaaatgtgaaagcatatttagattttatatactatctgaaatgtgatttgttaagattcttaaatttgggcctcttagaataattttgaatgagatctaccgactcacttgtgagaatatttttcacagattatctttgggccttttcattagaaagctgtttgtttgtccccctgttggtacatttggttacctcattttgccgtttcagattgtgaaagctcacaggggtgttttttggaatcatttgctgagtcattttctcaaatcatattccattgtatcagttaacatatagttttaaatgtatgtattataaatatctgtaaccaaatcatttgaaggcttgataaatttttaacaaagtttgtacattttttatgaaagttactagtaatgctttactaagtagtgcaatgaatttttatttttaatccctgtgcccaattttggagttgagagggttgttggtaataaatgtatgatgtacacttaaaaaaaaaaaaaa

SEQ ID NO: 1077 - protein, 515 aa, Homo sapiens
MACKISPGANSASLPGHPNKVICERVRLQSLFPLLPSDQNTTVQEDAHFKAFFQSEDSPSPKRQRLSHSVFDYTSASPAPSPPMRPWEMTSNRQPPSVRPSQHHFSGERCNTPARNRRSPPVRRQRGRRDRLSRHNSISQDENYHHLPYAQQQAIEEPRAFHPPNVSPRLLHPAAHPPQQNAVMVDIHDQLHQGTVPVSYTVTTVAPHGIPLCTGQHIPACSTQQVPGCSVVFSGQHLPVCSVPPPMLQACSVQHLPVPYAAFPPLISSDPFLIHPPHLSPHHPPHLPPPGQFVPFQTQQSRSPLQRIENEVELLGEHLPVGGFTYPPSAHPPTLPPSAPLQFLTHDPLHQEVSFGVPYPPFMPRRLTGRSRYRSQQPIPPPPYHPSLLPYVLSMLPVPPAVGPTFSFELDVEDGEVENYEALLNLAERLGEAKPRGLTKADIEQLPSYRFNPNNHQSEQTLCVVCMCDFESRQLLRVLPCNHEFHAKCVDKWLKANRTCPICRADASEVHRDSE

SEQ ID NO: 1078 - DNA, 5268 bp, Homo sapiens
gcggcggggcgcggcggggcggggaggggcgtggccgggccgggcccctagtgcggtgttgcgggacggggccgaggcccggtcggttggggcgtgggggcggagaggatggagcctccgaggcgttaggcgactctgtcatctctgggcgtgcagccgtcgtttcctggcgcggcccgtgtgatggtgccgggaggaaggaagcgcagtgacagtgcctaagttggagccggggttccgggggtgaggaggcccgcggacggcggatctggcgagctggccgcgggctgggcgagcagtcacaataggaggcggcggcccagcgaggatccgcgggagctgcccggcagggcggagcctcccctcgcagatatctcccggggccaattcagcatctctacctggccatcctaacaaggtgatttgtgaaagggtgagacttcagagcctgttccctctcctcccaagtgatcagaacactaccgttcaagaggatgctcacttcaaagctttcttccagagtgaagatagtccaagtcctaagagacagcgcctctctcattcagtctttgattatacatcagcatcaccagctccctcaccaccaatgcgaccatgggagatgacatcaaataggcagcccccttcagttcgaccaagccaacatcacttctcaggggaacgatgcaacacacctgcacgcaacagaagaagtcctcctgtcaggcgccagagaggaagaagggatcgtctgtctcgacataattccattagtcaagatgaaaactatcaccatctcccttacgcacagcagcaagcaatagaggagcctcgagccttccaccctccgaatgtatctccccgtctgctacatcctgctgctcatccaccccagcagaatgcagtcatggttgacatacatgatcagctccatcaaggaacagtccctgtttcttacacagtaacaacagtggcaccacatgggattccactctgcacaggccagcacatccctgcttgtagtacacagcaggtcccaggatgctctgtggttttcagtggacagcacctccctgtctgtagtgtgcctcctccaatgcttcaggcatgttcagttcagcacttaccagtaccatatgctgcattcccaccccttatttctagtgatccatttcttatacatcctcctcacctttctccccatcatcctcctcatttgccaccaccaggccagtttgtccctttccaaacacagcaatcacgatcgcctctgcaaaggatagaaaatgaagtggaactcttaggagaacatcttccagtaggaggttttacttaccctccatcagcccaccccccaacattacctccatcagctcccttgcagttcttaacacatgatcctttgcatcaggaggtgtcctttggagtaccttatcctccatttatgcctcggaggcttacaggacgtagtagataccgatcccagcagccaataccacctcccccttatcatcccagcttactgccatatgtgttatcaatgcttccagtgccacctgcagtgggcccaactttcagctttgaattagatgtagaagatggagaagtagaaaattacgaggccctgttaaacctggcagagcgactgggagaggcaaagcctcgtggactgactaaagcagatattgaacaacttccttcttatcggttcaatcctaacaaccaccagtcagaacagactttgtgtgtagtatgcatgtgtgattttgagtcaaggcagctacttagagtcttaccctgtaaccacgagttccatgccaagtgtgttgacaaatggcttaaggcaaatcgtacttgcccaatttgccgagctgatgcttcagaagtgcatcgggattcagaatgaccaacctaagaagcacaaatttagtttgggtgttcctcatcacatgtatatacggactatccattgaacttaatctgtgtggcttccagccctccctttaccaaaagggtcaatggacctttctttgcactgtgtgacttaatcaactataaaagcttacaattagtcttcacagttatgggattgttatactaaccgtgtgattggaactccaaagactttttctttagcttaattttgtgtgtgcactaacattccctggtttttgtgtgatcattccgagtgttgctgcaagattacagtggacgtgatcttttagcatgtgcttttataaaaagtggtagctacagatgatatagcaatctaccttatatagagccttcagaaactgtgagtggaaatgaatgcgcagcgtatgactgttggtgataagtgtatctgtgtgagtgtgtgcaactacttgtgtgagggcatggtagctaacgtgtgtatgagatcctatataccagcatgtaccaagaatgtgtgtgtagttttaattatgctgcaatgtataatctggtgtgttatttaaacagcactagtactgtacactggtttttttcccttgtgtttgctgttgcacactgattgctgagggtgcatcaattacaagcattgaatactccatccccttccctcccagtgaatggaatgagaaaagccttcttcctttgcttcaggcagctgtcaccttctctttattggtggtcctaagtgggtcacttaagaaaaaaaagtgtaacaaattctcgctccatgaacctggtttttttttattctgttgtggaaatttttaaatctccaacttgctgtttccaaaaagaaggtgcaatatcatatatcatcagttagcaatattagcatttcaatcagtgatttgaatgttgatacttttttttcctttacatttccagtaagtttcttacagaaagtacctgtgattttttttaatgtttagatttgtagtctagtctattctgaagatatttgattaatatatttctaagaagaccactagtcccatgaagtctcaccttgttgacttccaccagaacaaaacctgttaattcagcttgacttctcatatgtgttctgtgttcaagctcctgtgggcaactcaattgttttaagaaaactctatttctgttcatattaattcacttgccagactccaattctgaaagttgtctagttcttccttcatcacacgtgcttctcatcgaaaccctggtttcaggatggatcaagtgctgttacagctcatgttccttagacctgatttgttttgatattttactgcctttccttttaatttttgtttgaatgagaaaagtttaatacaacaggtgtccagaatacttgcagtataaatgaagatttggtttttgtataaaaaaataatgctgttaaacaggagttgaccttcatttagttgatgtaatacatagctgtatggggttttttttagtaagttctttgagcataattcactttaaagtcatttttccagcaatgtttaaattactttctcattcttttagtgtattcaacattgtctgcctcttcctgcagttgatgtaattgctttgtttgcaatagcacaagctgcattattccagtcaggactgtgataacttgctgccagccccactcaactttcagttggctctgtgtcagttttccattcagtgttaactacttgttactgccatgctgcttgccctcccttgaagtgtctataagctcatcacagcctagagttaagtaaagtcaattcacagaagcacaattttgccctttgcgagacattgttgcctctatctagtcctacaagtagggttttgcatactgtgtttgcccctagggttgtcagtgcatcagaaatacttctaaatagtggtaaaaatgcacatggttaatgcacatgttacttttaaatcattaggatatccctcacctgttcctgatgaataaaaagtgtgttaaagaccaaaattcttggcataataatcagctacatacaaatcacatatagtttaatcttttttaatgaaaaaaaatcatgtttaaaatggcaaaagcccatcttatacacttttatatagctgcaaaaaatttatatctgtacagatctaacactacgacactcagtattcattttattgaagcatgcaagtaaagcactttttctaatttatatagaggtatctaattaacacagcacattgtactaatgactaggagtagcagctttttcttctctccctctatgaattcttataatgtccctttttctgtaagtttttgagaggcaattggcaatttaggaggcagcagggtctgttttggtcaaatcttgaatttcgttgttgcactctagtgactgatctttgggaatgtcttgtctttgcatggggctcatagagatgtgtgcagacttgcttattgtggttagtgtgtatcaggaacacacacacaggtgttctgaccagctcaggcttgccacagtgagcaactctgtggctagcaaaagagaagtttatttgtgcccagccattggtcaccttgggtgatgcaccagatagcaggcagatgttggttcattggccttcgtcctctttcctcctaaaataatattggctttaccatcttaactcagctgtgggttttttgtgggttcttgtttgttttttggcatgaattgtcatctttggtgtttttttaacccccagcccctcaaaaaaataaggcctccaggtatcaagatctcatattaggattttctgtccttaattttttgagcaaaatctggaaaatgtgaaagcatatttagattttatatactatctgaaatgtgatttgttaagattcttaaatttgggcctcttagaataattttgaatgagatctaccgactcacttgtgagaatatttttcacagattatctttgggccttttcattagaaagctgtttgtttgtccccctgttggtacatttggttacctcattttgccgtttcagattgtgaaagctcacaggggtgttttttggaatcatttgctgagtcattttctcaaatcatattccattgtatcagttaacatatagttttaaatgtatgtattataaatatctgtaaccaaatcatttgaaggcttgataaatttttaacaaagtttgtacattttttatgaaagttactagtaatgctttactaagtagtgcaatgaatttttatttttaatccctgtgcccaattttggagttgagagggttgttggtaataaatgtatgatgtacacttaaaaaaaaaaaaaa

SEQ ID NO: 1079 - protein, 432 aa, Homo sapiens
MRPWEMTSNRQPPSVRPSQHHFSGERCNTPARNRRSPPVRRQRGRRDRLSRHNSISQDENYHHLPYAQQQAIEEPRAFHPPNVSPRLLHPAAHPPQQNAVMVDIHDQLHQGTVPVSYTVTTVAPHGIPLCTGQHIPACSTQQVPGCSVVFSGQHLPVCSVPPPMLQACSVQHLPVPYAAFPPLISSDPFLIHPPHLSPHHPPHLPPPGQFVPFQTQQSRSPLQRIENEVELLGEHLPVGGFTYPPSAHPPTLPPSAPLQFLTHDPLHQEVSFGVPYPPFMPRRLTGRSRYRSQQPIPPPPYHPSLLPYVLSMLPVPPAVGPTFSFELDVEDGEVENYEALLNLAERLGEAKPRGLTKADIEQLPSYRFNPNNHQSEQTLCVVCMCDFESRQLLRVLPCNHEFHAKCVDKWLKANRTCPICRADASEVHRDSE

SEQ ID NO: 1080 - DNA, 4951 bp, Homo sapiens
cggaacccggtcgaaagggtcctctctggcgtccttctgcttccgtgggtttctggataggctgcgttttgttctcaggggatgcaagttcttcctttcagggttgaagcgtgagagaggttggtttttgaaacgggagtgtttcaggttattgaggtccaaaaagaaataaagtttttgtttacgtctgtatggcttgtaagagtgaagatagtccaagtcctaagagacagcgcctctctcattcagtctttgattatacatcagcatcaccagctccctcaccaccaatgcgaccatgggagatgacatcaaataggcagcccccttcagttcgaccaagccaacatcacttctcaggggaacgatgcaacacacctgcacgcaacagaagaagtcctcctgtcaggcgccagagaggaagaagggatcgtctgtctcgacataattccattagtcaagatgaaaactatcaccatctcccttacgcacagcagcaagcaatagaggagcctcgagccttccaccctccgaatgtatctccccgtctgctacatcctgctgctcatccaccccagcagaatgcagtcatggttgacatacatgatcagctccatcaaggaacagtccctgtttcttacacagtaacaacagtggcaccacatgggattccactctgcacaggccagcacatccctgcttgtagtacacagcaggtcccaggatgctctgtggttttcagtggacagcacctccctgtctgtagtgtgcctcctccaatgcttcaggcatgttcagttcagcacttaccagtaccatatgctgcattcccaccccttatttctagtgatccatttcttatacatcctcctcacctttctccccatcatcctcctcatttgccaccaccaggccagtttgtccctttccaaacacagcaatcacgatcgcctctgcaaaggatagaaaatgaagtggaactcttaggagaacatcttccagtaggaggttttacttaccctccatcagcccaccccccaacattacctccatcagctcccttgcagttcttaacacatgatcctttgcatcaggaggtgtcctttggagtaccttatcctccatttatgcctcggaggcttacaggacgtagtagataccgatcccagcagccaataccacctcccccttatcatcccagcttactgccatatgtgttatcaatgcttccagtgccacctgcagtgggcccaactttcagctttgaattagatgtagaagatggagaagtagaaaattacgaggccctgttaaacctggcagagcgactgggagaggcaaagcctcgtggactgactaaagcagatattgaacaacttccttcttatcggttcaatcctaacaaccaccagtcagaacagactttgtgtgtagtatgcatgtgtgattttgagtcaaggcagctacttagagtcttaccctgtaaccacgagttccatgccaagtgtgttgacaaatggcttaaggcaaatcgtacttgcccaatttgccgagctgatgcttcagaagtgcatcgggattcagaatgaccaacctaagaagcacaaatttagtttgggtgttcctcatcacatgtatatacggactatccattgaacttaatctgtgtggcttccagccctccctttaccaaaagggtcaatggacctttctttgcactgtgtgacttaatcaactataaaagcttacaattagtcttcacagttatgggattgttatactaaccgtgtgattggaactccaaagactttttctttagcttaattttgtgtgtgcactaacattccctggtttttgtgtgatcattccgagtgttgctgcaagattacagtggacgtgatcttttagcatgtgcttttataaaaagtggtagctacagatgatatagcaatctaccttatatagagccttcagaaactgtgagtggaaatgaatgcgcagcgtatgactgttggtgataagtgtatctgtgtgagtgtgtgcaactacttgtgtgagggcatggtagctaacgtgtgtatgagatcctatataccagcatgtaccaagaatgtgtgtgtagttttaattatgctgcaatgtataatctggtgtgttatttaaacagcactagtactgtacactggtttttttcccttgtgtttgctgttgcacactgattgctgagggtgcatcaattacaagcattgaatactccatccccttccctcccagtgaatggaatgagaaaagccttcttcctttgcttcaggcagctgtcaccttctctttattggtggtcctaagtgggtcacttaagaaaaaaaagtgtaacaaattctcgctccatgaacctggtttttttttattctgttgtggaaatttttaaatctccaacttgctgtttccaaaaagaaggtgcaatatcatatatcatcagttagcaatattagcatttcaatcagtgatttgaatgttgatacttttttttcctttacatttccagtaagtttcttacagaaagtacctgtgattttttttaatgtttagatttgtagtctagtctattctgaagatatttgattaatatatttctaagaagaccactagtcccatgaagtctcaccttgttgacttccaccagaacaaaacctgttaattcagcttgacttctcatatgtgttctgtgttcaagctcctgtgggcaactcaattgttttaagaaaactctatttctgttcatattaattcacttgccagactccaattctgaaagttgtctagttcttccttcatcacacgtgcttctcatcgaaaccctggtttcaggatggatcaagtgctgttacagctcatgttccttagacctgatttgttttgatattttactgcctttccttttaatttttgtttgaatgagaaaagtttaatacaacaggtgtccagaatacttgcagtataaatgaagatttggtttttgtataaaaaaataatgctgttaaacaggagttgaccttcatttagttgatgtaatacatagctgtatggggttttttttagtaagttctttgagcataattcactttaaagtcatttttccagcaatgtttaaattactttctcattcttttagtgtattcaacattgtctgcctcttcctgcagttgatgtaattgctttgtttgcaatagcacaagctgcattattccagtcaggactgtgataacttgctgccagccccactcaactttcagttggctctgtgtcagttttccattcagtgttaactacttgttactgccatgctgcttgccctcccttgaagtgtctataagctcatcacagcctagagttaagtaaagtcaattcacagaagcacaattttgccctttgcgagacattgttgcctctatctagtcctacaagtagggttttgcatactgtgtttgcccctagggttgtcagtgcatcagaaatacttctaaatagtggtaaaaatgcacatggttaatgcacatgttacttttaaatcattaggatatccctcacctgttcctgatgaataaaaagtgtgttaaagaccaaaattcttggcataataatcagctacatacaaatcacatatagtttaatcttttttaatgaaaaaaaatcatgtttaaaatggcaaaagcccatcttatacacttttatatagctgcaaaaaatttatatctgtacagatctaacactacgacactcagtattcattttattgaagcatgcaagtaaagcactttttctaatttatatagaggtatctaattaacacagcacattgtactaatgactaggagtagcagctttttcttctctccctctatgaattcttataatgtccctttttctgtaagtttttgagaggcaattggcaatttaggaggcagcagggtctgttttggtcaaatcttgaatttcgttgttgcactctagtgactgatctttgggaatgtcttgtctttgcatggggctcatagagatgtgtgcagacttgcttattgtggttagtgtgtatcaggaacacacacacaggtgttctgaccagctcaggcttgccacagtgagcaactctgtggctagcaaaagagaagtttatttgtgcccagccattggtcaccttgggtgatgcaccagatagcaggcagatgttggttcattggccttcgtcctctttcctcctaaaataatattggctttaccatcttaactcagctgtgggttttttgtgggttcttgtttgttttttggcatgaattgtcatctttggtgtttttttaacccccagcccctcaaaaaaataaggcctccaggtatcaagatctcatattaggattttctgtccttaattttttgagcaaaatctggaaaatgtgaaagcatatttagattttatatactatctgaaatgtgatttgttaagattcttaaatttgggcctcttagaataattttgaatgagatctaccgactcacttgtgagaatatttttcacagattatctttgggccttttcattagaaagctgtttgtttgtccccctgttggtacatttggttacctcattttgccgtttcagattgtgaaagctcacaggggtgttttttggaatcatttgctgagtcattttctcaaatcatattccattgtatcagttaacatatagttttaaatgtatgtattataaatatctgtaaccaaatcatttgaaggcttgataaatttttaacaaagtttgtacattttttatgaaagttactagtaatgctttactaagtagtgcaatgaatttttatttttaatccctgtgcccaattttggagttgagagggttgttggtaataaatgtatgatgtacacttaaaaaaaaaaaaaa

SEQ ID NO: 1081 - protein, 465 aa, Homo sapiens
MACKSEDSPSPKRQRLSHSVFDYTSASPAPSPPMRPWEMTSNRQPPSVRPSQHHFSGERCNTPARNRRSPPVRRQRGRRDRLSRHNSISQDENYHHLPYAQQQAIEEPRAFHPPNVSPRLLHPAAHPPQQNAVMVDIHDQLHQGTVPVSYTVTTVAPHGIPLCTGQHIPACSTQQVPGCSVVFSGQHLPVCSVPPPMLQACSVQHLPVPYAAFPPLISSDPFLIHPPHLSPHHPPHLPPPGQFVPFQTQQSRSPLQRIENEVELLGEHLPVGGFTYPPSAHPPTLPPSAPLQFLTHDPLHQEVSFGVPYPPFMPRRLTGRSRYRSQQPIPPPPYHPSLLPYVLSMLPVPPAVGPTFSFELDVEDGEVENYEALLNLAERLGEAKPRGLTKADIEQLPSYRFNPNNHQSEQTLCVVCMCDFESRQLLRVLPCNHEFHAKCVDKWLKANRTCPICRADASEVHRDSE

SEQ ID NO: 1082 - DNA, 4999 bp, Homo sapiens
cttccccctcggggtggaaacaaagggggttcggcgcgcggtgcggagcctgggggaaaagggaggagcgctccggtggtctggcgcgctgggctcgctagatatctcccggggccaattcagcatctctacctggccatcctaacaaggtgatttgtgaaagggtgagacttcagagcctgttccctctcctcccaagtgatcagaacactaccgttcaagaggatgctcacttcaaagctttcttccagagtgaagatagtccaagtcctaagagacagcgcctctctcattcagtctttgattatacatcagcatcaccagctccctcaccaccaatgcgaccatgggagatgacatcaaataggcagcccccttcagttcgaccaagccaacatcacttctcaggggaacgatgcaacacacctgcacgcaacagaagaagtcctcctgtcaggcgccagagaggaagaagggatcgtctgtctcgacataattccattagtcaagatgaaaactatcaccatctcccttacgcacagcagcaagcaatagaggagcctcgagccttccaccctccgaatgtatctccccgtctgctacatcctgctgctcatccaccccagcagaatgcagtcatggttgacatacatgatcagctccatcaaggaacagtccctgtttcttacacagtaacaacagtggcaccacatgggattccactctgcacaggccagcacatccctgcttgtagtacacagcaggtcccaggatgctctgtggttttcagtggacagcacctccctgtctgtagtgtgcctcctccaatgcttcaggcatgttcagttcagcacttaccagtaccatatgctgcattcccaccccttatttctagtgatccatttcttatacatcctcctcacctttctccccatcatcctcctcatttgccaccaccaggccagtttgtccctttccaaacacagcaatcacgatcgcctctgcaaaggatagaaaatgaagtggaactcttaggagaacatcttccagtaggaggttttacttaccctccatcagcccaccccccaacattacctccatcagctcccttgcagttcttaacacatgatcctttgcatcaggaggtgtcctttggagtaccttatcctccatttatgcctcggaggcttacaggacgtagtagataccgatcccagcagccaataccacctcccccttatcatcccagcttactgccatatgtgttatcaatgcttccagtgccacctgcagtgggcccaactttcagctttgaattagatgtagaagatggagaagtagaaaattacgaggccctgttaaacctggcagagcgactgggagaggcaaagcctcgtggactgactaaagcagatattgaacaacttccttcttatcggttcaatcctaacaaccaccagtcagaacagactttgtgtgtagtatgcatgtgtgattttgagtcaaggcagctacttagagtcttaccctgtaaccacgagttccatgccaagtgtgttgacaaatggcttaaggcaaatcgtacttgcccaatttgccgagctgatgcttcagaagtgcatcgggattcagaatgaccaacctaagaagcacaaatttagtttgggtgttcctcatcacatgtatatacggactatccattgaacttaatctgtgtggcttccagccctccctttaccaaaagggtcaatggacctttctttgcactgtgtgacttaatcaactataaaagcttacaattagtcttcacagttatgggattgttatactaaccgtgtgattggaactccaaagactttttctttagcttaattttgtgtgtgcactaacattccctggtttttgtgtgatcattccgagtgttgctgcaagattacagtggacgtgatcttttagcatgtgcttttataaaaagtggtagctacagatgatatagcaatctaccttatatagagccttcagaaactgtgagtggaaatgaatgcgcagcgtatgactgttggtgataagtgtatctgtgtgagtgtgtgcaactacttgtgtgagggcatggtagctaacgtgtgtatgagatcctatataccagcatgtaccaagaatgtgtgtgtagttttaattatgctgcaatgtataatctggtgtgttatttaaacagcactagtactgtacactggtttttttcccttgtgtttgctgttgcacactgattgctgagggtgcatcaattacaagcattgaatactccatccccttccctcccagtgaatggaatgagaaaagccttcttcctttgcttcaggcagctgtcaccttctctttattggtggtcctaagtgggtcacttaagaaaaaaaagtgtaacaaattctcgctccatgaacctggtttttttttattctgttgtggaaatttttaaatctccaacttgctgtttccaaaaagaaggtgcaatatcatatatcatcagttagcaatattagcatttcaatcagtgatttgaatgttgatacttttttttcctttacatttccagtaagtttcttacagaaagtacctgtgattttttttaatgtttagatttgtagtctagtctattctgaagatatttgattaatatatttctaagaagaccactagtcccatgaagtctcaccttgttgacttccaccagaacaaaacctgttaattcagcttgacttctcatatgtgttctgtgttcaagctcctgtgggcaactcaattgttttaagaaaactctatttctgttcatattaattcacttgccagactccaattctgaaagttgtctagttcttccttcatcacacgtgcttctcatcgaaaccctggtttcaggatggatcaagtgctgttacagctcatgttccttagacctgatttgttttgatattttactgcctttccttttaatttttgtttgaatgagaaaagtttaatacaacaggtgtccagaatacttgcagtataaatgaagatttggtttttgtataaaaaaataatgctgttaaacaggagttgaccttcatttagttgatgtaatacatagctgtatggggttttttttagtaagttctttgagcataattcactttaaagtcatttttccagcaatgtttaaattactttctcattcttttagtgtattcaacattgtctgcctcttcctgcagttgatgtaattgctttgtttgcaatagcacaagctgcattattccagtcaggactgtgataacttgctgccagccccactcaactttcagttggctctgtgtcagttttccattcagtgttaactacttgttactgccatgctgcttgccctcccttgaagtgtctataagctcatcacagcctagagttaagtaaagtcaattcacagaagcacaattttgccctttgcgagacattgttgcctctatctagtcctacaagtagggttttgcatactgtgtttgcccctagggttgtcagtgcatcagaaatacttctaaatagtggtaaaaatgcacatggttaatgcacatgttacttttaaatcattaggatatccctcacctgttcctgatgaataaaaagtgtgttaaagaccaaaattcttggcataataatcagctacatacaaatcacatatagtttaatcttttttaatgaaaaaaaatcatgtttaaaatggcaaaagcccatcttatacacttttatatagctgcaaaaaatttatatctgtacagatctaacactacgacactcagtattcattttattgaagcatgcaagtaaagcactttttctaatttatatagaggtatctaattaacacagcacattgtactaatgactaggagtagcagctttttcttctctccctctatgaattcttataatgtccctttttctgtaagtttttgagaggcaattggcaatttaggaggcagcagggtctgttttggtcaaatcttgaatttcgttgttgcactctagtgactgatctttgggaatgtcttgtctttgcatggggctcatagagatgtgtgcagacttgcttattgtggttagtgtgtatcaggaacacacacacaggtgttctgaccagctcaggcttgccacagtgagcaactctgtggctagcaaaagagaagtttatttgtgcccagccattggtcaccttgggtgatgcaccagatagcaggcagatgttggttcattggccttcgtcctctttcctcctaaaataatattggctttaccatcttaactcagctgtgggttttttgtgggttcttgtttgttttttggcatgaattgtcatctttggtgtttttttaacccccagcccctcaaaaaaataaggcctccaggtatcaagatctcatattaggattttctgtccttaattttttgagcaaaatctggaaaatgtgaaagcatatttagattttatatactatctgaaatgtgatttgttaagattcttaaatttgggcctcttagaataattttgaatgagatctaccgactcacttgtgagaatatttttcacagattatctttgggccttttcattagaaagctgtttgtttgtccccctgttggtacatttggttacctcattttgccgtttcagattgtgaaagctcacaggggtgttttttggaatcatttgctgagtcattttctcaaatcatattccattgtatcagttaacatatagttttaaatgtatgtattataaatatctgtaaccaaatcatttgaaggcttgataaatttttaacaaagtttgtacattttttatgaaagttactagtaatgctttactaagtagtgcaatgaatttttatttttaatccctgtgcccaattttggagttgagagggttgttggtaataaatgtatgatgtacacttaaaaaaaaaaaaaa

SEQ ID NO: 1083 - protein, 432 aa, Homo sapiens; identical to SEQ ID NO: 1079

SEQ ID NO: 1084 - DNA, 5118 bp, Homo sapiens
gcggcggggcgcggcggggcggggaggggcgtggccgggccgggcccctagtgcggtgttgcgggacggggccgaggcccggtcggttggggcgtgggggcggagaggatggagcctccgaggcgttaggcgactctgtcatctctgggcgtgcagccgtcgtttcctggcgcggcccgtgtgatggtgccgggaggaaggaagcgcagtgacagtgcctaagttggagccggggttccgggggtgaggaggcccgcggacggcggatctggcgagctggccgcgggctgggcgagcagtcacaataggaggcggcggcccagcgaggatccgcgggagctgcccggcagggcggagcctcccctcgcagagtgaagatagtccaagtcctaagagacagcgcctctctcattcagtctttgattatacatcagcatcaccagctccctcaccaccaatgcgaccatgggagatgacatcaaataggcagcccccttcagttcgaccaagccaacatcacttctcaggggaacgatgcaacacacctgcacgcaacagaagaagtcctcctgtcaggcgccagagaggaagaagggatcgtctgtctcgacataattccattagtcaagatgaaaactatcaccatctcccttacgcacagcagcaagcaatagaggagcctcgagccttccaccctccgaatgtatctccccgtctgctacatcctgctgctcatccaccccagcagaatgcagtcatggttgacatacatgatcagctccatcaaggaacagtccctgtttcttacacagtaacaacagtggcaccacatgggattccactctgcacaggccagcacatccctgcttgtagtacacagcaggtcccaggatgctctgtggttttcagtggacagcacctccctgtctgtagtgtgcctcctccaatgcttcaggcatgttcagttcagcacttaccagtaccatatgctgcattcccaccccttatttctagtgatccatttcttatacatcctcctcacctttctccccatcatcctcctcatttgccaccaccaggccagtttgtccctttccaaacacagcaatcacgatcgcctctgcaaaggatagaaaatgaagtggaactcttaggagaacatcttccagtaggaggttttacttaccctccatcagcccaccccccaacattacctccatcagctcccttgcagttcttaacacatgatcctttgcatcaggaggtgtcctttggagtaccttatcctccatttatgcctcggaggcttacaggacgtagtagataccgatcccagcagccaataccacctcccccttatcatcccagcttactgccatatgtgttatcaatgcttccagtgccacctgcagtgggcccaactttcagctttgaattagatgtagaagatggagaagtagaaaattacgaggccctgttaaacctggcagagcgactgggagaggcaaagcctcgtggactgactaaagcagatattgaacaacttccttcttatcggttcaatcctaacaaccaccagtcagaacagactttgtgtgtagtatgcatgtgtgattttgagtcaaggcagctacttagagtcttaccctgtaaccacgagttccatgccaagtgtgttgacaaatggcttaaggcaaatcgtacttgcccaatttgccgagctgatgcttcagaagtgcatcgggattcagaatgaccaacctaagaagcacaaatttagtttgggtgttcctcatcacatgtatatacggactatccattgaacttaatctgtgtggcttccagccctccctttaccaaaagggtcaatggacctttctttgcactgtgtgacttaatcaactataaaagcttacaattagtcttcacagttatgggattgttatactaaccgtgtgattggaactccaaagactttttctttagcttaattttgtgtgtgcactaacattccctggtttttgtgtgatcattccgagtgttgctgcaagattacagtggacgtgatcttttagcatgtgcttttataaaaagtggtagctacagatgatatagcaatctaccttatatagagccttcagaaactgtgagtggaaatgaatgcgcagcgtatgactgttggtgataagtgtatctgtgtgagtgtgtgcaactacttgtgtgagggcatggtagctaacgtgtgtatgagatcctatataccagcatgtaccaagaatgtgtgtgtagttttaattatgctgcaatgtataatctggtgtgttatttaaacagcactagtactgtacactggtttttttcccttgtgtttgctgttgcacactgattgctgagggtgcatcaattacaagcattgaatactccatccccttccctcccagtgaatggaatgagaaaagccttcttcctttgcttcaggcagctgtcaccttctctttattggtggtcctaagtgggtcacttaagaaaaaaaagtgtaacaaattctcgctccatgaacctggtttttttttattctgttgtggaaatttttaaatctccaacttgctgtttccaaaaagaaggtgcaatatcatatatcatcagttagcaatattagcatttcaatcagtgatttgaatgttgatacttttttttcctttacatttccagtaagtttcttacagaaagtacctgtgattttttttaatgtttagatttgtagtctagtctattctgaagatatttgattaatatatttctaagaagaccactagtcccatgaagtctcaccttgttgacttccaccagaacaaaacctgttaattcagcttgacttctcatatgtgttctgtgttcaagctcctgtgggcaactcaattgttttaagaaaactctatttctgttcatattaattcacttgccagactccaattctgaaagttgtctagttcttccttcatcacacgtgcttctcatcgaaaccctggtttcaggatggatcaagtgctgttacagctcatgttccttagacctgatttgttttgatattttactgcctttccttttaatttttgtttgaatgagaaaagtttaatacaacaggtgtccagaatacttgcagtataaatgaagatttggtttttgtataaaaaaataatgctgttaaacaggagttgaccttcatttagttgatgtaatacatagctgtatggggttttttttagtaagttctttgagcataattcactttaaagtcatttttccagcaatgtttaaattactttctcattcttttagtgtattcaacattgtctgcctcttcctgcagttgatgtaattgctttgtttgcaatagcacaagctgcattattccagtcaggactgtgataacttgctgccagccccactcaactttcagttggctctgtgtcagttttccattcagtgttaactacttgttactgccatgctgcttgccctcccttgaagtgtctataagctcatcacagcctagagttaagtaaagtcaattcacagaagcacaattttgccctttgcgagacattgttgcctctatctagtcctacaagtagggttttgcatactgtgtttgcccctagggttgtcagtgcatcagaaatacttctaaatagtggtaaaaatgcacatggttaatgcacatgttacttttaaatcattaggatatccctcacctgttcctgatgaataaaaagtgtgttaaagaccaaaattcttggcataataatcagctacatacaaatcacatatagtttaatcttttttaatgaaaaaaaatcatgtttaaaatggcaaaagcccatcttatacacttttatatagctgcaaaaaatttatatctgtacagatctaacactacgacactcagtattcattttattgaagcatgcaagtaaagcactttttctaatttatatagaggtatctaattaacacagcacattgtactaatgactaggagtagcagctttttcttctctccctctatgaattcttataatgtccctttttctgtaagtttttgagaggcaattggcaatttaggaggcagcagggtctgttttggtcaaatcttgaatttcgttgttgcactctagtgactgatctttgggaatgtcttgtctttgcatggggctcatagagatgtgtgcagacttgcttattgtggttagtgtgtatcaggaacacacacacaggtgttctgaccagctcaggcttgccacagtgagcaactctgtggctagcaaaagagaagtttatttgtgcccagccattggtcaccttgggtgatgcaccagatagcaggcagatgttggttcattggccttcgtcctctttcctcctaaaataatattggctttaccatcttaactcagctgtgggttttttgtgggttcttgtttgttttttggcatgaattgtcatctttggtgtttttttaacccccagcccctcaaaaaaataaggcctccaggtatcaagatctcatattaggattttctgtccttaattttttgagcaaaatctggaaaatgtgaaagcatatttagattttatatactatctgaaatgtgatttgttaagattcttaaatttgggcctcttagaataattttgaatgagatctaccgactcacttgtgagaatatttttcacagattatctttgggccttttcattagaaagctgtttgtttgtccccctgttggtacatttggttacctcattttgccgtttcagattgtgaaagctcacaggggtgttttttggaatcatttgctgagtcattttctcaaatcatattccattgtatcagttaacatatagttttaaatgtatgtattataaatatctgtaaccaaatcatttgaaggcttgataaatttttaacaaagtttgtacattttttatgaaagttactagtaatgctttactaagtagtgcaatgaatttttatttttaatccctgtgcccaattttggagttgagagggttgttggtaataaatgtatgatgtacacttaaaaaaaaaaaaaa

SEQ ID NO: 1085 - protein, 432 aa, Homo sapiens; identical to SEQ ID NO: 1079

SEQ ID NO: 1086 - DNA, 2501 bp, Homo sapiens
cgaaaagattcttaggaacgccgtaccagccgcgtctctcaggacagcaggcccctgtccttctgtcgggcgccgctcagccgtgccctccgcccctcaggttctttttctaattccaaataaacttgcaagaggactatgaaagattatgatgaacttctcaaatattatgaattacatgaaactattgggacaggtggctttgcaaaggtcaaacttgcctgccatatccttactggagagatggtagctataaaaatcatggataaaaacacactagggagtgatttgccccggatcaaaacggagattgaggccttgaagaacctgagacatcagcatatatgtcaactctaccatgtgctagagacagccaacaaaatattcatggttcttgagtactgccctggaggagagctgtttgactatataatttcccaggatcgcctgtcagaagaggagacccgggttgtcttccgtcagatagtatctgctgttgcttatgtgcacagccagggctatgctcacagggacctcaagccagaaaatttgctgtttgatgaatatcataaattaaagctgattgactttggtctctgtgcaaaacccaagggtaacaaggattaccatctacagacatgctgtgggagtctggcttatgcagcacctgagttaatacaaggcaaatcatatcttggatcagaggcagatgtttggagcatgggcatactgttatatgttcttatgtgtggatttctaccatttgatgatgataatgtaatggctttatacaagaagattatgagaggaaaatatgatgttcccaagtggctctctcccagtagcattctgcttcttcaacaaatgctgcaggtggacccaaagaaacggatttctatgaaaaatctattgaaccatccctggatcatgcaagattacaactatcctgttgagtggcaaagcaagaatccttttattcacctcgatgatgattgcgtaacagaactttctgtacatcacagaaacaacaggcaaacaatggaggatttaatttcactgtggcagtatgatcacctcacggctacctatcttctgcttctagccaagaaggctcggggaaaaccagttcgtttaaggctttcttctttctcctgtggacaagccagtgctaccccattcacagacatcaagtcaaataattggagtctggaagatgtgaccgcaagtgataaaaattatgtggcgggattaatagactatgattggtgtgaagatgatttatcaacaggtgctgctactccccgaacatcacagtttaccaagtactggacagaatcaaatggggtggaatctaaatcattaactccagccttatgcagaacacctgcaaataaattaaagaacaaagaaaatgtatatactcctaagtctgctgtaaagaatgaagagtactttatgtttcctgagccaaagactccagttaataagaaccagcataagagagaaatactcactacgccaaatcgttacactacaccctcaaaagctagaaaccagtgcctgaaagaaactccaattaaaataccagtaaattcaacaggaacagacaagttaatgacaggtgtcattagccctgagaggcggtgccgctcagtggaattggatctcaaccaagcacatatggaggagactccaaaaagaaagggagccaaagtgtttgggagccttgaaagggggttggataaggttatcactgtgctcaccaggagcaaaaggaagggttctgccagagacgggcccagaagactaaagcttcactataatgtgactacaactagattagtgaatccagatcaactgttgaatgaaataatgtctattcttccaaagaagcatgttgactttgtacaaaagggttatacactgaagtgtcaaacacagtcagattttgggaaagtgacaatgcaatttgaattagaagtgtgccagcttcaaaaacccgatgtggtgggtatcaggaggcagcggcttaagggcgatgcctgggtttacaaaagattagtggaagacatcctatctagctgcaaggtataattgatggattcttccatcctgccggatgagtgtgggtgtgatacagcctacataaagactgttatgatcgctttgattttaaagttcattggaactaccaacttgtttctaaagagctatcttaagaccaatatctctttgtttttaaacaaaagatattattttgtgtatgaatctaaatcaagcccatctgtcattatgttactgtcttttttaatcatgtggttttgtatattaataattgttgactttcttagattcacttccatatgtgaatgtaagctcttaactatgtctctttgtaatgtgtaatttctttctgaaataaaaccatttgtgaatataaaaaaaaaaaaaaaaaaaaaaaaaaaaaaaaaaaaaaaaaaaaaaaaaaaaaaaaaaaaaaa

SEQ ID NO: 1087 - protein, 651 aa, Homo sapiens
MKDYDELLKYYELHETIGTGGFAKVKLACHILTGEMVAIKIMDKNTLGSDLPRIKTEIEALKNLRHQHICQLYHVLETANKIFMVLEYCPGGELFDYIISQDRLSEEETRVVFRQIVSAVAYVHSQGYAHRDLKPENLLFDEYHKLKLIDFGLCAKPKGNKDYHLQTCCGSLAYAAPELIQGKSYLGSEADVWSMGILLYVLMCGFLPFDDDNVMALYKKIMRGKYDVPKWLSPSSILLLQQMLQVDPKKRISMKNLLNHPWIMQDYNYPVEWQSKNPFIHLDDDCVTELSVHHRNNRQTMEDLISLWQYDHLTATYLLLLAKKARGKPVRLRLSSFSCGQASATPFTDIKSNNWSLEDVTASDKNYVAGLIDYDWCEDDLSTGAATPRTSQFTKYWTESNGVESKSLTPALCRTPANKLKNKENVYTPKSAVKNEEYFMFPEPKTPVNKNQHKREILTTPNRYTTPSKARNQCLKETPIKIPVNSTGTDKLMTGVISPERRCRSVELDLNQAHMEETPKRKGAKVFGSLERGLDKVITVLTRSKRKGSARDGPRRLKLHYNVTTTRLVNPDQLLNEIMSILPKKHVDFVQKGYTLKCQTQSDFGKVTMQFELEVCQLQKPDVVGIRRQRLKGDAWVYKRLVEDILSSCKV

SEQ ID NO: 1088 - DNA, 3650 bp, Homo sapiens
agcactgctgctctcccggcttcccgctctactccggccgggccgggtccgccacgtctggcgcgctgagcaggcccggccgcgcagcgcctaccctttcctcgctccgggccggcagtgtggggcggcgcgctgggggcgcggcgtgtctggggacatcttgtgatgttggcgagaacaggacatgatctcacatggcgagaagctctttagttccttaatcatttcacggtgccttcggacgctttttttccacctaaaacgtttagtttcagctcagtgatcagctaccccagctcggcgggggagcggaaggcttgaattattccgacctgtgagcggcccctggcaccaaaaaaaaaaaaaaaaaaaaaaaaaaaagaaaaaaaaaggcacaaaaaagtggaaacttttccctgtccattccatcaagtcctgaaaaatcaaaatggatttagagaaaaattatccgactcctcggaccagcaggacaggacatggaggagtgaatcagcttgggggggtttttgtgaatggacggccactcccggatgtagtccgccagaggatagtggaacttgctcatcaaggtgtcaggccctgcgacatctccaggcagcttcgggtcagccatggttgtgtcagcaaaattcttggcaggtattatgagacaggaagcatcaagcctggggtaattggaggatccaaaccaaaggtcgccacacccaaagtggtggaaaaaatcgctgaatataaacgccaaaatcccaccatgtttgcctgggagatcagggaccggctgctggcagagcgggtgtgtgacaatgacaccgtgcctagcgtcagttccatcaacaggatcatccggacaaaagtacagcagccacccaaccaaccagtcccagcttccagtcacagcatagtgtccactggctccgtgacgcaggtgtcctcggtgagcacggattcggccggctcgtcgtactccatcagcggcatcctgggcatcacgtcccccagcgccgacaccaacaagcgcaagagagacgaaggtattcaggagtctccggtgccgaacggccactcgcttccgggcagagacttcctccggaagcagatgcggggagacttgttcacacagcagcagctggaggtgctggaccgcgtgtttgagaggcagcactactcagacatcttcaccaccacagagcccatcaagcccgagcagaccacagagtattcagccatggcctcgctggctggtgggctggacgacatgaaggccaatctggccagccccacccctgctgacatcgggagcagtgtgccaggcccgcagtcctaccccattgtgacaggccgtgacttggcgagcacgaccctccccgggtaccctccacacgtcccccccgctggacagggcagctactcagcaccgacgctgacagggatggtgcctgggagtgagttttccgggagtccctacagccaccctcagtattcctcgtacaacgactcctggaggttccccaacccggggctgcttggctccccctactattatagcgctgccgcccgaggagccgccccacctgcagccgccactgcctatgaccgtcactgacccttggagccaggcgggcaccaaacactgatggcacctattgagggtgacagccacccagccctcctgaagatagccagagagcccatgagaccgtcccccagcatcccccacttgcctgaagctcccctcttcctctcttcctccagggactctggggccctttggtggggccgttggacttctggatgcttgtctatttctaaaagccaatctatgagcttctcccgatggccactgggtctctgcaaaccaatagactgtcctgcaaataaccgcagccccagcccagcctgcctgtcctccagctgtctgactatccatccatcataaccaccccagcctgggaaggagagcttgcttttgttgcttcagcagcacccatgtaaataccttcttgcttttctgtgggcctgaaggtccgactgagaagactgctccacccatgatgcatctcgcactcttggtgcatcaccggacatcttagacctatggcagagcatcctctctgccctgggtgaccctggcaggtgcgctcagagctgtcctcaagatggaggatgctgcccttgggccccagcctcctgctcatccctccttctttagtatctttacgaggagtctcactgggctggttgtgctgcaggctccccctgaggcccctctccaagaggagcacactttggggagatgtcctggtttcctgcctccatttctctgggaccgatgcagtatcagcagctcttttccagatcaaagaactcaaagaaaactgtctgggagattcctcagctacttttccgaagcagaatgtcatccgaggtattgattacattgtggactttgaatgtgagggctggatgggacgcaggagatcatctgatcccagccaaggaggggcctgaggctctccctactccctcagcccctggaacggtgttttctgaggcatgcccaggttcaggtcacttcggacacctgccatggacacttcacccaccctccaggaccccagcaagtggattctgggcaagcctgttccggtgatgtagacaataattaacacagaggactttcccccacacccagatcacaaacagcctacagccagaacttctgagcatcctctcggggcagaccctccccgtcctcgtggagcttagcaggcagctgggcatggaggtgctggggctggggcagatgcctaatttcgcacaatgcatgcccacctgttgatctaaggggccgcgatggtcagggccacggccaagggccacgggaacttggagagggagcttggagaactcactgtgggctagggtggtcagaggaagccagcagggaagatctgggggacagaggaaggcctcctgagggaggggcaggagagcagtgaggagctgctgtgtgacctgggagtgattttgacatgggggtgccaggtgccatcatctctttacctggggccttaattccttgcatagtctctcttgtcaagtcagaacagccaggtagagcccttgtccaaacctgggctgaatgacagtgatgagagggggcttggccttcttaggtgacaatgtcccccatatctgtatgtcaccaggatggcagagagccagggcagagagagactggacttgggatcagcaggccaggcaggtcttgtcctggtcctggccacatgtctttgctgtgggacctcagacaaaaccctgcacctctttgagccttggctgccttggtgcagcagggtcatctgtagggccaccccacagctctttccttcccctcctctctccagggagccggggctgtgagaggatcatctggggcaggccctccacttccaagcaagcagatgggggtgggcacctgaggcccaataatatttggaccaagtgggaaacaagaacactcggaggggcgggaatcagaagagcctggaaaaagacctagcccaacttcccttgtgggaaactgaggcccagcttggggaaggccaggaccatgcagggagaaaaag

SEQ ID NO: 1089 - protein, 391 aa, Homo sapiens
MDLEKNYPTPRTSRTGHGGVNQLGGVFVNGRPLPDVVRQRIVELAHQGVRPCDISRQLRVSHGCVSKILGRYYETGSIKPGVIGGSKPKVATPKVVEKIAEYKRQNPTMFAWEIRDRLLAERVCDNDTVPSVSSINRIIRTKVQQPPNQPVPASSHSIVSTGSVTQVSSVSTDSAGSSYSISGILGITSPSADTNKRKRDEGIQESPVPNGHSLPGRDFLRKQMRGDLFTQQQLEVLDRVFERQHYSDIFTTTEPIKPEQTTEYSAMASLAGGLDDMKANLASPTPADIGSSVPGPQSYPIVTGRDLASTTLPGYPPHVPPAGQGSYSAPTLTGMVPGSEFSGSPYSHPQYSSYNDSWRFPNPGLLGSPYYYSAAARGAAPPAAATAYDRH

SEQ ID NO: 1090 - DNA, 2701 bp, Homo sapiens
aaaggcggtgactagagctgtgttgtccccggaagtgccttccctcccgggtctgcgcggacgcggcctccttacctcatttgtcctcgcccctccccgtccctctacgcgttttggttcccggttggtgcttcctgttcgcagctgcggcacttcaaggttactgactttttatgatgtttggtggctatgagactatagaagcatacgaagatgatctttatcgagatgagtcatctagtgaactgagtgttgatagtgaggtggaatttcaactctatagccaaattcattatgcccaagatcttgatgatgtcatcagggaggaagagcatgaagaaaagaactctgggaattcggaatcttcgagtagtaaaccaaatcagaagaagctaatcgtcctttcagatagtgaggtcatccagctgtcagatgggtcagaggtcatcactttgtctgatgaagacagtatttatagatgtaaaggaaagaatgttagagttcaagcacaagaaaatgcccatggtctttcttcttctcttcaatctaatgagctggttgataagaaatgcaagagtgatattgagaagcctaaatctgaagagagatcaggtgtaatccgagaggtcatgattatagaggtcagttcaagtgaagaggaagagagcaccatttcagaaggtgataatgtggaaagctggatgctactgggatgtgaagtagatgataaagatgatgatatccttctcaaccttgtgggatgtgaaaactctgttactgaaggagaagatggtataaactggtccatcagtgacaaagacattgaggcccagatagctaataaccgaacacctggaagatggacccagcggtactattcagccaacaaaaacattatctgtagaaattgtgacaaacgtggtcatttatcaaaaaactgccccttaccacgaaaagttcgtcgctgcttcctgtgctccaggagaggacatctcctgtattcctgtccagcccccctttgcgaatactgtcctgtgcctaagatgttggaccactcatgtcttttcagacattcctgggataaacagtgtgaccgatgtcatatgctaggccactatacagatgcttgcacagaaatctggaggcagtatcacctaacgaccaaacctggaccacccaaaaagccgaagaccccttcaagaccatcagccttagcatattgctatcactgcgcgcaaaaaggccattatggacacgaatgtccagaaagagaagtgtatgacccgtctccagtatctccattcatctgctactatgatgacaaatatgaaattcaggagagagaaaagagactaaaacaaaaaataaaagtactcaagaaaaatggggttatcccagagccatccaagctaccttatataaaagcagcaaatgagaacccccaccatgatataaggaagggccgtgcctcatggaaaagcaacaggtggcctcaagaaaataaagaaacacaaaaagaaatgaagaacaagaatagaaactgggagaagcacaggaaggctgacagacatcgtgaagtggatgaggattttcccaggggccccaaaacctactcttctcctggcagttttaaaacccagaagccttctaagccctttcaccgttcatcacattaccacacgtcaagagaagacaagtctcccaaggaaggcaagaggggcaagcagaagaaaaaggagaggtgctgggaagatgatgacaatgataacttatttcttattaagcagagaaaaaaaaagtcttaagccgtcaggcagcctctgatgtggcttttcattgttcatttggcctttgtgtctataaccttctggcactgtgtttattatctatgattaaataaagtgagtttttggttttgtttttttaatttcagccattcctagagttactgaatatccatggagatctcaattctctgtgtccaacaggatattaggtaagaaagtacaaagataaacctggacttctcctattccaatatgtcatctttactcagaatcctagggataggtagaagaattcatcttttcaagaaagtgttttaaaaatactttgggaaaaaaactgcatcaaaggtaatttatcctcaaattaaatccttgcaggaagagaaattaacactaagaaaaagtcatcaatatttttcaactttttttttttttttttttactttggaaaggacaataactataaacctatatccagattttctttctgctgaagctgttgtcagaatcttcctttggacaaaacatcactagctgactataaaaacaaaagtgtcatcattgaagccctgaagaggcagggaattgagcttcagcaaaatacaggaaaagaactatccagtataaatgtcagaagacagatttcctaaacaagtaaaagagacatcaaaaattttaacataatcacaatgaaatcattttttaccacttttacagcggtgtttcaagcggactgtcactcagatctgcagagatgaatattactcaaaaaatttttttgttctcttgcatttttttcaactaccgcaaagctatacagatttttttgtacttgtggatcttttgtacttctcataacctaatgtcagactaagaaaaataaaatatctgagagtaaaaaaaaaaaaaaaaaa

SEQ ID NO: 1091 - protein, 543 aa, Homo sapiens
MMFGGYETIEAYEDDLYRDESSSELSVDSEVEFQLYSQIHYAQDLDDVIREEEHEEKNSGNSESSSSKPNQKKLIVLSDSEVIQLSDGSEVITLSDEDSIYRCKGKNVRVQAQENAHGLSSSLQSNELVDKKCKSDIEKPKSEERSGVIREVMIIEVSSSEEEESTISEGDNVESWMLLGCEVDDKDDDILLNLVGCENSVTEGEDGINWSISDKDIEAQIANNRTPGRWTQRYYSANKNIICRNCDKRGHLSKNCPLPRKVRRCFLCSRRGHLLYSCPAPLCEYCPVPKMLDHSCLFRHSWDKQCDRCHMLGHYTDACTEIWRQYHLTTKPGPPKKPKTPSRPSALAYCYHCAQKGHYGHECPEREVYDPSPVSPFICYYDDKYEIQEREKRLKQKIKVLKKNGVIPEPSKLPYIKAANENPHHDIRKGRASWKSNRWPQENKETQKEMKNKNRNWEKHRKADRHREVDEDFPRGPKTYSSPGSFKTQKPSKPFHRSSHYHTSREDKSPKEGKRGKQKKKERCWEDDDNDNLFLIKQRKKKS

SEQ ID NO: 1092 - DNA, 657 bp, Homo sapiens
atgaagatgattgagcagcacaatcaggaatacagggaagggaaacacagcttcacaatggccatgaacgcctttggagaaatgaccagtgaagaattcaggcaggtggtgaatggctttcaaaaccagaagcacaggaaggggaaagtgctccaggaacctctgcttcatgacatccgcaaatctgtggattggagagagaaaggctacgtgactcctgtgaaggatcagtgcagctggggctctgtaaggacagatgttaggaaaactgagaaactagtttcactgagtgtgcagacctggtggactgctctaggcttcaaggcaatgttggctgcatttttggagaaccattattttgcttccagtatgttgccgacaatggaggcctggactctgaggaatccttttcatatgaagaaaagctctggagactggaaagtccaaggtcacagaggtgcatctggtgagagccttcttgctagtggggaatctcagcagagtcctgaggtggcacagtattctgggaagcatcaagtgcagtgtcatcttatcgaggaggctctgcagatgctaagtggtggggatgaggatcacgatgaagacaaatggccccatgacatgaggaatcatctggctggagaggcccaggtgtag

SEQ ID NO: 1093 - protein, 218 aa, Homo sapiens
MKMIEQHNQEYREGKHSFTMAMNAFGEMTSEEFRQVVNGFQNQKHRKGKVLQEPLLHDIRKSVDWREKGYVTPVKDQCSWGSVRTDVRKTEKLVSLSVQTWWTALGFKAMLAAFLENHYFASSMLPTMEAWTLRNPFHMKKSSGDWKVQGHRGASGESLLASGESQQSPEVAQYSGKHQVQCHLIEEALQMLSGGDEDHDEDKWPHDMRNHLAGEAQV

SEQ ID NO: 1094 - DNA, 887 bp, Homo sapiens
atgtgcggagcccttgatgtcctgcaaatgaagaagaaggatgtccttaagttccttgcagcaggaacccacttaggtggcaccaatcttgacttccagatgaaacagtacatctataaaaggaaaagttatggcacctacatcacaaatctgaagaggacctgggagaagcttctgctggcagctcatgccattgttgccattgaataccctgctgatgtcagtgtcatattctccaggaatactggccagagggccgtgctgaagtttgctgctgccactggagccactccaattgctggccgcttcactcctgcaaccttcactaaccagatccaggcaaccttccgggagccacggcttcttgtggttaccgaccccagggctgaccaccagcctctcacggaggcatcttatgttaacctacctaccatcgctctgtgtaacacagattctcctctgcactgtgtggacattgccatcccatgcaacaacaagggagctccctcagtgggtcagatatggtggatgccagctcgggaagttctgcacatgcgtggcaccatttcctgtgaacacccgtgggaggtcatgcctgatctctacttctacagagatcctgaagagattgaaaaagaagagcaggctgctgctgaaaaggctgtgaccaaggaggaatttcagggtgagtggactgctctagctcctgagttcactgctactcagcctgagattgcagactggtttgaaggtatgcaggtgccctctgtgcctattcacagttccctactaaagactggagtgctcagcctgccacggaagtctagtctgcagctcccactgctcaggccactgagtgggtagcagcaaccactgattggtcttaa

SEQ ID NO: 1095 - DNA, 507 bp, Homo sapiens
atgcgggcgccgcccgctggacaatgctccgccgggccccgcgcgggccgcgctcacctgcgcccccgggcagaccgccgcaccgctggcccgcccgcagcccgcactccctcacgacccacgcccgccctgcgcgggcctcacctgctgaccgccgaggctgcagtccacaggcccacgggttccgccgtcgctcgttcgcgctcccgccggccccagcctgagccagacggcgcctccccgcccccgctccctcgccgcggacgccgcccgccccccaacagtcagggcgcacgcgcactgcgcccgccgaactgcgacggccgcgccgccccggcgcctggcgccgacggccgactgcgcaggcgcagtggggcggggcggggccggcgagggcggggcctggcccctctcacctggctggcggcagggcggggctcgagcccgggactgccaggtgcgcgccgggaatgggcggcggcaggcgcgcggggcacaggttcctga

SEQ ID NO: 1096 - protein, 168 aa, Homo sapiens [sequence omitted]

SEQ ID NO: 1097 - DNA, 4535 bp, Homo sapiens
gtgcgcgtgcgccctgactgttggggggcgggcggcgtccgcggcgagggagcgggggcggggaggcgccgtctggctcaggctggggccggcgggagcgcgaacgagcgacggcggaacccgtgggcctgtggactgcagcctcggcggtcagcagagtgcttgtgatttcacgtatttttgctgaactcgtaaaagagacacttggatggtggattaaccagaacactaacattctgtgaaaagtttcaaattggagaatattgaattttcaccctagtccagcagctccgctgctcacttaaatacagatgaatgaagaccccattcggaaagacacctggccagcggtccagagctgatgcaggccatgctggagtatctgccaacatgatgaagaagaggacatcccacaaaaaacatcggagcagtgtgggtccgagcaaacctgtttcccagccccggcggaacatcgtaggctgcaggattcagcatgggtggaaagaggggaatggccctgttacccagtggaaaggaaccgttctggaccaggtgcctgtaaatccttctttgtatcttataaaatacgatggatttgactgtgtttatggactagaacttaataaagatgaaagagtttctgcgcttgaagtcctccctgatagagttgcgacatctcgaatcagcgatgcacacttggcagacacaatgattggcaaagcagtggaacatatgtttgagacagaggatggttctaaagatgagtggaggggaatggtcttagcacgtgcacctgtcatgaacacatggttttacattacctatgagaaagaccctgtcttgtacatgtaccaactcttagatgattacaaagaaggcgaccttcgcattatgcctgattccaatgattcacctccagcagaaagggaaccaggagaagttgtggacagcctggtaggcaaacaagtggaatatgccaaagaagatggctcgaaaaggactggcatggtcattcatcaagtagaagccaagccctccgtctatttcatcaagtttgatgatgatttccatatttatgtctacgatttggtgaaaacatcctagatgtcatcacaaactctgccaaatttgtggaactatgaaatgtattatttgtagacataaagacttgattgctttccagtttaatgaaagcttaaatgtccctgcgaacccacaatctctgccagcagaactggttttgttctgaatagtacagattgatgtgaacacaaagcattttgtgtaaggagaacccctttcttttaaaagaagtctgtctatttcgaggggagttacaggcaagtttggtaaaagttaagctagtatcatagtcatttaaaattgtaatagatcttaaccattttccccctcaccctaactctcttattctgccgccacaatgcaagcatagtttgatgttttcgttattgccttttttgagatgtatgtatctgtatctacctatatctatatgtgtgtatacatatataatatatacacacagatacaagtgtacacacacacaccacacaccacacacaccccactggcagtctttgtggattaggatgggggtgacataattttcttgagtttaacaggagtgctttacccaagtcagtcatggatatgatatcactgctctttatttaaaagtaaactttgggcacaggaaccatatgggaacattcagcttgtttaaaaaaaaaaaatcagaagttcagagcaccttttcaatctggagcccttaaaccataagtccaaatatgaattatttgtgaacagttaatgacccatattagaattttacaatctggtgaacaatctgggtaaaaggctacctttaattctaagcttcatttttttttgggggggggttacattttaatcataaattcttttttgcaaagcccaggttcttgttccacacagtgtaatgtaggtgtattttggacagcacatatggtccattgtgtacaagtcagtaatctggatttcagtacatggatttaaaaggcaacaatccatcactggtttgtgtgtttttggttaagtttctggaagaatacaatgcttttatattggaagtataagttttgagtggcattgttgccttctaacaagctctctgggacttttaaagttttattactattattgctaatgtatgattatggtcagagactttcaacccaccccttcctgcctacccctggcttttcctcacaaagaatgtctagacaaacagcagcttagtctcctgacacctcttgtggggtgcatgttcctgctccaggtatgctgttcatgtggattcattccattcagtggccccttggggtttgcatgccagtgaagcgttaccatagaagagccagccgtttgtgttcgcttggtaggtgtaagtaatagcagcccttagccacggagtctttatgtggtttattcctgcaaggttgttttaaactgaaatagaactgctagtgtgattggttgatcagcaaaacagctgctctcattttgttttggaggaaccctggtggtttgacagccaggagaaaggccatatgtgaaaccagtctcttgtggagattggaaatcctccctgatatttgggcagagcctaaacgtgcatgcttgtcactcaaacaccagaagtttgaatcagaggtctgagtgacctcttttgtggctgttcttgatggtttccaggcctcgttatgcatggtttgcttgatgcccattttttgtgccttgtgctgttggatggtaacgaccactcaccatgtaaacacagtacctcagttttctgtccacagctgcagtcgctctgtccctcgtgcttcactgtgggcagccagggacaagcttctgaaagcagtgtgatacccaagtcataggtgcttctcgtatgtgaacaggtgtcattctacagatctgttatgtgttttcctgttgactcttaagagtccctgcatgtaaatctcaaagctgagcctggctcccagagtccagactgacattacagcgcaagagtttgcaagtgtgtccagcatgcaccaactgtgcagaacttggctcggtaactttgcgtggaaaaataaagtacattttgaagtatcttgagggttgggtcaattgagacatttctagcattacttaatgacttgcattgtggtttttctgcaagcaactttaatgactttttttataccacatggtctcccagtttctagatgaatgcaacatgatgatggtgatgatgacgatgagtttaatcattgttcatttattgcctttagggctgagggaaagggaaggtttgtttttttttctccccattttcccccattctgtctttcttttggtgacttacaccacatgtaatgacgctatgactaattctgctcccaagcccttgtatcttgggcttcattttaggctcatgtgtcagatctgcatgcattgcttgcatttttctggtatctgaatgttggttccttgttccaggaattcaacattaatttccaaaagtatcatgggacttgtgacaatacaagacatgaatctatgtataaaatttatcggcctttctcatttacctgctctagtattattgtattgtgtgtgcgtgcgtgtgtgatgtcaggctgccacgtaaaacttcagagaaaaatcttaaaagcagaccatccttttttgcatgctctattctaagtagaatgttcaatgtaactgactaaaattgcatgttaaagatatttaggtttttttgttttctttatttttatttgttttcagtttcctgtatatttgcttactgtgccgttttagtggttttaggataaaaatgcactggtgaagcaaatgtagtgccaacagaaggtgattttccagttgtaaatgtcatgcagcatttgaagggactgtgttttcttaaaaaaaaatcacagttacttctaaaccagatttcatttcttttattgttttatgtgccaaaccacgaagtgcattgggcttcaatctctgaacactgtagacccattagaagactgttccgattgttacaaattgtagtgcctgaaaacactcttaagctgattgtcttaacaaaatgaaagttctccaaagacaaaacagaacaattattataacaaaataattatggttgaaatgtctgtggttccttggaaatgctgcgctctttgtgtttttccatcattagtgcagttggaatgaatgtgtataggtcagaggtcttcgtgttcacattttaaaattaggtaaatgacctcatctttcaagcttgaattcatttttaattttaattttattttatacaatgtgtagacagttccctgttctctgcatttagaagtatacacaatataaatctgttaattctgtaagtaatttttataattatgatgtaactctatcttatccttaaaacatttaaaataaaccctttatgtgcaactcctgactgtaaa

SEQ ID NO: 1098 - protein, 262 aa, Homo sapiens
MKTPFGKTPGQRSRADAGHAGVSANMMKKRTSHKKHRSSVGPSKPVSQPRRNIVGCRIQHGWKEGNGPVTQWKGTVLDQVPVNPSLYLIKYDGFDCVYGLELNKDERVSALEVLPDRVATSRISDAHLADTMIGKAVEHMFETEDGSKDEWRGMVLARAPVMNTWFYITYEKDPVLYMYQLLDDYKEGDLRIMPDSNDSPPAEREPGEVVDSLVGKQVEYAKEDGSKRTGMVIHQVEAKPSVYFIKFDDDFHIYVYDLVKTS

SEQ ID NO: 1099 - DNA, 1472 bp, Homo sapiens
gtgtgggcggggcgcagttgggggagggtgcagagacctgagggcttgaggttgcctggctggccccgctcccagaggcgggtgccgcgctgtcgcccaggtatctggggtctctggtgtctgagtgtctcattgtcggcgcgaacacaattgctccagccacaggcgaggcctggccaaggtgtgggcgcatctagggcaggtcttgagaggtccagcgcccggtggtgcggacagaggcggggcaccgcggcgctcgccgccgcctccccgcaggtgatcatcctcctgcaggtgtcctcgggtctcaggtggctgcgtgtctgcgccatggttgacattctgggcgagcggcacctggtgacctgtaagggcgcgacggtggaggccgaggcggcgctgcagaacaaggtggtggcactgtacttcgcggcggcccggtgcgcgccgagccgcgacttcacgccgctgctctgcgacttctatacggcgctggtggccgaggcgcggcggcccgcgcccttcgaagtggtcttcgtgtcagccgacggcagctgccaggagatgctggacttcatgcgcgagctgcatggcgcctggctggcgctgcccttccacgacccctaccggcaacggagtctcgctctgttgcccaggctggagtgcagtggcgtgatcttagctcactgcaacctttgcctcctgggttcaagtgattctctagccttagcctcctgagcatctgggactacagccattgctgtgaattacgtgagggaaagatattgaagaggagttggacactccgagagtgcagctgttctccccccgcaccatccgtgtcctgcattctgcgagtctgtgctcattaacaatgtgctgtgaccatgtgactcagcaatcctgctgctgggtatatacccgaaagaaaggaaaaggaagccagtatattgaagaggtatctgcacccccatgtttattgcagcactgttcacaacagccaagatttggaagcaacctaagtgtccatcaacagatgaatggataaagaaaacgtggtacatatacacaatggagtactcttcagccattaaaaaaatgagattctgtcatttgcaataatatagatggaaaaggaggcccttatgtgaagtgaaataagccaggcacagaaagacaaacatcacatgttctcacttatttgtgggatctaatgatcaaaacaattgaactcttggacatagagagtagaaggttggttaccagaagctggaaaggaaagtggggttgggaggaaggtgggaatggttaataggtacaaaaaaatacaaagaataaataagacctaatatttgatagcacaacagtgtgactactgtcaataatcatttaattgtacatttaaaaataactataattgcattgtttgtaacacaaaagataaatgcttgaggagaaaaaaaaaaaaaaaa

SEQ ID NO: 1100 - protein, 135 aa, Homo sapiens
MVDILGERHLVTCKGATVEAEAALQNKVVALYFAAARCAPSRDFTPLLCDFYTALVAEARRPAPFEVVFVSADGSCQEMLDFMRELHGAWLALPFHDPYRQRSLALLPRLECSGVILAHCNLCLLGSSDSLALAS

SEQ ID NO: 1101 - DNA, 1078 bp, Homo sapiens
cactcgctggtggtgggtgcgccgtgctgagctctggctgtcagtgtgttcgcccgcgtcccctccgcgctctccgcttgtggataactagctgctggttgatcgcactatgactctggaagaagtccgcggccaggacacagttccggaaagcacagccaggatgcagggtgccgggaaagcgctgcatgagttgctgctgtcggcgcagcgtcagggctgcctcactgccggcgtctacgagtcagccaaagtcttgaacgtggaccccgacaatgtgaccttctgtgtgctggctgcgggtgaggaggacgagggcgacatcgcgctgcagatccattttacgctgatccaggctttctgctgcgagaacgacatcgacatagtgcgcgtgggcgatgtgcagcggctggcggctatcgtgggcgccggcgaggaggcgggtgcgccgggcgacctgcactgcatcctcatttcgaaccccaacgaggacgcctggaaggatcccgccttggagaagctcagcctgttttgcgaggagagccgcagcgttaacgactgggtgcccagcatcaccctccccgagtgacagcccggcggggaccttggtctgatcgacgtggtgacgccccggggcgcctagagcgcggctggctctgtggaggggccctccgagggtgcccgagtgcggcgtggagactggcaggcggggggggcgcctggagagcgaggaggcgcggcctcccgaggaggggcccggtggcggcagggccaggctggtccgagctgaggactctgcaagtgtctggagcggctgctcgcccaggaaggcctaggctaggacgttggcctcagggccaggaaggacagactggccgggcaggcgtgactcagcagcctgcgctcggcaggaaggagcggcgccctggacttggtacagtttcaggagcgtgaaggacttaaccgactgccgctgctttttcaaaacggatccgggcaatgcttcgttttctaaaggatgctgctgttgaagctttgaattttacaataaactttttgaaacaaaaaaaaaaaaaaa

SEQ ID NO: 1102 - protein, 159 aa, Homo sapiens
MTLEEVRGQDTVPESTARMQGAGKALHELLLSAQRQGCLTAGVYESAKVLNVDPDNVTFCVLAAGEEDEGDIALQIHFTLIQAFCCENDIDIVRVGDVQRLAAIVGAGEEAGAPGDLHCILISNPNEDAWKDPALEKLSLFCEESRSVNDWVPSITLPE

SEQ ID NO: 1103 - DNA, 1332 bp, Homo sapiens
gctgcagccctcagaagtaagcaaggtttcctgccgggagaaaaggatttgaagcattccagccaaaatgacggacagaagccccttcgaaaccgacatgctcaccctgacccgctacgttatggaaaaggggcgtcaggccaaagggactggggagctcacccagctgctgaactcaatgctgacggccatcaaagccatctcctcggctgtgcgcaaggccggtctggcccacctgtatggaatcgcaggaagcgttaacgtgacgggagatgaggtgaagaaactggatgtgctatccaattccctggtgatcaacatggtccaatcctcctatagtacctgcgtcctggtctcagaagagaataaggacgccatcatcaccgccaaggagaagcgggggaaatacgtggtctgctttgacccactggatggatcttccaatattgactgcctggcctccatcggaaccatctttgccatctatagaaagacctcagaggatgagccttctgaaaaggatgccctgcagtgtggccgcaatattgtggccgcaggttatgcgctgtacggtagtgcaaccctggtggctctctccacagggcaaggcgtggacctcttcatgcttgacccggctcttggtgaatttgtcctggtggaaaaagatgtcaagattaagaagaaaggaaagatttacagcctgaatgagggctatgccaagtattttgatgcggccaccactgaatatgtgcagaaaaagaaattccctgaggatggcagtgctccctatggggccaggtatgtgggctccatggtggctgacgtgcaccgcaccctggtctatggaggaatcttcctgtacccagccaaccagaagagccctaagggcaagctccggctcctgtatgaatgcaatcccgtggcctacatcattgagcaggcaggaggcttggcgaccacggggacccagcctgtactggacgtgaagcccgaggcaattcaccagcgagtccccctcattctggggtcaccagaggatgtgcaggaatatctcacctgtgtgcagaaaaatcaggcaggcagctagcgagtttgaccccacatgccctcttctgtttgttttgcaccttgtctaaggaccctaaatgaacgataaacagagatggtagctatgagtatacaaaaggtaaatccacttaatcacatacagaagagcaacaacaaactgcttacgacaggtttggaagccacaggcgattctatggtcaatgtgaaggactagaaataaaaacccacatgtggaaaaaaaaaaaaaaaaaaaaaaaaaaaaaa

SEQ ID NO: 1104 - protein, 339 aa, Homo sapiens
MTDRSPFETDMLTLTRYVMEKGRQAKGTGELTQLLNSMLTAIKAISSAVRKAGLAHLYGIAGSVNVTGDEVKKLDVLSNSLVINMVQSSYSTCVLVSEENKDAIITAKEKRGKYVVCFDPLDGSSNIDCLASIGTIFAIYRKTSEDEPSEKDALQCGRNIVAAGYALYGSATLVALSTGQGVDLFMLDPALGEFVLVEKDVKIKKKGKIYSLNEGYAKYFDAATTEYVQKKKFPEDGSAPYGARYVGSMVADVHRTLVYGGIFLYPANQKSPKGKLRLLYECNPVAYIIEQAGGLATTGTQPVLDVKPEAIHQRVPLILGSPEDVQEYLTCVQKNQAGS

SEQ ID NO: 1105 - DNA, 1527 bp, Homo sapiens
ggcctggcccagttgcaccacgagcgctgcggacactcggggcggcagtcggtctgtcagtcctcccgccaggtcccgcggcccgcacctgccgcccgcacctgcagctccgcacctgcggccagtgcctactgccctctcttgccgcccgcacctgcagccccgcacctgccgcttgcacctgcagccccgcgctctacccggttcaagcatggctgaccaggcgcccttcgacacggacgtcaacaccctgacccgcttcgtcatggaggagggcaggaaggcccgcggcacgggcgagttgacccagctgctcaactcgctctgcacagcagtcaaagccatctcttcggcggtgcgcaaggcgggcatcgcgcacctctatggcattgctggttctaccaacgtgacaggtgatcaagttaagaagctggacgtcctctccaacgacctggttatgaacatgttaaagtcatcctttgccacgtgtgttctcgtgtcagaagaagataaacacgccatcatagtggaaccggagaaaaggggtaaatatgtggtctgttttgatccccttgatggatcttccaacatcgattgccttgtgtccgttggaaccatttttggcatctatagaaagaaatcaactgatgagccttctgagaaggatgctctgcaaccaggccggaacctggtggcagccggctacgcactgtatggcagtgccaccatgctggtccttgccatggactgtggggtcaactgcttcatgctggacccggccatcggggagttcattttggtggacaaggatgtgaagataaaaaagaaaggtaaaatctacagccttaacgagggctacgccagggactttgaccctgccgtcactgagtacatccagaggaagaagttccccccagataattcagctccttatggggcccggtatgtgggctccatggtggctgatgttcatcgcactctggtctacggagggatatttctgtaccccgctaacaagaagagccccaatggaaagctgagactgctgtacgaatgcaaccccatggcctacgtcatggagaaggctgggggaatggccaccactgggaaggaggccgtgttagacgtcattcccacagacattcaccagagggcgccggtgatcttgggatcccccgacgacgtgctcgagttcctgaaggtgtatgagaagcactctgcccagtgagcacctgccctgcctgcatccggagaattgcctctacctggaccttttgtctcacacagcagtaccctgacctgctgtgcaccttacattcctagagagcagaaataaaaagcatgactatttccaccatcaaatgctgtagaatgcttggcactccctaaccaaatgctgtctccataatgccactggtgttaagatatattttgagtggatggaggagaaataaacttattcctccttaaaaaaaaaaaaaaaaaaaaaaaaaaaaaaaaaaaaaaaaaaaaaaaaaaaaaaaaaaa

SEQ ID NO: 1106 - protein, 338 aa, Homo sapiens [sequence omitted]

SEQ ID NO: 1107 - DNA, 1475 bp, Homo sapiens
gtcgacgcggccgcgctccgctcccgtgagtaacttggctccgggggctccgctcgcctgcccgcacgccgcccgccacccaggaccgcgccgccggcctccgccgctagcaaacccttccgacggccctcgctgcgcaagccgggacgcctctcccccctccgcccccgccgcggaaagttaagtttgaagaggggggaagaggggaacatggacatgaagaggaggatccacctggagctgaggaaccggaccccggcagctgttcgagaacttgtcttggacaattgcaaatcaaatgatggaaaaattgagggcttaacagctgaatttgtgaacttagagttcctcagtttaataaatgtaggcttgatctcagtttcaaatctccccaagctgcctaaattgaaaaagcttgaactcagtgaaaatagaatctttggaggtctggacatgttagctgaaaaacttccaaatctcacacatctaaacttaagtggaaataaactgaaagatatcagcaccttggaacctttgaaaaagttagaatgtctgaaaagcctggacctctttaactgtgaggttaccaacctgaatgactaccgagagagtgtcttcaagctcctgccccagcttacctacttggatggctatgaccgagaggaccaggaagcacctgactcagatgccgaggtggatggtgtggatgaagaggaggaggacgaagaaggagaagatgaggaagacgaggacgatgaggatggtgaagaagaggagtttgatgaagaagatgatgaagatgaagatgtagaaggggatgaggacgacgatgaagtcagtgaggaggaagaagaatttggacttgatgaagaagatgaagatgaggatgaggatgaagaggaggaagaaggtgggaaaggtgaaaagaggaagagagaaacagatgatgaaggagaagatgattaagaccccagatgacctgcagaaacagaactgttcagtattggttggactgctcatggattttgtagctgtttaaaaaaaaaaaaaaggtagctgtgatacaaaccccaggacacccacccacccaaagagccaaagaatagttcctgtgacattccgccttccttccatgtagtccctcttggtaatctaccaccaagcttgtggacttcaccccaacaaaattgtaagcgttgttaggtttttgtgtaagattcttgctgtagcgtggatagctgtgattggtgagtcaaccgtctgtggctaccagttacactgagattgtaacagcatttttactttctgtacaacaaaaaagctttgtaaataaaatcttaacattttgggtctgttttttcatgctttgctttttaattattattattattttttttacattaggacattttatgtgacaactgccaaaaaagtatttttaagaatttaagcgaaataaacagttactctttggc

SEQ ID NO: 1108 - protein, 251 aa, Homo sapiens
MDMKRRIHLELRNRTPAAVRELVLDNCKSNDGKIEGLTAEFVNLEFLSLINVGLISVSNLPKLPKLKKLELSENRIFGGLDMLAEKLPNLTHLNLSGNKLKDISTLEPLKKLECLKSLDLFNCEVTNLNDYRESVFKLLPQLTYLDGYDREDQEAPDSDAEVDGVDEEEEDEEGEDEEDEDDEDGEEEEFDEEDDEDEDVEGDEDDDEVSEEEEEFGLDEEDEDEDEDEEEEEGGKGEKRKRETDDEGEDD

SEQ ID NO: 1109 - DNA, 1170 bp, Homo sapiens
agagtagaggcggcggcggcggcggccggacccagactggtagtgaggctttggaccccgagccgctgcaatgccgctggagctggagctgtgtcccgggcgctgggtgggcgggcaacacccgtgcttcatcattgccgagatcggccagaaccaccagggcgacctggacgtagccaagcgcatgatccgcatggccaaggagtgtggggctgattgtgctaagttccagaagagtgagctagaattcaagtttaatcggaaagccttggagaggccatacacctcgaagcattcctgggggaagacgtacggggagcacaaacgacatctggagttcagccatgaccagtacagggagctgcagaggtacgccgaggaggttgggatcttcttcactgcctctggcatggatgagatggcagttgaattcctgcatgaactgaatgttccatttttcaaagttggatctggagacactaataattttccttatctggaaaagacagccaaaaaaggtcgcccaatggtgatctccagtgggatgcagtcaatggacaccatgaagcaagtttatcagatcgtgaagcccctcaaccccaacttctgcttcttgcagtgtaccagcgcatacccgctccagcctgaggacgtcaacctgcgggtcatctcggaatatcagaagctctttcctgacattcccatagggtattctgggcatgaaacaggcatagcgatatctgtggccgcagtggctctgggggccaaggtgttggaacgtcacataactttggacaagacctggaaggggagtgaccactcggcctcgctggagcctggagaactggccgagctggtgcggtcagtgcgtcttgtggagcgtgccctgggctccccaaccaagcagctgctgccctgtgagatggcctgcaatgagaagctgggcaagtctgtggtggccaaagtgaaaattccggaaggcaccattctaacaatggacatgctcaccgtgaaggtgggtgagcccaaaggctatcctcctgaagacatctttaatctagtgggcaagaaggtcctggtcactgttgaagaggatgacaccatcatggaagaattggtagataatcatggcaaaaaaatcaagtcttaaaaataaagtgccattctctg

SEQ ID NO: 1110 - protein, 359 aa, Homo sapiens
MPLELELCPGRWVGGQHPCFIIAEIGQNHQGDLDVAKRMIRMAKECGADCAKFQKSELEFKFNRKALERPYTSKHSWGKTYGEHKRHLEFSHDQYRELQRYAEEVGIFFTASGMDEMAVEFLHELNVPFFKVGSGDTNNFPYLEKTAKKGRPMVISSGMQSMDTMKQVYQIVKPLNPNFCFLQCTSAYPLQPEDVNLRVISEYQKLFPDIPIGYSGHETGIAISVAAVALGAKVLERHITLDKTWKGSDHSASLEPGELAELVRSVRLVERALGSPTKQLLPCEMACNEKLGKSVVAKVKIPEGTILTMDMLTVKVGEPKGYPPEDIFNLVGKKVLVTVEEDDTIMEELVDNHGKKIKS

SEQ ID NO: 1111 - DNA, 4454 bp, Homo sapiens
gtggagatgaatggcgggcgcggcgaccgggagccggacccctgggaggtcggagcttgtcgagggatgcggctggcgctgcccggagcatggcgaccgcgtggctgagctcttctgtcgccgctgccgccgctgcgtgtgcgcgctttgcccggtgctgggcgcgcaccgtggccaccctgtgggcctggcgctggaggcagcggtgcacgtgcagaaactcagccaagaatgtttaaagcagctggcaatcaagaagcagcagcacattgacaacataacccagatagaagatgccaccgagaagctcaaggctaatgcagagtcaagtaaaacctggctgaaggggaaattcactgaactcagattactacttgacgaagaggaagcgctggccaagaaattcattgataaaaacacgcagcttaccctccaggtgtacagggaacaagctgactcttgcagagagcaacttgacatcatgaatgatctctccaacagggtctggagtatcagccaggagcccgatcctgtccagaggcttcaggcatacacggccaccgagcaggagatgcagcagcagatgagcctcggggagctgtgccatcccgtgcccctctcttttgagcccgtcaagagcttctttaagggcctcgtggaagccgtggagagtacattacagacgccattggacattcgccttaaggaaagcataaactgccagctctcagacccttccagcaccaagccaggtaccttgttgaaaaccagcccctcaccagagcgatcgctattgctgaaatacgcgcgcacgcccacgctggatcctgacacgatgcacgcgcgcctgcgcctgtccgccgatcgcctgacggtgcgctgcggcctgctgggcagcctggggcccgtgcccgtgctgcggttcgacgcgctctggcaagtgctggctcgtgactgcttcgccaccggccgccactactgggaggttgacgtgcaggaggcgggcgccggctggtgggtgggcgcggcctacgcctcccttcggcgccgcggggcctcggccgccgcccgcctgggctgcaaccgccagtcctggtgcctcaagcgctacgaccttgagtactgggccttccacgacggccagcgcagccgcctgcggccccgcgacgacctcgaccggctcggcgtcttcctggactacgaggccggcgtcctcgccttctacgacgtgacgggcggcatgagccacctgcataccttccgcgccacgttccaggagccgctctacccggccctgcggctctgggagggggccatcagcatcccccggctgccctaggggccaggaccggcgtgacagcctccaggtacgccgcagctgcccagtctcgcctaatctacctagatcagcgtggctggtccccttactgcctgcttcttagggccctctccctgccccagctttccccgaccaatcacgcctacagtgctttgaaggtttcctctcctaggctagtttcaaacaggccctaaacaagtctgctgctgccctctcatcagacctccgcaccctcaccccaccatcacttaaactactttaatccagttccttcaaagtgatacccccacaggtaagccctcagcatcctgaatacatcatccgcagcctgggaaccttctccctcgtacagcacaggaacctgacacatagtaggcacacagtaaacgtttgtgaatgaatgggagtcatccagtcctgactcttctgtctcttgaggtcccttgaatcttccgcttcctccccaccgatttcagcgtgtccacatcacagctccctccagaagctgcaagagcttcttagcagttcctggtctgaaccctctcccagtcctcatcttccaccctaaaactagagtgatcttcctaaaacttcacttaacccctcagctatgaaaaggcttccaggagtttccatgaaataacaaaaaaaaatacaagcgcctcaccttagcattcaaggcttgtctagtctgcccaaaattacttatcctcacctagctcctaccactcttcttagagactctccagtcagaaatgtgtcgcatagttccacctccacacctctctgctgccagcacattcatgcagaaaagtcttttcacctgtctcagtcttccgcaggcttacctgcgccaggaagtctaaccaaggaacaagaatctcactatcagagccacaaatctgggacctgtctttccaactaaattggaggctttggaagggcagctttgtcctatactctctccaccctgaaaagttcccagaaagccccttccctcccaagcagtgaattaataaccagcaggtgcctatcactgagtaacagaagagctgagttaggcgggcctcacaggtcacccagccagatctcatctggggagtctgaggtcctgaaagaaagcagagctgcgtaaagttaccccggggtgatataggggggccagacgtgtgccccgttcacccacccccaggcaagcatctgacctgtcccctggcccagcccttaggcccagctttcaacctgcttactcatttctcaggggattttgggaaggaatcagcaggtgacagttgctaagcaaccaaagggcgtggtgtttcccaactgtcttgggacaaaaagggtaagagcacccttagatccagatgttgccaaggaaacccagagtgcccagctgtctggaatgaagtgacagaggtagaaaacagtaggccctcacaggaggccaccttcgctagcagggagtgggaggcttctttccagggatttgtgtctccgttctgaaggttctgcgtcctgttttgtcaattccctagacggttttgaagttatattctgttaaagcatcttcataggtgcttggtgggaggccaaggtcgccgaatcctcgtggtttaaatagactttcagtgcattagtttgaaccatataaaactgacaattttcaatagtttttgagttaaaaatggcacttttgatatgagacaatgtagcagaataccaggcagacagaaccttgcaaacaccttaacttctaaccaaagactttaaaactctggctggacagagttttaagcactatgctgcaggaatcctgagaaaaaggggaaattaattctattaggaatggcccaaactgaattgtgacaggcagagggtgttcctgacagagggaagatgaatacacttgaccccaacatttctgcccatccctgatgaccaagacctcttcccagacccacagctgcaggggccaagtaataacagctcttaatagtttataatgcactgttttaatgctttacgactaaactcatctgatcctttcatcagccctagagggtagaaagttttcccaattctacacatggcaaaatggagacccagagtcacttgcccaaggtcgcacagctagtggtggagctggagtctgggcccaggctgtgagttccaggtctgtgctcatggccaccaggccatactgctcagggtgaatgcagctggtctctggccagtgcctggtgctctggcccctctcgtggagctactgcccatgatgctttcctagtgcctggttactctgcgagacttgagtctacctttggactgccttccttgggggtctgagatgaggccttatggcccagaggggaacttgattcaaaaatttgggattcatgtagcagagacagagctagactgtaaaggtcacaaactagctgtgtcaaggcccgtgatagccagaaagcggcagtttcagtccatatcaattgtgtgaccagggctagtcactttttacttctcagtgccatctataaaatggggataatagcactacctaccaagtgctgtgaggctcaaatgagccaaaggttataaacttgccttaaaactatagtcctatacaaaaattagctgggcgtggtggtgcatgcctgtaatcccagctactagggaggctgaggcaagagagttgcttgaacccaggaggcggagattgcagtgagctgagattgcaccactgcactccagcctggggacagagcaagactcttgtctcaaaaaaaacaaaaaaaacatatatactgctgtatcatgccaggatttatcagcattcccaagggagcttgcacggtactgaccgagtgctgagactactggtattcccagctgccatgtggcagcagcaggagctactagaatattctcagcacaggaatgaggcttccttggtttccatgtctgtaagggttactgatcacttaccttcttctctttcagacttgaatctgtagacatttctttattgatatggcaaattgcttgcagatatttttaaatgacagcaattttctaatatttggtttaataaaatgtgaataatgtccctttt

SEQ ID NO: 1112 - protein, 442 aa, Homo sapiens
MAGAATGSRTPGRSELVEGCGWRCPEHGDRVAELFCRRCRRCVCALCPVLGAHRGHPVGLALEAAVHVQKLSQECLKQLAIKKQQHIDNITQIEDATEKLKANAESSKTWLKGKFTELRLLLDEEEALAKKFIDKNTQLTLQVYREQADSCREQLDIMNDLSNRVWSISQEPDPVQRLQAYTATEQEMQQQMSLGELCHPVPLSFEPVKSFFKGLVEAVESTLQTPLDIRLKESINCQLSDPSSTKPGTLLKTSPSPERSLLLKYARTPTLDPDTMHARLRLSADRLTVRCGLLGSLGPVPVLRFDALWQVLARDCFATGRHYWEVDVQEAGAGWWVGAAYASLRRRGASAAARLGCNRQSWCLKRYDLEYWAFHDGQRSRLRPRDDLDRLGVFLDYEAGVLAFYDVTGGMSHLHTFRATFQEPLYPALRLWEGAISIPRLP

SEQ ID NO: 1113 - DNA, 1479 bp, Homo sapiens
gtggagatgaatggcgggcgcggcgaccgggagccggacccctgggaggtcggagcttgtcgagggatgcggctggcgctgcccggagcatggcgaccgcgtggctgagctcttctgtcgccgctgccgccgctgcgtgtgcgcgctttgcccggtgctgggcgcgcaccgtggccaccctgtgggcctggcgctggaggcagcggtgcacgtgcagaaactcagccaagaatgtttaaagcagctggcaatcaagaagcagcagcacattgacaacataacccagatagaagatgccaccgagaagctcaaggctaatgcagagtcaagtaaaacctggctgaaggggaaattcactgaactcagattactacttgacgaagaggaagcgctggccaagaaattcattgataaaaacacgcagcttaccctccaggtgtacagggaacaagctgactcttgcagagagcaacttgacatcatgaatgatctctccaacagggtctggagtatcagccaggagcccgatcctgtccagaggcttcaggcatacacggccaccgagcaggagatgcagcagcagatgagcctcggggagctgtgccatcccgtgcccctctcttttgagcccgtcaagagcttctttaagggcctcgtggaagccgtggagagtacattacagacgccattggacattcgccttaaggaaagcataaactgccagctctcagacccttccagcaccaagccaggtaccttgttgaaaaccagcccctcaccagagcgatcgctattgctgaaatacgcgcgcacgcccacgctggatcctgacacgatgcacgcgcgcctgcgcctgtccgccgatcgcctgacggtgcgctgcggcctgctgggcagcctggggcccgtgcccgtgctgcggttcgacgcgctctggcaagtgctggctcgtgactgcttcgccaccggccgccactactgggaggttgacgtgcaggaggcgggcgccggctggtgggtgggcgcggcctacgcctcccttcggcgccgcggggcctcggccgccgcccgcctgggctgcaaccgccagtcctggtgcctcaagcgctacgaccttgagtactgggccttccacgacggccagcgcagccgcctgcggccccgcgacgacctcgaccggctcggcgtcttcctggactacgaggccggcgtcctcgccttctacgacgtgacgggcggcatgagccacctgcataccttccgcgccacgttccaggagccgctctacccggccctgcggctctgggagggggccatcagcatcccccggctgccctaggggccaggaccggcgtgacagcctccagacttgaatctgtagacatttctttattgatatggcaaattgcttgcagatatttttaaatgacagcaattttctaatatttggtttaataaaatgtgaataatgtccctttt

SEQ ID NO: 1114 - protein, 442 aa, Homo sapiens; identical to SEQ ID NO: 1112

SEQ ID NO: 1115 - DNA, 1789 bp, Homo sapiens
cggaggaggtggagatgaatggcgggcgcggcgaccgggagccggacccctgggaggtcggagcttgtcgagggatgcggctggcgctgcccggagcatggcgaccgcgtggctgagctcttctgtcgccgctgccgccgctgcgtgtgcgcgctttgcccggtgctgggcgcgcaccgtggccaccctgtgggcctggcgctggaggcagcggtgcacgtgcagaaactcagccaagaatgtttaaagcagctggcaatcaagaagcagcagcacattgacaacataacccagatagaagatgccaccgagaagctcaaggctaatgcagagtcaagtaaaacctggctgaaggggaaattcactgaactcagattactacttgacgaagaggaagcgctggccaagaaattcattgataaaaacacgcagcttaccctccaggtgtacagggaacaagctgactcttgcagagagcaacttgacatcatgaatgatctctccaacagggtctggagtatcagccaggagcccgatcctgtccagaggcttcaggcatacacggccaccgagcaggagatgcagcagcagatgagcctcggggagctgtgccatcccgtgcccctctcctttgagcccgtcaagagcttctttaagggcctcgtggaagccgtggagagtacattacagacgccattggacattcgccttaaggaaagcataaactgccagctctcagacccttccagcaccaagccaggtaccttgttgaaaaccagcccctcaccagagcgatcgctattgctgaaatacgcgcgcacgcccacgctggatcctgacacgatgcacgcgcgcctgcgcctgtccgccgatcgcctgacggtgcgctgcggcctgctgggcagcctggggcccgtgcccgtgctgcggttcgacgcgctctggcaagtgctggctcgtgactgcttcgccaccggccgccactactgggaggttgacgtgcaggaggcgggcgccggctggtgggtgggcgcggcctacgcctcccttcggcgccgcggggcctcggccgccgcccgcctgggctgcaaccgccagtcctggtgcctcaagcgctacgaccttgagtactgggccttccacgacggccagcgcagccgcctgcggccccgcgacgacctcgaccggctcggcgtcttcctggactacgaggccggcgtcctcgccttctacgacgtgacgggcggcatgagccacctgcataccttccgcgccacgttccaggagccgctctacccggccctgcggctctgggagggggccatcagcatcccccggctgccctaggggccaggaccggcgtgacagcctccagaatgtcatggaagcagaatcgtacagtatgttcccttctgcatatgctgctttctcactcagcatcatttccttgagatgcatccaggctgctgcacgcatcaatagttcattcctggctgggcgcggtggctcacgcctgtaatcccagcgctttgggaggccgatgtgggtggatcacaaggtcaggagtttgagactagcctggccaagatggtgaaaccccatctctgcaaaaaatacaaaaattagccgggcaccatggcatgtgcctgtaatccctgctactcaggaggctgaggaaggagaatcacttgaacccgggcagcggaggttgcagtgagccgagatcacaccactgcactccagcctgggcaatagagtgagactccgtttcaaaaaaaaaaaaaaaaaa

SEQ ID NO: 1116 - protein, 442 aa, Homo sapiens; identical to SEQ ID NO: 1112

SEQ ID NO: 1117 - DNA, 3693 bp, Homo sapiens
gtggagatgaatggcgggcgcggcgaccgggagccggacccctgggaggtcggagcttgtcgagggatgcggctggcgctgcccggagcatggcgaccgcgtggctgagctcttctgtcgccgctgccgccgctgcgtgtgcgcgctttgcccggtgctgggcgcgcaccgtggccaccctgtgggcctggcgctggaggcagcggtgcacgtgcagaaactcagccaagaatgtttaaagcagctggcaatcaagaagcagcagcacattgacaacataacccagatagaagatgccaccgagaagctcaaggctaatgcagagtcaagtaaaacctggctgaaggggaaattcactgaactcagattactacttgacgaagaggaagcgctggccaagaaattcattgataaaaacacgcagcttaccctccaggtgtacagggaacaagctgactcttgcagagagcaacttgacatcatgaatgatctctccaacagggtctggagtatcagccaggagcccgatcctgtccagaggcttcaggcatacacggccaccgagcaggagatgcagcagcagatgagcctcggggagctgtgccatcccgtgcccctctcttttgagcccgtcaagagcttctttaagggcctcgtggaagccgtggagagtacattacagacgccattggacattcgcctttccccgaccaatcacgcctacagtgctttgaaggtttcctctcctaggctagtttcaaacaggccctaaacaagtctgctgctgccctctcatcagacctccgcaccctcaccccaccatcacttaaactactttaatccagttccttcaaagtgatacccccacaggtaagccctcagcatcctgaatacatcatccgcagcctgggaaccttctccctcgtacagcacaggaacctgacacatagtaggcacacagtaaacgtttgtgaatgaatgggagtcatccagtcctgactcttctgtctcttgaggtcccttgaatcttccgcttcctccccaccgatttcagcgtgtccacatcacagctccctccagaagctgcaagagcttcttagcagttcctggtctgaaccctctcccagtcctcatcttccaccctaaaactagagtgatcttcctaaaacttcacttaacccctcagctatgaaaaggcttccaggagtttccatgaaataacaaaaaaaaatacaagcgcctcaccttagcattcaaggcttgtctagtctgcccaaaattacttatcctcacctagctcctaccactcttcttagagactctccagtcagaaatgtgtcgcatagttccacctccacacctctctgctgccagcacattcatgcagaaaagtcttttcacctgtctcagtcttccgcaggcttacctgcgccaggaagtctaaccaaggaacaagaatctcactatcagagccacaaatctgggacctgtctttccaactaaattggaggctttggaagggcagctttgtcctatactctctccaccctgaaaagttcccagaaagccccttccctcccaagcagtgaattaataaccagcaggtgcctatcactgagtaacagaagagctgagttaggcgggcctcacaggtcacccagccagatctcatctggggagtctgaggtcctgaaagaaagcagagctgcgtaaagttaccccggggtgatataggggggccagacgtgtgccccgttcacccacccccaggcaagcatctgacctgtcccctggcccagcccttaggcccagctttcaacctgcttactcatttctcaggggattttgggaaggaatcagcaggtgacagttgctaagcaaccaaagggcgtggtgtttcccaactgtcttgggacaaaaagggtaagagcacccttagatccagatgttgccaaggaaacccagagtgcccagctgtctggaatgaagtgacagaggtagaaaacagtaggccctcacaggaggccaccttcgctagcagggagtgggaggcttctttccagggatttgtgtctccgttctgaaggttctgcgtcctgttttgtcaattccctagacggttttgaagttatattctgttaaagcatcttcataggtgcttggtgggaggccaaggtcgccgaatcctcgtggtttaaatagactttcagtgcattagtttgaaccatataaaactgacaattttcaatagtttttgagttaaaaatggcacttttgatatgagacaatgtagcagaataccaggcagacagaaccttgcaaacaccttaacttctaaccaaagactttaaaactctggctggacagagttttaagcactatgctgcaggaatcctgagaaaaaggggaaattaattctattaggaatggcccaaactgaattgtgacaggcagagggtgttcctgacagagggaagatgaatacacttgaccccaacatttctgcccatccctgatgaccaagacctcttcccagacccacagctgcaggggccaagtaataacagctcttaatagtttataatgcactgttttaatgctttacgactaaactcatctgatcctttcatcagccctagagggtagaaagttttcccaattctacacatggcaaaatggagacccagagtcacttgcccaaggtcgcacagctagtggtggagctggagtctgggcccaggctgtgagttccaggtctgtgctcatggccaccaggccatactgctcagggtgaatgcagctggtctctggccagtgcctggtgctctggcccctctcgtggagctactgcccatgatgctttcctagtgcctggttactctgcgagacttgagtctacctttggactgccttccttgggggtctgagatgaggccttatggcccagaggggaacttgattcaaaaatttgggattcatgtagcagagacagagctagactgtaaaggtcacaaactagctgtgtcaaggcccgtgatagccagaaagcggcagtttcagtccatatcaattgtgtgaccagggctagtcactttttacttctcagtgccatctataaaatggggataatagcactacctaccaagtgctgtgaggctcaaatgagccaaaggttataaacttgccttaaaactatagtcctatacaaaaattagctgggcgtggtggtgcatgcctgtaatcccagctactagggaggctgaggcaagagagttgcttgaacccaggaggcggagattgcagtgagctgagattgcaccactgcactccagcctggggacagagcaagactcttgtctcaaaaaaaacaaaaaaaacatatatactgctgtatcatgccaggatttatcagcattcccaagggagcttgcacggtactgaccgagtgctgagactactggtattcccagctgccatgtggcagcagcaggagctactagaatattctcagcacaggaatgaggcttccttggtttccatgtctgtaagggttactgatcacttaccttcttctctttcagacttgaatctgtagacatttctttattgatatggcaaattgcttgcagatatttttaaatgacagcaattttctaatatttggtttaataaaatgtgaataatgtccctttt

SEQ ID NO: 1118 - protein, 253 aa, Homo sapiens
MAGAATGSRTPGRSELVEGCGWRCPEHGDRVAELFCRRCRRCVCALCPVLGAHRGHPVGLALEAAVHVQKLSQECLKQLAIKKQQHIDNITQIEDATEKLKANAESSKTWLKGKFTELRLLLDEEEALAKKFIDKNTQLTLQVYREQADSCREQLDIMNDLSNRVWSISQEPDPVQRLQAYTATEQEMQQQMSLGELCHPVPLSFEPVKSFFKGLVEAVESTLQTPLDIRLSPTNHAYSALKVSSPRLVSNRP

SEQ ID NO: 1119 - DNA, 2427 bp, Homo sapiens
cacaggggcactgacatctttgctggactcttttaatcctcataaacccaggctgctggcacttgaaatttgagaagggcaatcagtctggcctcctgcctttctggcctgcaggcccagcctggacaaacaatttaggtggagctcctggaggctggaagcagagaggaggtacctcaccatcctctcctgccagctgttgcagactctgcctggggaactgattaagggtgagcagaggcatttatctccatgttaacaagcagatgtcatggcacccccagtaccggagctccaagttccgtcatgtctttggcaaaccagccagcaaggagaactgctacgactccgtgcctatcacccgcagcgttcacgacaaccacttctgtgccgtgaacccccacttcattgcagttgtgactgagtgtgctggtggaggggccttcctcgtcatccccctgcaccagacagggaagttggacccccactacccaaaagtctgcgggcacagaggcaacgttttggatgtcaagtggaacccttttgatgattttgagatcgcctcctgttctgaagatgccacaattaagatctggagcatccccaagcagctgctgaccaggaacctcacggcctacaggaaggaactcgtgggccacgcgcgcagagtaggcctggtggagtggcaccccacggccgccaacatcctcttcagtgctggctatgactacaaggtgatgatctggaacctggatacaaaggagtctgtcatcacaagccccatgagtacgattagctgtcaccaagatgtgatcctctccatgtccttcaacaccaacggcagcctgttggccaccacctgcaaagaccgcaagattcgggttattgacccccgagcagggaccgtcctccaggaggccagctacaaagggcaccgggccagcaaagtgctgtttctggggaacctgaagaagctgatgtccacaggcacatcccgatggaacaaccggcaggtggccttgtgggaccaggataacctctctgtgcctctgatggaggaggacctggacggctcctcgggcgtgctgtttcccttctatgacgcggacaccagcatgctctacgtggtggggaagggagatggcaacatccgctactacgaggtgagcgccgacaagcctcacctgagctacctgactgagtaccgctcctataacccacagaaggggatcggtgtcatgccaaagagaggactcgacgtgtcctcctgcgagatcttccgcttctacaagctgatcacaaccaaaagcctcatcgagcccatctccatgattgtgccccggcagtcagaatcctaccaagaggacatataccctccaacagcaggggcccagccctccctgacggcccaggagtggctcagcgggatgaatcgagacccaatcctggtgtcccttaggcctggctctgagctgctgagaccccacccactgcctgcagagagacctatcttcaattccatggccccagcctcaccccggctcttgaatcagacagaaaagctggctgcagaagatggctggaggtcttcctccctgttggaggagaagatgccaaggtgggcagcagaacacaggctggaggagaagaaaacctggctgacaaatggctttgacgttttcgaatgccccccaccaaagacagagaatgagttgctgcagatgttctaccggcaacaggaggagatccgaaggctccgggagctgttgacccagcgagaggtccaggccaaacagttggaactggagatcaaaaacttgcggatgggctcagagcagctctgagcagagacctctgccctcctcaccctcagggacaccactcggctccatggggaggtttagaaccaaaccacaagtcccctcaaggacaaccactatttctatattttttaccagaaaacaaaactctccatcgctgaaagagattccagtgggacatggtgccgtttttctgtttgccttcttgcaacaacagtttctgaattgactttgttttcagatgatgccttctgttgaattctgttattaagggcccatgatgagctgtaacttctcaagaggaaagaacacagtagaaaactagagctggaaggatctaggttgacctgtctgtgattttcaaactgtggtccagagaataggggaagactgggccagacgcagtggctcatgcctgtaatcccagcactctgggaggctgaggtgggcggattgcttgaggtcgggagtttgaaaccagtctcaccaggcgcagtggctcacgcctgtaattccagcatgttgggaggccgaggctggtggatcacgaggtcagcagttcgagaccagcctgaccaacatggtgaaaccccatctctactaaaaa

SEQ ID NO: 1120 - protein, 525 aa, Homo sapiens
MSWHPQYRSSKFRHVFGKPASKENCYDSVPITRSVHDNHFCAVNPHFIAVVTECAGGGAFLVIPLHQTGKLDPHYPKVCGHRGNVLDVKWNPFDDFEIASCSEDATIKIWSIPKQLLTRNLTAYRKELVGHARRVGLVEWHPTAANILFSAGYDYKVMIWNLDTKESVITSPMSTISCHQDVILSMSFNTNGSLLATTCKDRKIRVIDPRAGTVLQEASYKGHRASKVLFLGNLKKLMSTGTSRWNNRQVALWDQDNLSVPLMEEDLDGSSGVLFPFYDADTSMLYVVGKGDGNIRYYEVSADKPHLSYLTEYRSYNPQKGIGVMPKRGLDVSSCEIFRFYKLITTKSLIEPISMIVPRQSESYQEDIYPPTAGAQPSLTAQEWLSGMNRDPILVSLRPGSELLRPHPLPAERPIFNSMAPASPRLLNQTEKLAAEDGWRSSSLLEEKMPRWAAEHRLEEKKTWLTNGFDVFECPPPKTENELLQMFYRQQEEIRRLRELLTQREVQAKQLELEIKNLRMGSEQL

SEQ ID NO: 1121 - DNA, 2265 bp, Homo sapiens
cgggagtcggcgggcggcgaggagcgcggagccggagctggacgccgccgccgccaccgccacctgcgcggcagtcatcaagatgtcatggcacccccagtaccggagctccaagttccgtcatgtctttggcaaaccagccagcaaggagaactgctacgactccgtgcctatcacccgcagcgttcacgacaaccacttctgtgccgtgaacccccacttcattgcagttgtgactgagtgtgctggtggaggggccttcctcgtcatccccctgcaccagacagggaagttggacccccactacccaaaagtctgcgggcacagaggcaacgttttggatgtcaagtggaacccttttgatgattttgagatcgcctcctgttctgaagatgccacaattaagatctggagcatccccaagcagctgctgaccaggaacctcacggcctacaggaaggaactcgtgggccacgcgcgcagagtaggcctggtggagtggcaccccacggccgccaacatcctcttcagtgctggctatgactacaaggtgatgatctggaacctggatacaaaggagtctgtcatcacaagccccatgagtacgattagctgtcaccaagatgtgatcctctccatgtccttcaacaccaacggcagcctgttggccaccacctgcaaagaccgcaagattcgggttattgacccccgagcagggaccgtcctccaggaggccagctacaaagggcaccgggccagcaaagtgctgtttctggggaacctgaagaagctgatgtccacaggcacatcccgatggaacaaccggcaggtggccttgtgggaccaggataacctctctgtgcctctgatggaggaggacctggacggctcctcgggcgtgctgtttcccttctatgacgcggacaccagcatgctctacgtggtggggaagggagatggcaacatccgctactacgaggtgagcgccgacaagcctcacctgagctacctgactgagtaccgctcctataacccacagaaggggatcggtgtcatgccaaagagaggactcgacgtgtcctcctgcgagatcttccgcttctacaagctgatcacaaccaaaagcctcatcgagcccatctccatgattgtgccccggcggtcagaatcctaccaagaggacatataccctccaacagcaggggcccagccctccctgacggcccaggagtggctcagcgggatgaatcgagacccaatcctggtgtcccttaggcctggctctgagctgctgagaccccacccactgcctgcagagagacctatcttcaattccatggccccagcctcaccccggctcttgaatcagacagaaaagctggctgcagaagatggctggaggtcttcctccctgttggaggagaagatgccaaggtgggcagcagaacacaggctggaggagaagaaaacctggctgacaaatggctttgacgttttcgaatgccccccaccaaagacagagaatgagttgctgcagatgttctaccggcaacaggaggagatccgaaggctccgggagctgttgacccagcgagaggtccaggccaaacagttggaactggagatcaaaaacttgcggatgggctcagagcagctctgagcagagacctctgccctcctcaccctcagggacaccactcggctccatggggaggtttagaaccaaaccacaagtcccctcaaggacaaccactatttctatattttttaccagaaaacaaaactctccatcgctgaaagagattccagtgggacatggtgccgtttttctgtttgccttcttgcaacaacagtttctgaattgactttgttttcagatgatgccttctgttgaattctgttattaagggcccatgatgagctgtaacttctcaagaggaaagaacacagtagaaaactagagctggaaggatctaggttgacctgtctgtgattttcaaactgtggtccagagaataggggaagactgggccagacgcagtggctcatgcctgtaatcccagcactctgggaggctgaggtgggcggattgcttgaggtcgggagtttgaaaccagtctcaccaggcgcagtggctcacgcctgtaattccagcatgttgggaggccgaggctggtggatcacgaggtcagcagttcgagaccagcctgaccaacatggtgaaaccccatctctactaaaaaaaaaaaaaaaaaaaaaaaaaaa

SEQ ID NO: 1122 - protein, 525 aa, Homo sapiens
MSWHPQYRSSKFRHVFGKPASKENCYDSVPITRSVHDNHFCAVNPHFIAVVTECAGGGAFLVIPLHQTGKLDPHYPKVCGHRGNVLDVKWNPFDDFEIASCSEDATIKIWSIPKQLLTRNLTAYRKELVGHARRVGLVEWHPTAANILFSAGYDYKVMIWNLDTKESVITSPMSTISCHQDVILSMSFNTNGSLLATTCKDRKIRVIDPRAGTVLQEASYKGHRASKVLFLGNLKKLMSTGTSRWNNRQVALWDQDNLSVPLMEEDLDGSSGVLFPFYDADTSMLYVVGKGDGNIRYYEVSADKPHLSYLTEYRSYNPQKGIGVMPKRGLDVSSCEIFRFYKLITTKSLIEPISMIVPRRSESYQEDIYPPTAGAQPSLTAQEWLSGMNRDPILVSLRPGSELLRPHPLPAERPIFNSMAPASPRLLNQTEKLAAEDGWRSSSLLEEKMPRWAAEHRLEEKKTWLTNGFDVFECPPPKTENELLQMFYRQQEEIRRLRELLTQREVQAKQLELEIKNLRMGSEQL

SEQ ID NO: 1123 - DNA, 2770 bp, Homo sapiens
atgtgggggcgcacggcgcggcggcgctgcccgcgggaactgcggcgcggccgggaggcgctgttggtgctcctggcgctactggcgttggccgggctgggctcggtgctgcgggcgcagcgtggggccggggccggggctgccgagccgggacccccgcgcaccccgcgccccgggcggcgcgagccggtcatgccgcggccgccggtgccggcgaacgcgctgggcgcgcggggcgaggcggtgcggctgcagctgcagggcgaggagctgcggctgcaggaggagagcgtgcggctgcaccagattaacatctacctcagcgaccgcatctcactgcaccgccgcctgcccgagcgctggaacccgctgtgcaaagagaagaaatatgattatgataatttgcccaggacatctgttatcatagcattttataatgaagcctggtcaactctccttcggacagtttacagtgtccttgagacatccccggatatcctgctagaagaagtgatccttgtagatgactacagtgatagagagcacctgaaggagcgcttggccaatgagctttcgggactgcccaaggtgcgcctgatccgcgccaacaagagagagggcctggtgcgagcccggctgctgggggcgtctgcggcgaggggcgatgttctgaccttcctggactgtcactgtgagtgccacgaagggtggctggagccgctgctgcagaggatccatgaagaggagtcggcagtggtgtgcccggtgattgatgtgatcgactggaacaccttcgaatacctggggaactccggggagccccagatcggcggtttcgactggaggctggtgttcacgtggcacacagttcctgagagggagaggatacggatgcaatcccccgtcgatgtcatcaggtctccaacaatggctggtgggctgtttgctgtgagtaagaaatattttgaatatctggggtcttatgatacaggaatggaagtttggggaggagaaaacctcgaattttcctttaggatctggcagtgtggtggggttctggaaacacacccatgttcccatgttggccatgttttccccaagcaagctccctactcccgcaacaaggctctggccaacagtgttcgtgcagctgaagtatggatggatgaatttaaagagctctactaccatcgcaacccccgtgcccgcttggaaccttttggggatgtgacagagaggaagcagctccgggacaagctccagtgtaaagacttcaagtggttcttggagactgtgtatccagaactgcatgtgcctgaggacaggcctggcttcttcgggatgctccagaacaaaggactaacagactactgctttgactataaccctcccgatgaaaaccagattgtgggacaccaggtcattctgtacctctgtcatgggatgggccagaatcagtttttcgagtacacgtcccagaaagaaatacgctataacacccaccagcctgagggctgcattgctgtggaagcaggaatggatacccttatcatgcatctctgcgaagaaactgccccagagaatcagaagttcatcttgcaggaggatggatctttatttcacgaacagtccaagaaatgtgtccaggctgcgaggaaggagtcgagtgacagtttcgttccactcttacgagactgcaccaactcggatcatcagaaatggttcttcaaagagcgcatgttatgaagcctcgtgtatcaaggagcccatcgaaggagactgtggagccaggactctgcccaacaaagacttagctaagcagtgaccagaacccaccaaaaactaggctgcattgctttgaagaggcaatcattttgccatttgtgaaagttgtgttggatttagtaaaaatgtgaataagctttgtacttattttgagaactttttaaatgttccaaaataccctattttcaaagggtaatcgtaagatgttaacccttggtatttagaaaattaaaaccttataatatttttctatcaagatgtatattttacagtcgtgccttttactctcattagcaaaaaagataaagattttattttggtatttacaagaattcccaggtacgaagatatctgcatgggtggaaatcaggttcaagcaacgtactttgcattaactgataatacctcagctgcggggttaaagttttcccagtatagagagactgtcactaggaacattgtattgatttattcaggtcattgagatcttctagatgtattttaaaaagaatgctttttggttatgtgttgctaccacagttaacactccataatgttcatgtcagccaaagaggactaaccaaagctgaaatctcagagaacaatttgctttactaagctgagtcaacttgagagcgaacttctaacaatgccgcactgtagtgtggctggttctaccactatgactttaaaacatgtttatatcatttttaatttttatgatacggtagtgtcagggagaaatgtaatgttctatatgaaattcctttttcaagtttgttcattaataacagttattaatttaaatcagcgttagagtttgtgctgctgcaactgctgtgaaaatttctctgagtaattctgatttgtgaatgatcccagaccaaccctgagattttgtcaacctgattaagtcaatatgaatgattaaaaagatgtgagaacaaaaaaaaaaaaaaaaaaaaaaaaaaaaaaaaaaaaaaaa

SEQ ID NO: 1124 - protein, 581 aa, Homo sapiens [sequence omitted]

SEQ ID NO: 1125 - DNA, 1532 bp, Homo sapiens
agcgcagcgggggcgggaaggttgtagtgccgcgagttgagctcctcttgcctaagtggtcgcgccccctttaagagcagcgattgtaaggagaggcggtcccggtgtcctcgggtcccaggtgattgtgaagtgctgaccaattgccactggacatacttgaaacaaaataggaaaatggcagcaaactcttcaggacaaggttttcaaaacaaaaatagagttgcaatcttggcagaactggacaaagagaaaagaaaactacttatgcagaaccagtcttcaacaaatcatcctggagctagcattgcactctcgagaccctctcttaataaggacttccgggatcacgctgagcagcagcatattgcagcccaacagaaggcagctttgcagcatgctcatgcacattcatctggatacttcatcactcaagactctgcatttgggaaccttattcttcctgttttacctcgccttgacccagaatgaagaaaacatttgcgatggaaaagtgactttgtaatatcaaatgccaaagctactatcattcagtgctacatgaactgtgactttaagaattttggtgaactttgatattttttgtttgtctgaaagaaaggaatgtgtaagtgaaagctgaaagaagaataaccaggatgatgagagctgtggaagctgtatcgtccaaggaattgattatgtaccgtgactgtaacttttttgtaatgctgtttaactctcaatcagactgtgaactggatggtcacgaagtcattccccaactcctagcaagtttgactgaatatatcatgtccacagtagattttcaagaatcatttatagtacttaactttaaagaaacaaggctgcttttaaaaaatgaactaataggcttaaatcaattgcatccatatttgctgtttataggattgctatcagtataccttttgcgtttatagtcaacatgtatcatcctgaaatattctttctggacttataactacttccccctttttcactttaaaacaaacctcaagaataaattactaaccagtcttaaccatcttttataaacatatgctcttataaatgttgtgactagatgcaattaaaaataatagggaatgtggtaggtttttaatttgtacatcctcttatttagtgttaccacataaatgatgagtttgtgtggttctgttttccatttttgttctaactgaaaactttttggctgggcacggtgcctcatgcctgtaatcccagcactttgggaggccaaggcgggcagatcacttgagatcaggagtttgagaccagcctggccaacatggtgaaaccctgtctctactaaaagtataaaaaattagccatgtgtggtggcacacgcctgtaatcccagctactcaggaggctgaggcaggagaatcgcttgaacctgggaggcaggggttgcagtgagctgagacggtgtcactgcactccagcctgggtgacagtgagtctttgtctcaaagaaaaaaaaaaaaaaa

SEQ ID NO: 1126 - protein, 104 aa, Homo sapiens
MAANSSGQGFQNKNRVAILAELDKEKRKLLMQNQSSTNHPGASIALSRPSLNKDFRDHAEQQHIAAQQKAALQHAHAHSSGYFITQDSAFGNLILPVLPRLDPE

SEQ ID NO: 1127 - DNA, 5900 bp, Homo sapiens
atgttaggtggcaaggtcggaagggaggtcgctgcctgtagcaacaaagacggcggcgacagggggcgcgaccacttaggcaagaggagctcaactcgcggcactacaaccttcccgcccccgctgcgcttccgcctcctgactgacgtgcgccccagggagcggaaaccccgcctcccgccgggacccaacggccaccgcccgtcagaaaactgtggtagaggccttagtgaatcccagagtcaacatctgtcatcaccttttagcagcggacccgcggcgggctcgggcgcggagcgggggcgcgcggcgcggagcggagcgtctgagcgccggcagagaccagccggcgggtggcggcggcccccagcacggccggtgcaaggcctcgggttaagcggcggccgagcggggctcggcccggggtgctcggggagctcgccgcggcgggcagcaggaggaagcggcggcggcgcgtcccgagcggtgcgcgccatggcgggcgggccccccaaggccctgccgtccacggggccccactccctgcgcgacatgccgcacccgctggccggctccagcagcgaggaggccgtgggtggtgacagcacgcccagcccggacctgctgatggcccgcagcttcggtgacaaggatctcattttgcccaacggtggtactccagcaggtacttcaagtccagcttcttcatcttcccttctcaacagacttcagcttgatgatgatattgatggtgagactagagatctcttcgttatagttgatgatcccaagaagcatgtgtgtacaatggagacttacatcacctataggatcaccaccaaaagtactcgggtggagtttgacctgccagaatattctgttcgtcgaagataccaggattttgactggttgaggagcaaactggaagaatcccagcccactcatctcattccccctcttcccgagaagtttgtggtaaaaggtgttgtggatcgtttttcagaagagtttgtggagaccagaagaaaagctttggataaatttctaaaaagaattacggaccatcctgtgctgtctttcaatgaacactttaatattttccttactgctaaggacctgaacgcctacaagaagcaagggatagcattgctgaccagaatgggcgagtcagtcaagcacgtcactggcggctacaagctgaggactcggccgcttgagtttgctgccataggtgactacttagatacatttgcactcaaactgggaaccattgatcgaatagcccagcggatcatcaaagaagaaatagagtaccttgtggagctgagagaatacgggcctgtgtactccacatggagcgccttggagggtgagctggctgaacccctggagggtgtgtcagcttgcattgggaactgctctacagccttagaagagctgacagatgacatgacagaagacttcctacctgtgctcagggaatatattttatactctgactccatgaagagtgtattgaagaagagggaccaagttcaagcagagtatgaagccaaactggaagctgtggctctgcggaaggaagaccgccccaaggtaccggcggacgtcgagaaatgtcaggatcggatggagtgtttcaatgctgacctgaaagctgacatggagaggtggcagaacaacaagaggcaggacttccggcagctactcatggggatggctgacaagaacatccagtattatgagaagtgcctcatggcgtgggagtcgattattccactactgcaggagaaacaagaggccaagtaaagttctttcttgggacggagactcttctacctacacagggcctggcaccctataccggaatgtccctgcagtgccagagacgcagtgctgggaaaacaaccacagaaacatctctcctttgtgtatttttccctcccccacctttcaccccacagtggttttcaattagtatttattccatggtggagtctgtgaggctagaatatctctcagcaagagcagcatacctccatgttgtgaaggcatctgttcagtgaagcactacgaaaatttgaaaccaagggacaagacaacctgcagctgacgctctgacatttcatgacagtttcctctttagggacagctgagttgccagttgtgggagagaacccggggcctgcttttcaaggatgaggaggaggcaggaacagaaggcagctgctgctttctgtggaaacctggcccctctggaattggcctctgtgggcattgactcgtcttggcctaggaggcattggtgcctccctggcaagtccttaacgtacagtacctgtagctgtgagtgtggcctgctgcctgcttgtgatgagtgataccgtcttactgtttctgtttcacatagggacatttaaatcaatgtcaatgtgcgtccatgcttgagtgagcaagccagcgtccttgtcctcctgcaatgcctttgggaagctcaggggaatgctccccaagcttgtttctgacactagaatgcaacagattggaaactttttgtgtaaaatgaaaaaaacaaagtgctggttttttttttttttctgtgaaggtcttcagtgttttgcttgttcactgtcatcagagcagggattagacctgttagggaatatctattgtcttgaagtcagagtagctccccattgttgagatcagtgggcatataccaagctccacccccagtgtcagctttgtgcaatttgcctttacctcaccaaaaatacctactttaatatttcctcctgtgtcctctgaatgtctgggcgagcttttggtgagagggctggtatgtcatgttgttatgatacagtcgaaatttgtcaatgcagtgtgaatgttctacataaagtgctttaacccttaacatttcctggtcaggaaggaaaatcagtacctggacgggcctcgaaaatgacaaatgcaacagcgagccctttgtgtccagctaagctaaagtctcctcagtgtgcagccagattcctggggactgctgagtgtggttacaggctgcatttcagacaatgaccaggtttacttttcagatcacaaagcaaacagtcaccaaggatctgtcttccaactcttttttttttctgctgaaatgaagctacatgtcatgtttgtgttctttcatctgtggctcatccctgtaaaactacgaatctgagcctcaaataagcagtagtttttttgttgtttatttttaatgaaacagctgtgttaaggcgctgcttcagatgcaagttcacctggaaatactggtcagcgggcagcacgtcaaggtcacttaagcccacttttaactgcaggtcatcctcgcatcagccaaggctgtggtgctgttgatgccgcagttggacagcataggacggcttggttctgtttcattgtgtttgacaatgttgcagtttaaatgataatgtttaaatcaattggtacttgcctgtagtgttaaaccctatttgtgccattctcaagtcctttgatgtgaattttcagtttggtacagttagaaatgactcattgatgcggacaggtaagaacaacccatgtacccccgagtgattgcatgctttattctacctctaagccatcgtgttgacgtgggtatggacgcctgggtctgacctgacactgtgctgggagaatcaggatgtgtgtctaatggcgagctgacagccctctgctgatatttggcagaaggcaccagaccagcccagcagcaaatgctcatctttgggaacataggaagctttaccttggggaaggtatgctttacaaatgtccagtgtaatgaatgtttggaaaaaactggagttacaggaaaatgaaatctgactatctgctagttgccaaaacccagaaacattcctgtgtaatggttagttgggaaagaaggcagcacttgaaaaaatttaccaggttcctcactgggagatgtgggaaggggcgtgggacgcacgcggtcactccctctcctagtgagaggcagatggctggctctgaagggaggcaggcaccgtgggatttgggcttgctctgcttggtccccatgtgatgccctgtgctgtaagatatcagaaagacctggaacaaggcaaactttatgtcctcctggcatgttattgataacagagccaggaagtccagtgtacattacagattttctgggagaaatagtccttccagagaaaggattccttcccagcctccaggctggtgtctcatgaggtgaggaggctggcccagaaggaaggggacgttaggtggtgaagcaggctcccctgggcctctgagggccagcagtcccaaccatttgcctcttcgttttgaccaagcacaaaagagatattccctagaagtgtcacacggaggcttctgtgccaaagactgccttgtagaggtctcatcacctcacacttcttgacttcacaaaattgtggccctgagatcagtactcctctcttaagtatttattattattattatttactttacctcaagcagacagacataggttttgaggcttgaatacatggcagtggaatacaaggccctccctagcagccgccccaggcctggaaagtgggagatttcattcgcccgggttaaaaatccagaggaagacagaagagaggagtcctaggaactgagcagattttagagacgcaaatgatgtttaagagagccttgtttcagatagaaattctctatgggttgaaatgccaaaaacagaaaacatgatgttgactcatgtaatttagtccattttagcagagcctttagtgttaacaccagtggcgaggagcattgcatattctctgtcagcagcagcactcccacaccaggtggttctgggctctctgtaggctggtcctagtaggtgacacccagcaacacccctgttggacaggattgattgttcgcagtcttagaccaacacttcagtcagaaatgttactgggaggaggaaaggaaaatcactttttttcctccatgtggaaatgaggagagaggaaagtggattgcaaaccaaaatgtgagtcagtgtgatgaagcagtggctctgtcatctcggcctttatccaataacaaaccagcatctcttaaaggcgcttttggcctagacacccctgaagtttggatgaagtctggtggattccctgtctgttgtatttctgtgtgcctgttcccttcattgctgtgagttgggagtgcattgagagatgatgtccatctgatatattcctgtgaaataaactgccagcaaactttctaacttgtattttaactgttaaagaagagattaaaaacttcggctttggacatgtccacattatggactgtcatcttatttttaaaagtcattctttacgtttaaaattttaaaataaaaaccttctgaggtattgatgtagtccaccgtgtaaatgttaccttctctccatgctgccattatgccaaaacaaaagctgtgataaaaaaagtgcttgagagagtgtgttgataagaaagtgatttatttacagatggaagtctttgtttcatgaagctaccaaactttaaaaagaatgtcacccttttttttgtttgttatggaaaccagagattgtaaaatggaaaaagaatcgtttttttgttgactttttgatgctggcacgaggtttttgtccacttttttcatatatctgtgtataaaaaaattgttgtttactatggaattagtattacattttgaggtaaacaaaagaatttgtattgcttgataaatattagcttgtaaatttaaagtttctttacttcaattaacttaaaggaccaataaacccataaaagatgctttcttt

SEQ ID NO: 1128 - protein, 602 aa, Homo sapiens
MLGGKVGREVAACSNKDGGDRGRDHLGKRSSTRGTTTFPPPLRFRLLTDVRPRERKPRLPPGPNGHRPSENCGRGLSESQSQHLSSPFSSGPAAGSGAERGRAARSGASERRQRPAGGWRRPPARPVQGLGLSGGRAGLGPGCSGSSPRRAAGGSGGGASRAVRAMAGGPPKALPSTGPHSLRDMPHPLAGSSSEEAVGGDSTPSPDLLMARSFGDKDLILPNGGTPAGTSSPASSSSLLNRLQLDDDIDGETRDLFVIVDDPKKHVCTMETYITYRITTKSTRVEFDLPEYSVRRRYQDFDWLRSKLEESQPTHLIPPLPEKFVVKGVVDRFSEEFVETRRKALDKFLKRITDHPVLSFNEHFNIFLTAKDLNAYKKQGIALLTRMGESVKHVTGGYKLRTRPLEFAAIGDYLDTFALKLGTIDRIAQRIIKEEIEYLVELREYGPVYSTWSALEGELAEPLEGVSACIGNCSTALEELTDDMTEDFLPVLREYILYSDSMKSVLKKRDQVQAEYEAKLEAVALRKEDRPKVPADVEKCQDRMECFNADLKADMERWQNNKRQDFRQLLMGMADKNIQYYEKCLMAWESIIPLLQEKQEAK

SEQ ID NO: 1129 - DNA, 2445 bp, Homo sapiens
ctgagcagccgtagcagccgaatttgggagcatatccttgtcactgcagccagaaagcccttcgatccccatcagagaggtcacatgagccccgaggtcacctgcccgcggaggggccacctgcctcgcttccacccgaggacctgggttgagcccgtgatggcctcgtcccaggtggctgcctccctctacgatgcggggctactcctcgtggtgaaggcgtcctacggaaccggaggctcctccaaccacagtgccagcccatcgccccggggggctctagaggaccaacagcagagagccatctccaatttctacattatctacaaccttgtggtgggcctgtcccccctgctgtccgcctacgggctgggatggctcagcgaccgctaccaccgaaagatctccatctgcatgtcgctgctgggcttcctgctctcccgcctcgggctgctgctcaaggtgctgctggactggccagtggaggtgctgtacggggcggcggcgctgaacgggctattcggcggcttctccgccttctggtccggggtcatggcgctgggatcgctgggctcctccgagggccgccgctctgtgcgcctcatcctcattgacctgatgctgggcttggcggggttctgcgggagcatggcttccgggcatctcttcaagcagatggctgggcactctgggcagggcctgatactgacggcctgcagcgtgagctgtgcctcgtttgccctgctctacagccttttggtgctaaaggtccctgagtcggtggccaaacccagccaggagctccccgccgtggataccgtgtctggcacggttggcacataccgcactctggatcctgatcagttggaccaacagtatgcagtggggcaccctccatctcctggaaaagcaaaaccccataaaaccaccattgccttgctctttgtgggtgctatcatatatgacctggcggtggtgggcacagtggacgtgatccctctttttgtgctgagggagcctctcggttggaaccaagtgcaggtgggctatggtatggctgcagggtacaccatcttcatcaccagcttcctgggtgtcctggtcttctcccgctgctttcgggacaccaccatgatcatgattgggatggtctcctttgggtcaggagccctcctcttggcttttgtgaaagagacatacatgttctatattgctcgagccgtcatgctgtttgctctcatccccgtcacaaccatccgatcagctatgtccaaactcataaagggctcctcttatggaaaggtgttcgtcatactgcagctgtccttggctctgaccggcgtggtgacatccaccttgtacaacaagatctaccagctcaccatggacatgtttgtgggctcctgctttgctctctcctcctttctctccttcctggccatcattccaattagcatcgtggcctataaacaagtcccattgtcaccatatggagacatcatagagaaatgaagatgcttacctgcaggaactgaaaacatcagccatggccaggcccccagaagacaaaagaagggaccagggaactggtgacctaagcaacccactgcttaagaaacctgcgttccagccagagttggcctcagaatgacctgctctggctcagggatccctggtggatggggaaaagcactttcctggtgatggaaaaacgttctcagctttaagacacccccattaggcagacactgggttctgtgacagcagagcatgaccttaagggttacaggcaggctgcacacagcagtcccaggccctgtgaggggcttcagactccagctacagcgagcctgccccttttcttcaagggactgtcttgagggctccaaagtatagctaactagtcacctgggtgctgtgctgaaagtcccatgggagaactcaaagcgtgcattatcacagcctgaggggaatgtggaagggatgttttgtaagaactaccaacagttttgcacgaacaatgtcttttaaattaaaataaaaccttgaaaaaagtcagctttctttcctgagtcttccttacctacaaacactcaggagggggatggagctcaggcccttgtcttctgggtagttttgttactactgttgcttttaagaagcaaatgtcacaaggctttcttcaatgggatgttcaattgagtacttccagtcaacagtgcttcccaaagtgggtggtgtgaaggaagaggaggtacattaagagctattttatttgaggtagtcatttttataaccttgtttacttggatttataaaagcagactcacctaataaaatcaacattcattgtaaaaaaaaaaaaaaaaaaaaaaaaaaaaaaaaaaaaaaaaaaaaaaaaaaaaaaaaaaaaaaaaaaaaaaaaaaaaaaaaaaaaaaaaaaaa

SEQ ID NO: 1130 - protein, 475 aa, Homo sapiens
MSPEVTCPRRGHLPRFHPRTWVEPVMASSQVAASLYDAGLLLVVKASYGTGGSSNHSASPSPRGALEDQQQRAISNFYIIYNLVVGLSPLLSAYGLGWLSDRYHRKISICMSLLGFLLSRLGLLLKVLLDWPVEVLYGAAALNGLFGGFSAFWSGVMALGSLGSSEGRRSVRLILIDLMLGLAGFCGSMASGHLFKQMAGHSGQGLILTACSVSCASFALLYSLLVLKVPESVAKPSQELPAVDTVSGTVGTYRTLDPDQLDQQYAVGHPPSPGKAKPHKTTIALLFVGAIIYDLAVVGTVDVIPLFVLREPLGWNQVQVGYGMAAGYTIFITSFLGVLVFSRCFRDTTMIMIGMVSFGSGALLLAFVKETYMFYIARAVMLFALIPVTTIRSAMSKLIKGSSYGKVFVILQLSLALTGVVTSTLYNKIYQLTMDMFVGSCFALSSFLSFLAIIPISIVAYKQVPLSPYGDIIEK

SEQ ID NO: 1131 - DNA, 3158 bp, Homo sapiens
cctcgctcccggaccccacggctgcaaactgatctggcgcgcggggaggaggagagcgcaggcgagcgaacccgcgagagagggagagagcgagcgagcaacagcgagagcgagagcgagagagccgggaggcagagggagtagtgaccgccttccggagccgggattcatgcctgtcctcgggaccagcgaaggggactttacggctgagtatgagccaggctgctaggagccaggtacccccacgcctgcagtccccgcgccgtgcccggaatgcgagctggacgcagggctctcccaagttcccaccgagccgaataaaaagcgtccgcccgcagctctccgccaaagacggacattgactccaggactccacagaatggagcaagaatgagaggaaaaaggccggcagaaaagcatgaactggaggtttgttgagctcctctacttcctgtttatatggggccgtatctcagtgcagccctcccaccaggaaccagctgggacagaccaacatgtctccaaggaatttgattggctcatttcagacagggggcctttccaccactccaggagctacctatcctttgtggaaagacaccgtcaaggatttacaaccagatataaaatatacagggagtttgcccgttggaaggtgaggaacacagccatcgagaggagagatctggtccgccatccagtgcccctcatgccggagtttcaaaggagcatccgcctgcttggcaggagacctaccactcagcagttcatcgataccatcatcaaaaagtacggcacccacctgctcatctcagccacattgggaggggaggaggctttgaccatgtatatggacaaaagtcgcctcgacaggaagtcagggaatgccactcaaagtgttgaagctctgcaccagctcgcatcatcctactttgttgaccgtgatggtaccatgaggaggcttcatgagatccagatatcaactggagcaatcaaggtcacagagacacgcactgggcctctgggctgtaacagttatgacaatctggactctgtgagttccgtccttctgcaaagcacggagagcaaactgcaccttcaaggtcttcagataatctttcctcagtatctgcaagagaagtttgtccagtcggccttgagctatatcatgtgcaatggggagggggagtacctgtgccagaacagccagtgtcgctgccaatgtgccgaggagtttccgcagtgcaactgccccatcacggacatccagatcatggagtacacgctggccaacatggccaagtcttgggccgaagcttataaggacctggagaattcagatgagtttaaatcatttatgaagcgcctccccagcaaccacttcctgaccatcggaagcatccatcagcactggggcaatgactgggacctgcagaaccgctacaagctcctgcagagtgccacggaggcacagagacaaaagatccaacgcactgcccgcaagcttttcggcctcagtgtacgctgtcgccacaatcccaaccaccagctgcctagagagaggacaattcagcagtggcttgcaagggtccagtcactcctctactgtaatgagaatgggttttggggaaccttcctggagagccagcggagctgcgtgtgccacggcagcaccacgctgtgccagcgccccatcccctgcgtgataggcgggaacaacagctgcaccatgtgcagcctggccaacatctccctctgtggctcctgcaacaagggctacaagctgtatcgaggccgctgtgaaccacagaacgtggactcggagcggagcgagcagttcatcagctttgagactgacctggacttccaggacctggagctgaagtacctgctgcagaagatggactcacgcctctacgtccacaccaccttcatcagcaacgagatccgcctcgacaccttctttgaccctcggtggcgcaagcgcatgtccctcactctcaagagcaacaagaaccgcatggacttcatccacatggtgatcggcatgtccatgcgcatctgccagatgcgcaacagcagcctggaccccatgttctttgtctatgtcaacccctttagcgggagccattcggagggctggaacatgcccttcggggaatttggctacccacgctgggagaagatccgtctccaaaacagccagtgctacaactggactcttttgctgggcaatcggtggaaaacatttttcgagacggtccacatctacctacgtagtcggactcggctacctaccctactgcgaaatgagactggccagggccccgtggacctgtcggatccctccaagaggcagttctacatcaagatctcagacgtgcaggtgtttgggtatagcctgaggttcaacgccgacctcctgcgcagtgcagtgcagcaggtcaaccagtcctacacacagggcggccagttctattcctcttcgtcagtgatgctcctcttgttggatattcgggaccgaattaatcgcctggcccctcctgtggccccggggaaaccccagctggacttgttctcctgtatgctgaaacaccgcctgaaactgaccaacagcgagatcatcagggtgaaccacgccttggacctgtacaacacggagatcctcaaacagtcggaccagatgacagccaaactctgctaacccgggactccttgccatggacttttcctgttgttgtacacacacaacagaacaaaatgaagcaaaacaaaacaaaaaaacccacaaaaatttgtaaaatgtaattaatattcaaagaaaaggaggaaaatcttcatttgttggaaatgaaaacgttctagcaactgtataaaagcgttgggcatgtttgttatttctatactcactctgtcatgaagaagggtctcagccttttgtggagcattgagggagttgcttcttaggcctcaggtgctgtattgggggagaagggagaaagcatatgcaatgaattgtaaagatctctgctgtgcaggtgctaagattaaacactaaaaagaaagagagatatatgtaatgtacaactgacactgccatttttcctttttggaggaaatggacatagataaagaagatatttcttcggttaagattt

SEQ ID NO: 1132 - protein, 761 aa, Homo sapiens
MNWRFVELLYFLFIWGRISVQPSHQEPAGTDQHVSKEFDWLISDRGPFHHSRSYLSFVERHRQGFTTRYKIYREFARWKVRNTAIERRDLVRHPVPLMPEFQRSIRLLGRRPTTQQFIDTIIKKYGTHLLISATLGGEEALTMYMDKSRLDRKSGNATQSVEALHQLASSYFVDRDGTMRRLHEIQISTGAIKVTETRTGPLGCNSYDNLDSVSSVLLQSTESKLHLQGLQIIFPQYLQEKFVQSALSYIMCNGEGEYLCQNSQCRCQCAEEFPQCNCPITDIQIMEYTLANMAKSWAEAYKDLENSDEFKSFMKRLPSNHFLTIGSIHQHWGNDWDLQNRYKLLQSATEAQRQKIQRTARKLFGLSVRCRHNPNHQLPRERTIQQWLARVQSLLYCNENGFWGTFLESQRSCVCHGSTTLCQRPIPCVIGGNNSCTMCSLANISLCGSCNKGYKLYRGRCEPQNVDSERSEQFISFETDLDFQDLELKYLLQKMDSRLYVHTTFISNEIRLDTFFDPRWRKRMSLTLKSNKNRMDFIHMVIGMSMRICQMRNSSLDPMFFVYVNPFSGSHSEGWNMPFGEFGYPRWEKIRLQNSQCYNWTLLLGNRWKTFFETVHIYLRSRTRLPTLLRNETGQGPVDLSDPSKRQFYIKISDVQVFGYSLRFNADLLRSAVQQVNQSYTQGGQFYSSSSVMLLLLDIRDRINRLAPPVAPGKPQLDLFSCMLKHRLKLTNSEIIRVNHALDLYNTEILKQSDQMTAKLC

SEQ ID NO: 1133 - DNA, 4204 bp, Homo sapiens
ccggggctgagctgcggcggcgcctgacaatgccccctcgcgccccggcctcggcgcccgctcccggctccagcgcgcctgcacgtacgtagccttcacgtgtgtgtggatacggagtgcatgtgtggagacagaggaatatgctccaacaaatttcggatagaggcgccgaagacaggacgtggggaagctaaagaagtaaacaggtcatggcacgtttaacaaaaagacgacaggcggatacaaaagctatccagcatctttgggcagccattgagattatacggaaccagaagcagattgccaacattgaccgtattacaaagtatatgtctcgagtccacggtatgcaccctaaagagaccacccgtcagctgagcttagctgtgaaagatggtcttattgtcgaaactctaacagtgggctgcaaaggttcaaaagctggtattgaacaagaaggatattggttgccaggagatgagattgactgggaaacagaaaatcatgactggtattgttttgaatgccatttgcctggagaggtgttgatatgtgacctgtgttttcgtgtgtatcattccaagtgtttgtctgatgagttcaggcttagagacagcagtagtccctggcagtgcccagtttgcaggagcattaagaagaagaatacaaacaaacaggagatgggcacatacctcagattcattgtctcccgcatgaaggagagggctatagatcttaataaaaaggggaaggacaataaacacccgatgtacaggaggctggtgcactcagctgtggacgttcccaccattcaagagaaagtgaatgaagggaaataccgaagttatgaagagttcaaagctgatgcccaattgcttctccacaataccgtgattttctatggagcagacagtgagcaagctgacattgcgaggatgctatataaagacacatgtcatgagctggatgaactgcagctttgcaagaattgcttttacttgtcaaatgctcgtcctgacaactggttctgttatccttgtatacctaatcatgagctggtttgggctaaaatgaaaggttttgggttttggccagccaaagtcatgcagaaagaagacaatcaagtcgacgttcgcttctttggccaccaccaccagagggcctggattccttctgaaaacattcaagatatcacagtcaacattcatcggctgcacgtgaagcgcagtatgggttggaaaaaggcctgtgatgagctggagctgcatcagcgtttcctacgagaagggagattttggaaatctaagaatgaggaccgaggtgaggaagaggcagaatccagtatctcctccaccagtaatgagcagctaaaggtcactcaagaaccaagagcaaagaaaggacgacgtaatcaaagtgtggagcccaaaaaggaagaaccagagcctgaaacagaagcagtaagttctagccaggaaatacccacgatgcctcagcccatcgaaaaagtctccgtgtcaactcagacaaagaagttaagtgcctcttcaccaagaatgctgcatcggagcacccagaccacaaacgacggcgtgtgtcagagcatgtgccatgacaaatacaccaagatcttcaatgacttcaaagaccggatgaagtcggaccacaagcgggagacagagcgtgttgtccgagaagctctggagaagctgcgttctgaaatggaagaagaaaagagacaagctgtaaataaagctgtagccaacatgcagggtgagatggacagaaaatgtaagcaagtaaaggaaaagtgtaaggaagaatttgtagaagaaatcaagaagctggcaacacagcacaagcaactgatttctcagaccaagaagaagcagtggtgctacaactgtgaggaggaggccatgtaccactgctgctggaacacatcctactgctccatcaagtgccagcaggagcactggcacgcggagcacaagcgcacctgccgccggaaaagatgaagctggcccttcccggagtcaccccgatgattactcttttcagacacagcggtttttgtttccaagaagccaaaattgtttagaatttgcttcccattttgcaccagcctttaaacacttttcgtgaagaaattttgcacagtagtttaaatcttttgttaatgctcctccgaagtttttcagggggtaaaagtaacatcagtggagggtattattttaaataaattttaattgagaatttgttgcattttcagcaaattttaaaacatttttaggttttacagagattttaacctttaaacaacagatctttaaaaaacaggtgaatacaagtgagtttaacaaagaaacatttagaatagatctgaatgtaagaactacagaactgtttcagaaataaaacatactaccttgatgtgacatttttttcttaaccttgttgagctggttttgttcagcttaatttactgttcaaaggcattatctgttggtcacaccagtgggtatatgattgaatttagggaacagggttgacacagcagggctagtcctgcatattttttcttaaatatttcccaattgtgtttttcattatttcttttcaatatataacttttataacaaattattagctttgatcttgtagtttaaaattgcagggaactggggtaatcttttactgagctggatcttagagaaaatgaatatttaaattttaaagtttgcacatttcatctttgtcctaacatgagtgcttgtaacaaaataaacaacaaaaacaaagccaaaaactacctttatccatatgtgaaattatagatgaggcatacgaatttgtttaatgcttcccttcccttcccacatatcatctcactgcctattatctggtgtcacctcatgtatcgtaagttaatactaaaagaagagaaagcacttaagtttcacagaagccgttatgtttgtagtaatgggtcattgcctactaatgaactccatcactgtacacagaatgaagaataatgcatgttaattttcttgtattaaagatgccgtgatttgtaaaaagtctgtattttgcggaatgtctggattaagaagcattaccaataggaatggatcgatagttgaataatgattttttatacatagatatataaaatacagccaggaaaacttaaattacttttcttttaaaatatctcacaatttatgtggtatttttaaagactgatcttagaccaagtcaaattcccatttatcatttagttattttttgaggttagagaataatttgtacatatttatttagacctttgatatttattaaagcaattactcacaatggaagtgaaagaatcaggagaaaagccttttaaaaagtattctccaggtttgtcagggtcactctaaagataaaaatgtaactaagtcttctgtgaaatatcatccatctaatcttgatgctgttgcagatggtggtgacacaagttaattgacaaactactgccaaatggtgcacaatattttgtaaaaagtacccagtagccccatttcatacaatgtacctaaattatgcagtaacttggcatcatcgttccctccttgttgctgtgtaattagtcagtgttgccacagtgtgtggcgctgatggagatgtcagaaccgagaacacttaaccttctttgattgtttttcaagttttaagacttcgatccacccctatgagagcaagtaattgtggaaatatttttggtgtaaaatcattccagagtatgtaatatttaactgatagctgcatgaaagtgagattcgtgttactttggcttttctgtctctgttgacacggttgcacatttccaagttactacagcgtgaaaactgtgtgtttaaaaaaaaacaaaattaaaaaaagagattgtggcctggttttgtaaaagttttaggtaaaattacaattgattgttttaggaatcattattaaaaattttctgcaaatcataaagctatatcgaggtgttgagcttagccactatgcacattgtaattattcattgtggctgtccagttctatgatgcattctggcattttgtaagctgctctgactagcaatatatagattcatttaatgtgttaacattggttaataaatgtatttaaaaaaaactaaaaaaaaaaaaaaaaaaaa

SEQ ID NO: 1134 - protein, 562 aa, Homo sapiens
MSRVHGMHPKETTRQLSLAVKDGLIVETLTVGCKGSKAGIEQEGYWLPGDEIDWETENHDWYCFECHLPGEVLICDLCFRVYHSKCLSDEFRLRDSSSPWQCPVCRSIKKKNTNKQEMGTYLRFIVSRMKERAIDLNKKGKDNKHPMYRRLVHSAVDVPTIQEKVNEGKYRSYEEFKADAQLLLHNTVIFYGADSEQADIARMLYKDTCHELDELQLCKNCFYLSNARPDNWFCYPCIPNHELVWAKMKGFGFWPAKVMQKEDNQVDVRFFGHHHQRAWIPSENIQDITVNIHRLHVKRSMGWKKACDELELHQRFLREGRFWKSKNEDRGEEEAESSISSTSNEQLKVTQEPRAKKGRRNQSVEPKKEEPEPETEAVSSSQEIPTMPQPIEKVSVSTQTKKLSASSPRMLHRSTQTTNDGVCQSMCHDKYTKIFNDFKDRMKSDHKRETERVVREALEKLRSEMEEEKRQAVNKAVANMQGEMDRKCKQVKEKCKEEFVEEIKKLATQHKQLISQTKKKQWCYNCEEEAMYHCCWNTSYCSIKCQQEHWHAEHKRTCRRKR

SEQ ID NO: 1135 - DNA, 2129 bp, Homo sapiens
ccggggctgagctgcggcggcgcctgacaatgccccctcgcgccccggcctcggcgcccgctcccggctccagcgcgcctgcacgtacgtagccttcacgtgtgtgtggatacggagtgcatgtgtggagacagaggaatatgctccaacaaatttcggatagaggcgccgaagacaggacgtggggaagctaaagaagtaaacaggtcatggcacgtttaacaaaaagacgacaggcggatacaaaagctatccagcatctttgggcagccattgagattatacggaaccagaagcagattgccaacattgaccgtattacaaagtatatgtctcgagtccacggtatgcaccctaaagagaccacccgtcagctgagcttagctgtgaaagatggtcttattgtcgaaactctaacagtgggctgcaaaggttcaaaagctggtattgaacaagaaggatattggttgccaggagatgagattgactgggaaacagaaaatcatgactggtattgttttgaatgccatttgcctggagaggtgttgatatgtgacctgtgttttcgtgtgtatcattccaagtgtttgtctgatgagttcaggcttagagacagcagtagtccctggcagtgcccagtttgcaggagcattaagaagaagaatacaaacaaacaggagatgggcacatacctcagattcattgtctcccgcatgaaggagagggctatagatcttaataaaaaggggaaggacaataaacacccgatgtacaggaggctggtgcactcagctgtggacgttcccaccattcaagagaaagtgaatgaagggaaataccgaagttatgaagagttcaaagctgatgcccaattgcttctccacaataccgtgattttctatggagcagacagtgagcaagctgacattgcgaggatgctatataaagacacatgtcatgagctggatgaactgcagctttgcaagaattgcttttacttgtcaaatgctcgtcctgacaactggttctgttatccttgtatacctaatcatgagctggtttgggctaaaatgaaaggttttgggttttggccagccaaagtcatgcagaaagaagacaatcaagtcgacgttcgcttctttggccaccaccaccagagggcctggattccttctgaaaacattcaagatatcacagtcaacattcatcggctgcacgtgaagcgcagtatgggttggaaaaaggcctgtgatgagctggagctgcatcagcgtttcctacgagaagggagattttggaaatctaagaatgaggaccgaggtgaggaagaggcagaatccagtatctcctccaccagtaatgagcagctaaaggtcactcaagaaccaagagcaaagaaaggacgacgtaatcaaagtgtggagcccaaaaaggaagaaccagagcctgaaacagaagcagtaagttctagccaggaaatacccacgatgcctcagcccatcgaaaaagtctccgtgtcaactcagacaaagaagttaagtgcctcttcaccaagaatgctgcatcggagcacccagaccacaaacgacggcgtgtgtcagagcatgtgccatgacaaatacaccaagatcttcaatgacttcaaagaccggatgaagtcggaccacaagcgggagacagagcgtgttgtccgagaagctctggagaagctgcgttctgaaatggaagaagaaaagagacaagctgtaaataaagctgtagccaacatgcagggtgagatggacagaaaatgtaagcaagtaaaggaaaagtgtaaggaagaatttgtagaagaaatcaagaagctggcaacacagcacaagcaactgatttctcagaccaagaagaagcagtgggtaaataccagtcttttttagacccttatttctgaaaatgtaccacaggtatgatgcccgttaattcagaaggtagctgtggcacatgcagaagatgtttctgaaataagatcaaatgtgaaatggtcagctttagttttaaaaattttattaaaagtcctatgatctctcaaaaaaaaaaaaaaaaaaaaaaaaaaaaaaaaaaaaaaaaaaaaaaaaaaaaaaaaaaaaaaa

SEQ ID NO: 1136 - protein, 528 aa, Homo sapiens
MSRVHGMHPKETTRQLSLAVKDGLIVETLTVGCKGSKAGIEQEGYWLPGDEIDWETENHDWYCFECHLPGEVLICDLCFRVYHSKCLSDEFRLRDSSSPWQCPVCRSIKKKNTNKQEMGTYLRFIVSRMKERAIDLNKKGKDNKHPMYRRLVHSAVDVPTIQEKVNEGKYRSYEEFKADAQLLLHNTVIFYGADSEQADIARMLYKDTCHELDELQLCKNCFYLSNARPDNWFCYPCIPNHELVWAKMKGFGFWPAKVMQKEDNQVDVRFFGHHHQRAWIPSENIQDITVNIHRLHVKRSMGWKKACDELELHQRFLREGRFWKSKNEDRGEEEAESSISSTSNEQLKVTQEPRAKKGRRNQSVEPKKEEPEPETEAVSSSQEIPTMPQPIEKVSVSTQTKKLSASSPRMLHRSTQTTNDGVCQSMCHDKYTKIFNDFKDRMKSDHKRETERVVREALEKLRSEMEEEKRQAVNKAVANMQGEMDRKCKQVKEKCKEEFVEEIKKLATQHKQLISQTKKKQWVNTSLF

SEQ ID NO: 1137 - DNA, 6594 bp, Homo sapiens
cggtgcggttccgccgggcgcgaggagccgccgagacctccgcctgcgaacaaagaggaggccgtgcggggcgcggcgcccgcggagcatggcggaccgcagcctggagggcatggcgctgcccctggaggtgcgggcgcgcctggccgagctggagctggagctgtcggaaggtgacatcacacaaaaaggatatgaaaagaagaggtcaaagttaattggagcctaccttccgcagcctccgagggtggaccaagctttgccgcaagaacgccgggctcctgtcactccttcctccgcctctcgctaccaccgccgacggtcttcagggtcacgagatgagcgctatcggtcagacgtccacacggaagctgtccaggcggctctggccaaacacaaagagcggaagatggcagtgcctatgccttccaaacgcaggtccctggtcgtgcagacctcgatggacgcctacacccctccagatacctcttctggctcagaagatgaaggctcagtgcagggggactcccagggcacccccacctccagccagggcagcatcaatatggagcactggatcagccaggccatccacggctccaccacgtccaccacctcctcgtcctctacgcagagcgggggcagcggggctgcccacaggctggcggacgtcatggctcagacccacatagaaaatcattctgcacctcctgacgtaaccacgtacacctcagagcactcgatacaggtggagagaccgcagggttccacggggtcccggacagcgcccaagtacggcaacgccgagctcatggagaccggggatggagtaccagtaagtagccgggtgtcagcaaaaatccagcagcttgtcaataccctcaaacgaccgaaacgaccacctttacgagaattctttgtcgatgactttgaagaattattagaagttcaacaaccggatccgaaccaaccaaagccggagggggcccagatgctggccatgcgcggagagcagctgggcgtggtcacgaactggccgccgtcgctggaggccgcactgcagaggtggggcaccatctcgcccaaggcgccctgcctgaccaccatggacaccaacgggaagcccctctacatcctcacttacggcaagctgtggacaagaagtatgaaggtcgcttacagcattctacacaaattaggcacaaagcaggaacccatggtccggcctggagatagggtggcactggtgttccccaacaatgatccggctgccttcatggcggctttctacggctgcctgctggccgaggtggtccccgtgcccatcgaggtgccactcaccaggaaggacgcagggagccagcagataggtttcttgcttggaagctgtggagttactgtagccttgactagtgacgcctgccataaaggacttccaaaaagcccaacgggagagatcccacagtttaaaggttggccaaagctgctgtggtttgtcacagagtctaaacatctctccaaaccgccccgagactggttcccacacattaaagatgccaataacgacactgcgtatattgagtacaagacgtgtaaggatggcagtgtgctgggtgtgacggtgacgaggactgcgctgctgacacactgccaggccctgacgcaggcgtgtggctacacggaagctgaaaccattgtgaatgtgctggatttcaagaaggacgtcgggctctggcatggcatcctgacaagcgtcatgaacatgatgcatgtgatcagcatcccgtactcgctgatgaaggtgaaccctctctcctggatccagaaggtctgccagtacaaagcaaaagtggcgtgtgtgaaatcgagggatatgcattgggcattagtagcacacagagatcagagagacatcaacctctcctctctgcgaatgctgatagtggcggacggcgcgaacccctggtctatttcttcttgcgatgcatttctcaatgtcttccaaagtaaaggccttcgacaggaggtcatctgtccttgtgccagctcgccagaggccctcactgtggccatccggaggcccacggatgacagtaaccagcccccgggccggggtgtcctctccatgcatggactgacctatggggtcattcgtgtggactcggaagagaagctgtccgtgctcaccgtgcaggatgtcggcctcgtgatgcctggagccatcatgtgttcagtgaagccagacggggttcctcagctgtgcagaacggatgagatcggggagctgtgtgtgtgtgcagttgcgacgggcacgtcctactatggcctctctggcatgaccaagaacacctttgaggtgtttcccatgacaagctccggggctccgatcagtgaatacccattcataaggacaggcttgctggggttcgtgggtcccggaggcctcgtcttcgtggtgggcaagatggatggcctcatggtggtcagcgggcgcaggcacaacgccgacgacatcgtggccactgcgctggccgtagaacccatgaagtttgtctaccggggaaggatagccgtgttctcggtgaccgtgctgcacgacgagaggatcgtgatcgtggctgagcagaggcctgactccacggaagaggacagtttccagtggatgagccgtgtgctgcaggcgattgacagtatacatcaagttggagtttattgcctggccttggtgccagcaaacaccctccccaaaaccccgcttggtgggatccatttatcagaaacaaaacagctttttctggagggctctctgcacccctgcaatgtcctaatgtgcccccacacctgcgtcacaaacttgcctaagcctcgacagaagcagccagaaatcggccctgcctctgtgatggtggggaacctggtctctgggaagagaatcgcccaggccagtggcagagacctgggtcagatcgaagataacgaccaggcacgcaagttcctgttcctctcagaggtcttgcagtggagagcacagaccaccccggaccacatcctctacacgctgctcaactgtcggggtgcgatagcgaactcgctgacctgcgtgcagctgcacaagagagctgagaagatcgccgtgatgctgatggagaggggccaccttcaggacggcgaccacgtggccttggtctaccccccaggaatagacctgatagcagcgttttatggttgcctgtacgcaggctgtgtgccaataaccgtccgtcccccgcacccacagaacatcgcgacgacgttgcctaccgtcaagatgattgtggaggtgagtcgctctgcctgtctgatgacgacacagctgatctgtaagttgctgcggtccagggaggcggcggcggctgtggacgtcaggacgtggcccctcatcctggatacagatgatttgccaaagaagcggcctgcccagatctgcaaaccttgcaacccagacactcttgcatatctcgacttcagcgtgtccacaactgggatgctagctggcgtaaagatgtctcacgcagccaccagtgccttctgccgttccattaagctgcagtgtgaactttacccctctagagaagtggccatctgcctggacccttactgtggactgggatttgtcctctggtgcctctgcagtgtgtattctgggcaccagtccatcctgatcccgccctctgagctggaaaccaaccccgccttgtggcttcttgccgtgagtcagtacaaagtccgagacacgttttgctcctactccgtgatggagctgtgcaccaaggggctgggctcgcaaacagagtccctcaaggcgcgagggctggacttgtcccgagtgaggacctgcgtggttgtggcggaagagaggcctcggatcgcactcacacagtcgttctcaaagctgtttaaggacctgggccttcacccgcgggccgtcagcacctcgttcggttgcagggtgaacctggcgatttgcttgcagggaacctcaggacctgacccaaccactgtctacgtggacatgagagccctgagacacgacagagtccgcttagtggaaagaggatcccctcatagtctgcccctgatggaatcgggaaagatacttccaggggttcggattataattgccaacccagaaacaaaaggaccgctgggggactcacaccttggagagatttgggttcacagtgcccacaatgccagcggttatttcactatttacggagacgaatccctccagtcagatcacttcaactcaagactaagttttggagacacccagaccatctgggcacgcacaggctacttggggttcctgcggagaactgagctcacagatgcaaatggagagcgccatgatgccctctacgtggtaggggcactggacgaagccatggagctgcggggcatgcggtaccacccaatcgacattgagacctcggtcatcagagcccataaaagcgttacggaatgtgctgtgtttacctggacaaatttgttggtggttgtggttgagctggatgggtcggaacaagaagccttggacctggttcccttggtgaccaacgtggtcctggaggagcactacctgatcgtcggagtggtggtcgtggtggacatcggcgtcatccccatcaactcccgtggggagaagcagcgcatgcacctgcgagacgggtttttggcagaccagctagaccccatctatgtggcctacaacatgtagtctcgtctcttggcttccatggacttttctagagatgtagacattgttctccgtgtccactgaagcgtgcagacacagggcaacactcaccagaatacagccatttgtggtgagagtggaggaggaagaggaggaggaagaggacttctcacagcagccacgattggcatgggggtgaaatgtgaatttaccactgaatttcgctcagaaggactttggattactgccttcagtttgttggaaaagcccatttcaaaaactttcttttcttttctttcttttttaattattggataataagtgctttcttcgtaaatgtggtattttgttaagccgaaatagcaattaaaaaaatatcctgccctccagatgggttcttttaaacaatttatgtagtgtgacaaagaattgttttctctgttttaatgtgtcatgaaatcttaatgacatggatctgttactaatttaagccattgctagatctcatccttttaggaaagtttgaggtacgagaaaaccttccaaatagcaccttccaattagataatagcagctttctttgtcagaaatgtgctgaagaaacaaaggctggtatacggccttcgaagttagtatagaatgagaagaaattataaataaggtgtatttcggcaattatcttgcaaatatctttgtactaaactaaaaagataaaataagttaacttcctcaatatgtaattatgtacaaaacgtttaatttattttgatctctttagaactataaaagagaaaaacattcaagaatattaaagtcttgtaatgtttgctaatataaaaaaagtgttgtattatcttgcgtggatagtatcacaacaaatatatatatatgaaatataaattcactaatgaacaaaggagattttaaagtttaagatgcagaacttgtcacttgcatggtgtgccccccgtactcacatacactctgctgttgccagcagtcgcagaccgcaggagccctgtctaaaagtttcttctagaaccagagaccagcaagtgaaattattgccatctcaaggatggcaaaagaattcaaagctcaatgtgcactatttttttctttgctgtgggacaacagtgaatgtgtttatgccagcgtgtgctgatgatactgaggggctttaggttggcaaatagcactgttttcttagctgcaagaattcattgcacaatgtttttcatcatttttgttaatgtcatctttttttggtccttgctacgaaaaggaatgcgattctgtggtcattcgcactgggttgcattgattccccctctgatggccaatgtggagtggacaaagtgtccggaactcacatcggtgatcgtcccctcgtcttaagacccagcccgctctgtgtgagcctctggggctccctcgctcagtgagcacagttccccgggggttcatgccagagctccggctgaagcaagaagtcctccagctgcgtcgtttgccgcctgtggacgagtgcgccccagtttctgccctggcagctcctggccacaccttctcagagctcacctgtgcacttctaaattgaattggcccacggtgtccaaccaagaaggagcatctgcactccgagaaagatgtgttctgtaactgccccagtgtgaccccgcagtggctctcggtgctagatatgcatgactaagattgatgctgggcaaaatgtagatgatctttcattatgttgtgggcagcgtctttctctgcctttgctatatgcagtcagcagtaagccttttgctaaaagagttttgtttgacttctgagatccaaggctgattgttgtt

SEQ ID NO: 1138 - protein, 1556 aa, Homo sapiens
MADRSLEGMALPLEVRARLAELELELSEGDITQKGYEKKRSKLIGAYLPQPPRVDQALPQERRAPVTPSSASRYHRRRSSGSRDERYRSDVHTEAVQAALAKHKERKMAVPMPSKRRSLVVQTSMDAYTPPDTSSGSEDEGSVQGDSQGTPTSSQGSINMEHWISQAIHGSTTSTTSSSSTQSGGSGAAHRLADVMAQTHIENHSAPPDVTTYTSEHSIQVERPQGSTGSRTAPKYGNAELMETGDGVPVSSRVSAKIQQLVNTLKRPKRPPLREFFVDDFEELLEVQQPDPNQPKPEGAQMLAMRGEQLGVVTNWPPSLEAALQRWGTISPKAPCLTTMDTNGKPLYILTYGKLWTRSMKVAYSILHKLGTKQEPMVRPGDRVALVFPNNDPAAFMAAFYGCLLAEVVPVPIEVPLTRKDAGSQQIGFLLGSCGVTVALTSDACHKGLPKSPTGEIPQFKGWPKLLWFVTESKHLSKPPRDWFPHIKDANNDTAYIEYKTCKDGSVLGVTVTRTALLTHCQALTQACGYTEAETIVNVLDFKKDVGLWHGILTSVMNMMHVISIPYSLMKVNPLSWIQKVCQYKAKVACVKSRDMHWALVAHRDQRDINLSSLRMLIVADGANPWSISSCDAFLNVFQSKGLRQEVICPCASSPEALTVAIRRPTDDSNQPPGRGVLSMHGLTYGVIRVDSEEKLSVLTVQDVGLVMPGAIMCSVKPDGVPQLCRTDEIGELCVCAVATGTSYYGLSGMTKNTFEVFPMTSSGAPISEYPFIRTGLLGFVGPGGLVFVVGKMDGLMVVSGRRHNADDIVATALAVEPMKFVYRGRIAVFSVTVLHDERIVIVAEQRPDSTEEDSFQWMSRVLQAIDSIHQVGVYCLALVPANTLPKTPLGGIHLSETKQLFLEGSLHPCNVLMCPHTCVTNLPKPRQKQPEIGPASVMVGNLVSGKRIAQASGRDLGQIEDNDQARKFLFLSEVLQWRAQTTPDHILYTLLNCRGAIANSLTCVQLHKRAEKIAVMLMERGHLQDGDHVALVYPPGIDLIAAFYGCLYAGCVPITVRPPHPQNIATTLPTVKMIVEVSRSACLMTTQLICKLLRSREAAAAVDVRTWPLILDTDDLPKKRPAQICKPCNPDTLAYLDFSVSTTGMLAGVKMSHAATSAFCRSIKLQCELYPSREVAICLDPYCGLGFVLWCLCSVYSGHQSILIPPSELETNPALWLLAVSQYKVRDTFCSYSVMELCTKGLGSQTESLKARGLDLSRVRTCVVVAEERPRIALTQSFSKLFKDLGLHPRAVSTSFGCRVNLAICLQGTSGPDPTTVYVDMRALRHDRVRLVERGSPHSLPLMESGKILPGVRIIIANPETKGPLGDSHLGEIWVHSAHNASGYFTIYGDESLQSDHFNSRLSFGDTQTIWARTGYLGFLRRTELTDANGERHDALYVVGALDEAMELRGMRYHPIDIETSVIRAHKSVTECAVFTWTNLLVVVVELDGSEQEALDLVPLVTNVVLEEHYLIVGVVVVVDIGVIPINSRGEKQRMHLRDGFLADQLDPIYVAYNM

SEQ ID NO: 1139 - DNA, 3655 bp, Homo sapiens
ccggcttttgcgctgggagcccagagcaggaggcagagcccgcgggaagctcggagcactcaggacgccgcgcgcccttccccgccctccctgaccagggagcagctcgctccaggcgcccagccgaggcccccagcccagtgggagcaagtcatagagaacaattcgagagacagagagacggagcgcgctttcctgctcagtcctgaaaagtgagccgctcccgggtttgcaacctcaagcttcgcagcagcggcggcggcggctgccgggaaggaggcaggtgcaggtgcaggagggaggcggctctgggctccgcgcctgggtcttggccatggcctcggtcctggggagcggcagagggtctggagggctgagcagtcaactcaaatgcaagtccaagaggaggaggaggcggaggtccaagcggaaagataaagtaagcatattgtcaaccttcctcgctcctttcaagcacctgagtcctggcatcacaaacacggaggatgacgacaccctcagtaccagcagcgcggaggtgaaggagaaccgcaacgtgggcaacctggccgcgcggccaccgccctccggggaccgggcccggggcggcgcgcccggcgcgaagaggaagcggccgctggaggaggggaatgggggccacttgtgcaaactgcagctggtctggaagaagctgtcgtggtcggtggcgcccaagaacgcgctggtgcagctgcacgagctgaggccgggcctgcagtaccggacagtgtcgcagacgggcccggtgcatgccccggtcttcgcggtagcggtggaggtgaacgggctcacgttcgagggcacaggccccaccaagaagaaggccaagatgcgcgcggcggagctggcactcaggtccttcgtgcagttccccaacgcctgccaggcgcacctggccatgggcgggggcccgggccccggcacggacttcacctccgaccaggccgatttccccgacacgctcttccaggagttcgagcccccggcgccgcgccccggactcgcgggaggccgccccggggacgccgcgcttctgtccgcggcctacgggcgacggcggctgctgtgccgcgcgctggacctggtgggcccgacccccgccacccccgcggccccgggcgagcgcaaccccgtggtgctgctgaaccgcctgcgcgccgggctgcgctacgtgtgtctggcagaaccggccgagcggcgcgcgcggagcttcgtgatggccgtgagcgtggacggcaggacgttcgagggctcggggcgcagcaagaagctggcccggggtcaggccgcgcaggccgcactgcaggagctgttcgacatccagatgcccggccacgcgcccggcagggccaggaggacgccaatgccgcaggaattcgcagactccatatcccagctggtcacacagaagttccgcgaggtgacgacggacctcacgcccatgcacgcccgccataaagcgctggcaggaatcgtcatgaccaaaggcctggatgctcggcaggcgcaggtcgtggccctgtcctcggggaccaagtgcatcagcggcgagcacctcagtgaccaggggctggtggtgaatgactgccacgcggaggtcgtggcccggcgggcgttcctgcacttcctctacacgcagctggagctgcacctgagcaagcggcgcgaggactcagagcgatcgatattcgtgcggttaaaagaaggtggctaccggctgcgagagaacatcctcttccatctctacgtgagcacctccccctgtggagacgcaagactccactctccctacgagatcaccacagacctgcacagcagcaaacacctcgtcaggaagttccgcgggcacctgcgcaccaagatcgagtccggggaagggacggtccccgtgcgtggccccagcgcagtgcagacctgggacggcgtcctgctgggggagcagctgatcaccatgtcctgcacggacaagatcgccaggtggaacgtcctggggctgcagggcgcgctcctgtcccacttcgtggagcccgtgtacctgcagagcatcgtggtgggcagcctgcaccacacgggccacctcgcacgcgtcatgagccaccgcatggagggtgtcggccagctgcccgcctcctaccggcacaaccggcctctcctcagcggcgtgagtgacgccgaggcgcgccagccggggaagtcgccccccttcagcatgaactgggtcgtgggcagcgcggacctggagattatcaacgccaccactgggcggaggagctgtgggggcccatcccggctctgcaagcacgtgctgtctgcacggtgggcgcggctgtatggcaggctgagcacacggacacccagccctggagacacgccctccatgtactgtgaggccaagctgggggcgcacacctaccagtctgtgaaacagcagctgttcaaggcctttcagaaggctggcctgggcacctgggtgaggaaaccaccggagcagcagcagtttctactgactctctaggctgcgggctcctggctgctggagctgagcgggacgctggagggatgggaccgtgtctggggggcgacgtggcgggtcggccggttccctgcattcgttttactttggtgtcccagaaacacgcgagtgtgcaatgtttggacgagcaacaacacaaattcagaacgtgcctctttccagatcgctggccccagaaccctgtcccccacacccaggggcacacgcaccgttgagttagcgccgactcttcctgtggagtctgagggaggggctccattcaggcaaaggggttttagctgcagccttggaaggaggcaccgacacgacaccaggcaggagtgagcctcaggccccgtccctgcaccccacccctgcgtgcgcctcttggtgatgctggggtctcactagcttgagggggcacatgaagataagccacaaatgaagagaaaagccatgcccaccccagccccagagaaaccaataagaatcctctattattttcactattcgtttaggtttttatactccacctcctttcaaaaaagatttaagatgtacgacattaccgaacacctaaaatagaaccagagaaacgaaagccattcccacaaagtgaaggaacagtttccaaaacccctgcgaggcagagttaagacctgtgacgtggggagcctggaaacacctggcccacgcgtgctgcagatgtggggagcctggaaacacccggcccacgcgtgctgcagatgtggggagcctggaaacacccggcccacgcgtgctgcagatgtggggagcctggaaacacccggcccacgcgtgctgtagatgtggggagcctggaaaaacctggcccacgcgtgctgcagatgtggggagcccggaaacacctggcccatgcctgttcagtccgtcatggcgtttggtttatggtggccgatactaagagccactgaggtctgggttgtgtgagggttagctaccaccctataacctccctaccaggtaataaggagaccaagtctttgatcaaattctgattttttaactaaattttcattagaaagcaagcacaaaataaaatcaaaacaacctttaccttca

SEQ ID NO: 1140 - protein, 739 aa, Homo sapiens
MASVLGSGRGSGGLSSQLKCKSKRRRRRRSKRKDKVSILSTFLAPFKHLSPGITNTEDDDTLSTSSAEVKENRNVGNLAARPPPSGDRARGGAPGAKRKRPLEEGNGGHLCKLQLVWKKLSWSVAPKNALVQLHELRPGLQYRTVSQTGPVHAPVFAVAVEVNGLTFEGTGPTKKKAKMRAAELALRSFVQFPNACQAHLAMGGGPGPGTDFTSDQADFPDTLFQEFEPPAPRPGLAGGRPGDAALLSAAYGRRRLLCRALDLVGPTPATPAAPGERNPVVLLNRLRAGLRYVCLAEPAERRARSFVMAVSVDGRTFEGSGRSKKLARGQAAQAALQELFDIQMPGHAPGRARRTPMPQEFADSISQLVTQKFREVTTDLTPMHARHKALAGIVMTKGLDARQAQVVALSSGTKCISGEHLSDQGLVVNDCHAEVVARRAFLHFLYTQLELHLSKRREDSERSIFVRLKEGGYRLRENILFHLYVSTSPCGDARLHSPYEITTDLHSSKHLVRKFRGHLRTKIESGEGTVPVRGPSAVQTWDGVLLGEQLITMSCTDKIARWNVLGLQGALLSHFVEPVYLQSIVVGSLHHTGHLARVMSHRMEGVGQLPASYRHNRPLLSGVSDAEARQPGKSPPFSMNWVVGSADLEIINATTGRRSCGGPSRLCKHVLSARWARLYGRLSTRTPSPGDTPSMYCEAKLGAHTYQSVKQQLFKAFQKAGLGTWVRKPPEQQQFLLTL

SEQ ID NO: 1141 - DNA, 3721 bp, Homo sapiens
cagcagcgtgctaagaagcagtcacataaacagcagcaggagtaggcctcctgcttttcaaaagcagagtactgcagggtcgcgaaatgcaagacactcagatgtttgaaaatctcccgagttgagaatggctactgtaaaagcgtcaccaagaaactctgacgatctggacagtcctaactctgtgttagcaatacttacttccggaaaattaatgctacttcttgtagatttttgcaaataggaaacccccttgaagaagatctcaaattacgccccccacccccaaaaaaagacaaacaggggagaacaaagttttggcatgcctgcaggaacggtggcttttttagaaactacctaggaggcagaagctaagtgatttgctcatgcctcttacctgggagtagaaggtgggaagaaatggaccgaggctgtgacgagaagacaaggcacagtgcagcttggtgaagccacacgctgactgcgttctgccccctcttcatgcagtgctgcgggctggtgcatcgccggcgagtacgggtgtcctatggttcggcagactcctacactagccgtccatccgattccgatgtatctctggaggaggaccgggaggcagtgcgcagagaagcggagcggcaggcccaggcacagttggaaaaagcaaagacaaagcccgttgcatttgcggttcggacaaatgtcagctacagtgcggcccatgaagatgatgttccagtgcctggcatggccatctcattcgaagcaaaagattttctgcatgttaaggaaaaatttaacaatgactggtggatagggcgattggtaaaagaaggctgtgaaatcggattcattccaagcccagtcaaactagaaaacatgaggctgcagcatgaacagagagccaagcaagggaaattctactccagtaaatcaggaggaaattcatcatccagtttgggtgacatagtacctagttccagaaaatcaacacctccatcatctgctatagacatagatgctactggcttagatgcagaagaaaatgatattccagcaaaccaccgctcccctaaacccagtgcaaacagtgtaacgtcaccccactccaaagagaaaagaatgcccttctttaagaagacagagcacactcctccgtatgatgtggtaccttccatgcgaccagtggtcctagtgggcccttctctgaagggctacgaggtcacagatatgatgcaaaaagcgctgtttgattttttaaaacacagatttgaagggcggatatccatcacaagggtcaccgctgacatctcgcttgccaaacgctcggtattaaacaatcccagtaagcacgcaataatagaaagatccaacacaaggtcaagcttagcggaagttcagagtgaaatcgaaaggatttttgaacttgcaagaacattgcagttggtggtccttgacgcggatacaattaatcatccagctcaactcagtaaaacctccttggcccctattatagtatatgtaaagatttcttctcctaaggttttacaaaggttaataaaatctcgagggaaatctcaagctaaacacctcaacgtccagatggtagcagctgataaactggctcagtgtcctccagagctgttcgatgtgatcttggatgagaaccagcttgaggatgcctgtgagcaccttgccgactatctggaggcctactggaaggccacccatcctcccagcagtagcctccccaaccctctccttagccgtacattagccacttcaagtctgcctcttagccccaccctagcctctaattcacagggttctcaaggtgatcagaggactgatcgctccgctcctatccgttctgcttcccaagctgaagaagaacctagtgtggaaccagtcaagaaatcccagcaccgctcttcctcctcagccccacaccacaaccatcgcagtgggacaagtcgcggcctctccaggcaagagacatttgactcggaaacccaggagagtcgagactctgcctacgtagagccaaaggaagattattcccatgaccacgtggaccactatgcctcacaccgtgaccacaaccacagagacgagacccacgggagcagtgaccacagacacagggagtcccggcaccgttcccgggacgtggatcgagagcaggaccacaacgagtgcaacaagcagcgcagccgtcataaatccaaggatcgctactgtgaaaaggatggagaagtgatatcaaaaaaacggaatgaggctggggagtggaacagggatgtttacatcccccaatgagttttgcccttttgtgtttttttttttttttttttgaagtcttgtataactaacagcatccccaaaacaaagtctttggggtctacactgcaatcatatgtgatctgtcttgtaatattttgtattattgctgttgcttgaatagcaatagcatggatagagtattgagatactttttcttttgtaagtgctacataaattggcctggtatggctgcagtcctccggttgcatactggactcttcaaaaactgttttgggtagctgccacttgaacaaaatctgttgccacccaggtgatgttagtgttttaagaaatgtagttgatgtatccaacaagccagaatcagcacagataaaaagtggaatttcttgtttctccagatttttaatacgttaatacgcaggcatctgatttgcatattcattcatggaccactgtttcttgcttgtacctctggctgactaaatttggggacagattcagtcttgccttacacaaaggggatcataaagttagaatctattttctatgtactagtactgtgtactgtatagacagtttgtaaatgttatttctgcaaacaaacacctccttattatatataatatatatatatatatcagtttgatcacactattttagagtcttaatgccaagtcagcagatttgctttatgaattacagggactagaaatgcccacattcaggaaatttgtaataacattgtctagacacctatcctcattctagtagaaagtgtgtacatactgtaaatatgtgtgattgcttgacttgaaaaggtttgaattctgaatgttataccatccttgtaagtaagtttgtaatttccaccataaattatggtaaatataaaactccagaggttgttctactccatacagttcacactgattgtgacacattcttagtagctagtgtctgttctagtcactgcactggagtctacgagccggaactcgctatatgcacgtgtgtgtgtccgtatgtaagaaagtgtgcaccgagtgactgaatggttgagatgaattggaatgctgaagactaacgaagaaactagagactgatatcgagcattctgcccacctcgctctgtatttaattaattgtgctatatgttgctttaacaacccattgagcagtcagggaatgtgagtaagcttgctgccaaaggtaactaggaaagcattcatctgctgcctccttgtttttgctcctagagagtgaaaatacaggcaattttactgtgagtgtttcactggaaatgtacaatctttgtgtgttagagtatttgttttagtaagaaatgtttacacagcttgtggaattatttcgtgggaaaataaatttttataacttctcccaaaaaaaaaaaaaaaaa

SEQ ID NO: 1142 - protein, 605 aa, Homo sapiens
MQCCGLVHRRRVRVSYGSADSYTSRPSDSDVSLEEDREAVRREAERQAQAQLEKAKTKPVAFAVRTNVSYSAAHEDDVPVPGMAISFEAKDFLHVKEKFNNDWWIGRLVKEGCEIGFIPSPVKLENMRLQHEQRAKQGKFYSSKSGGNSSSSLGDIVPSSRKSTPPSSAIDIDATGLDAEENDIPANHRSPKPSANSVTSPHSKEKRMPFFKKTEHTPPYDVVPSMRPVVLVGPSLKGYEVTDMMQKALFDFLKHRFEGRISITRVTADISLAKRSVLNNPSKHAIIERSNTRSSLAEVQSEIERIFELARTLQLVVLDADTINHPAQLSKTSLAPIIVYVKISSPKVLQRLIKSRGKSQAKHLNVQMVAADKLAQCPPELFDVILDENQLEDACEHLADYLEAYWKATHPPSSSLPNPLLSRTLATSSLPLSPTLASNSQGSQGDQRTDRSAPIRSASQAEEEPSVEPVKKSQHRSSSSAPHHNHRSGTSRGLSRQETFDSETQESRDSAYVEPKEDYSHDHVDHYASHRDHNHRDETHGSSDHRHRESRHRSRDVDREQDHNECNKQRSRHKSKDRYCEKDGEVISKKRNEAGEWNRDVYIPQ

SEQ ID NO: 1143 - DNA, 3241 bp, Homo sapiens
atgaaggccacctggatcaggcttctgaaaagagccaagggaggaaggctgaagaattctgatatctgtggttcggcagactcctacactagccgtccatccgattccgatgtatctctggaggaggaccgggaggcagtgcgcagagaagcggagcggcaggcccaggcacagttggaaaaagcaaagacaaagcccgttgcatttgcggttcggacaaatgtcagctacagtgcggcccatgaagatgatgttccagtgcctggcatggccatctcattcgaagcaaaagattttctgcatgttaaggaaaaatttaacaatgactggtggatagggcgattggtaaaagaaggctgtgaaatcggattcattccaagcccagtcaaactagaaaacatgaggctgcagcatgaacagagagccaagcaagggaaattctactccagtaaatcaggaggaaattcatcatccagtttgggtgacatagtacctagttccagaaaatcaacacctccatcatctgctatagacatagatgctactggcttagatgcagaagaaaatgatattccagcaaaccaccgctcccctaaacccagtgcaaacagtgtaacgtcaccccactccaaagagaaaagaatgcccttctttaagaagacagagcacactcctccgtatgatgtggtaccttccatgcgaccagtggtcctagtgggcccttctctgaagggctacgaggtcacagatatgatgcaaaaagcgctgtttgattttttaaaacacagatttgaagggcggatatccatcacaagggtcaccgctgacatctcgcttgccaaacgctcggtattaaacaatcccagtaagcacgcaataatagaaagatccaacacaaggtcaagcttagcggaagttcagagtgaaatcgaaaggatttttgaacttgcaagaacattgcagttggtggtccttgacgcggatacaattaatcatccagctcaactcagtaaaacctccttggcccctattatagtatatgtaaagatttcttctcctaaggttttacaaaggttaataaaatctcgagggaaatctcaagctaaacacctcaacgtccagatggtagcagctgataaactggctcagtgtcctccagagctgttcgatgtgatcttggatgagaaccagcttgaggatgcctgtgagcaccttgccgactatctggaggcctactggaaggccacccatcctcccagcagtagcctccccaaccctctccttagccgtacattagccacttcaagtctgcctcttagccccaccctagcctctaattcacagggttctcaaggtgatcagaggactgatcgctccgctcctatccgttctgcttcccaagctgaagaagaacctagtgtggaaccagtcaagaaatcccagcaccgctcttcctcctcagccccacaccacaaccatcgcagtgggacaagtcgcggcctctccaggcaagagacatttgactcggaaacccaggagagtcgagactctgcctacgtagagccaaaggaagattattcccatgaccacgtggaccactatgcctcacaccgtgaccacaaccacagagacgagacccacgggagcagtgaccacagacacagggagtcccggcaccgttcccgggacgtggatcgagagcaggaccacaacgagtgcaacaagcagcgcagccgtcataaatccaaggatcgctactgtgaaaaggatggagaagtgatatcaaaaaaacggaatgaggctggggagtggaacagggatgtttacatccgccaatgagttttgcccttttgtgtttttttttttttttttttgaagtcttgtataactaacagcatccccaaaacaaagtctttggggtctacactgcaatcatatgtgatctgtcttgtaatattttgtattattgctgttgcttgaatagcaatagcatggatagagtattgagatactttttcttttgtaagtgctacataaattggcctggtatggctgcagtcctccggttgcatactggactcttcaaaaactgttttgggtagctgccacttgaacaaaatctgttgccacccaggtgatgttagtgttttaagaaatgtagttgatgtatccaacaagccagaatcagcacagataaaaagtggaatttcttgtttctccagatttttaatacgttaatacgcaggcatctgatttgcatattcattcatggaccactgtttcttgcttgtacctctggctgactaaatttggggacagattcagtcttgccttacacaaaggggatcataaagttagaatctattttctatgtactagtactgtgtactgtatagacagtttgtaaatgttatttctgcaaacaaacaccttcttattatatataatatatatatatatatcagtttgatcacactattttagagtcttaatgccaagtcagcagatttgctttatgaattacagggactagaaatgcccacattcaggaaatttgtaataacattgtctagacacctatcctcattctagtagaaagtgtgtacatactgtaaatatgtgtgattgcttgacttgaaaaggtttgaattctgaatgttataccatccttgtaagtaagtttgtaatttccaccataaattatggtaaatataaaactccagaggttgttctactccatacagttcacactgattgtgacacattcttagtagctagtgtctgttctagtcactgcactggagtctacgagccggaactcgctatatgcacgtgtgtgtgtccgtatgtaagaaagtgtgcaccgagtgactgaatggttgagatgaattggaatgctgaagactaacgaagaaactagagactgatatcgagcattctgcccacctcgctctgtatttaattaattgtgctatatgttgctttaacaacccattgagcagtcagggaatgtgagtaagcttgctgccaaaggtaactaggaaagcattcatctgctgcctccttgtttttgctcctagagagtgaaaatacaggcaattttactgtgagtgtttcactggaaatgtacaatctttgtgtgttagagtatttgttttagtaagaaatgtttacacagcttgtggaattatttcgtgggaaaataaatttttataacttctcccaaaaaaaaaaaaaaaaa

SEQ ID NO: 1144 - protein, 612 aa, Homo sapiens
MKATWIRLLKRAKGGRLKNSDICGSADSYTSRPSDSDVSLEEDREAVRREAERQAQAQLEKAKTKPVAFAVRTNVSYSAAHEDDVPVPGMAISFEAKDFLHVKEKFNNDWWIGRLVKEGCEIGFIPSPVKLENMRLQHEQRAKQGKFYSSKSGGNSSSSLGDIVPSSRKSTPPSSAIDIDATGLDAEENDIPANHRSPKPSANSVTSPHSKEKRMPFFKKTEHTPPYDVVPSMRPVVLVGPSLKGYEVTDMMQKALFDFLKHRFEGRISITRVTADISLAKRSVLNNPSKHAIIERSNTRSSLAEVQSEIERIFELARTLQLVVLDADTINHPAQLSKTSLAPIIVYVKISSPKVLQRLIKSRGKSQAKHLNVQMVAADKLAQCPPELFDVILDENQLEDACEHLADYLEAYWKATHPPSSSLPNPLLSRTLATSSLPLSPTLASNSQGSQGDQRTDRSAPIRSASQAEEEPSVEPVKKSQHRSSSSAPHHNHRSGTSRGLSRQETFDSETQESRDSAYVEPKEDYSHDHVDHYASHRDHNHRDETHGSSDHRHRESRHRSRDVDREQDHNECNKQRSRHKSKDRYCEKDGEVISKKRNEAGEWNRDVYIRQ

SEQ ID NO: 1145 - DNA, 3301 bp, Homo sapiens
atgaatcaggggagtggactggacctgctgaagatctcatatggaaaaggagccagaaggaaaaacagatttaaaggatctgatggaagcacgtcatctgatactacctcaaatagttttgttcgccagggttcggcagactcctacactagccgtccatccgattccgatgtatctctggaggaggaccgggaggcagtgcgcagagaagcggagcggcaggcccaggcacagttggaaaaagcaaagacaaagcccgttgcatttgcggttcggacaaatgtcagctacagtgcggcccatgaagatgatgttccagtgcctggcatggccatctcattcgaagcaaaagattttctgcatgttaaggaaaaatttaacaatgactggtggatagggcgattggtaaaagaaggctgtgaaatcggattcattccaagcccagtcaaactagaaaacatgaggctgcagcatgaacagagagccaagcaagggaaattctactccagtaaatcaggaggaaattcatcatccagtttgggtgacatagtacctagttccagaaaatcaacacctccatcatctgctatagacatagatgctactggcttagatgcagaagaaaatgatattccagcaaaccaccgctcccctaaacccagtgcaaacagtgtaacgtcaccccactccaaagagaaaagaatgcccttctttaagaagacagagcacactcctccgtatgatgtggtaccttccatgcgaccagtggtcctagtgggcccttctctgaagggctacgaggtcacagatatgatgcaaaaagcgctgtttgattttttaaaacacagatttgaagggcggatatccatcacaagggtcaccgctgacatctcgcttgccaaacgctcggtattaaacaatcccagtaagcacgcaataatagaaagatccaacacaaggtcaagcttagcggaagttcagagtgaaatcgaaaggatttttgaacttgcaagaacattgcagttggtggtccttgacgcggatacaattaatcatccagctcaactcagtaaaacctccttggcccctattatagtatatgtaaagatttcttctcctaaggttttacaaaggttaataaaatctcgagggaaatctcaagctaaacacctcaacgtccagatggtagcagctgataaactggctcagtgtcctccagagctgttcgatgtgatcttggatgagaaccagcttgaggatgcctgtgagcaccttgccgactatctggaggcctactggaaggccacccatcctcccagcagtagcctccccaaccctctccttagccgtacattagccacttcaagtctgcctcttagccccaccctagcctctaattcacagggttctcaaggtgatcagaggactgatcgctccgctcctatccgttctgcttcccaagctgaagaagaacctagtgtggaaccagtcaagaaatcccagcaccgctcttcctcctcagccccacaccacaaccatcgcagtgggacaagtcgcggcctctccaggcaagagacatttgactcggaaacccaggagagtcgagactctgcctacgtagagccaaaggaagattattcccatgaccacgtggaccactatgcctcacaccgtgaccacaaccacagagacgagacccacgggagcagtgaccacagacacagggagtcccggcaccgttcccgggacgtggatcgagagcaggaccacaacgagtgcaacaagcagcgcagccgtcataaatccaaggatcgctactgtgaaaaggatggagaagtgatatcaaaaaaacggaatgaggctggggagtggaacagggatgtttacatcccccaatgagttttgcccttttgtgtttttttttttttttttttgaagtcttgtataactaacagcatccccaaaacaaagtctttggggtctacactgcaatcatatgtgatctgtcttgtaatattttgtattattgctgttgcttgaatagcaatagcatggatagagtattgagatactttttcttttgtaagtgctacataaattggcctggtatggctgcagtcctccggttgcatactggactcttcaaaaactgttttgggtagctgccacttgaacaaaatctgttgccacccaggtgatgttagtgttttaagaaatgtagttgatgtatccaacaagccagaatcagcacagataaaaagtggaatttcttgtttctccagatttttaatacgttaatacgcaggcatctgatttgcatattcattcatggaccactgtttcttgcttgtacctctggctgactaaatttggggacagattcagtcttgccttacacaaaggggatcataaagttagaatctattttctatgtactagtactgtgtactgtatagacagtttgtaaatgttatttctgcaaacaaacacctccttattatatataatatatatatatatatcagtttgatcacactattttagagtcttaatgccaagtcagcagatttgctttatgaattacagggactagaaatgcccacattcaggaaatttgtaataacattgtctagacacctatcctcattctagtagaaagtgtgtacatactgtaaatatgtgtgattgcttgacttgaaaaggtttgaattctgaatgttataccatccttgtaagtaagtttgtaatttccaccataaattatggtaaatataaaactccagaggttgttctactccatacagttcacactgattgtgacacattcttagtagctagtgtctgttctagtcactgcactggagtctacgagccggaactcgctatatgcacgtgtgtgtgtccgtatgtaagaaagtgtgcaccgagtgactgaatggttgagatgaattggaatgctgaagactaacgaagaaactagagactgatatcgagcattctgcccacctcgctctgtatttaattaattgtgctatatgttgctttaacaacccattgagcagtcagggaatgtgagtaagcttgctgccaaaggtaactaggaaagcattcatctgctgcctccttgtttttgctcctagagagtgaaaatacaggcaattttactgtgagtgtttcactggaaatgtacaatctttgtgtgttagagtatttgttttagtaagaaatgtttacacagcttgtggaattatttcgtgggaaaataaatttttataacttctcccaaaaaaaaaaaaaaaaa

SEQ ID NO: 1146 - protein, 632 aa, Homo sapiens
MNQGSGLDLLKISYGKGARRKNRFKGSDGSTSSDTTSNSFVRQGSADSYTSRPSDSDVSLEEDREAVRREAERQAQAQLEKAKTKPVAFAVRTNVSYSAAHEDDVPVPGMAISFEAKDFLHVKEKFNNDWWIGRLVKEGCEIGFIPSPVKLENMRLQHEQRAKQGKFYSSKSGGNSSSSLGDIVPSSRKSTPPSSAIDIDATGLDAEENDIPANHRSPKPSANSVTSPHSKEKRMPFFKKTEHTPPYDVVPSMRPVVLVGPSLKGYEVTDMMQKALFDFLKHRFEGRISITRVTADISLAKRSVLNNPSKHAIIERSNTRSSLAEVQSEIERIFELARTLQLVVLDADTINHPAQLSKTSLAPIIVYVKISSPKVLQRLIKSRGKSQAKHLNVQMVAADKLAQCPPELFDVILDENQLEDACEHLADYLEAYWKATHPPSSSLPNPLLSRTLATSSLPLSPTLASNSQGSQGDQRTDRSAPIRSASQAEEEPSVEPVKKSQHRSSSSAPHHNHRSGTSRGLSRQETFDSETQESRDSAYVEPKEDYSHDHVDHYASHRDHNHRDETHGSSDHRHRESRHRSRDVDREQDHNECNKQRSRHKSKDRYCEKDGEVISKKRNEAGEWNRDVYIPQ

SEQ ID NO: 1147 - DNA, 3229 bp, Homo sapiens
atgaatcaggggagtggactggacctgctgaagatctcatatggaaaaggagccagaaggaaaaacagatttaaaggatctgatggaagcacgtcatctgatactacctcaaatagttttgttcgccagggttcggcagactcctacactagccgtccatccgattccgatgtatctctggaggaggaccgggaggcagtgcgcagagaagcggagcggcaggcccaggcacagttggaaaaagcaaagacaaagcccgttgcatttgcggttcggacaaatgtcagctacagtgcggcccatgaagatgatgttccagtgcctggcatggccatctcattcgaagcaaaagattttctgcatgttaaggaaaaatttaacaatgactggtggatagggcgattggtaaaagaaggctgtgaaatcggattcattccaagcccagtcaaactagaaaacatgaggctgcagcatgaacagagagccaagcaagggaaattctactccagtaaatcaggaggaaattcatcatccagtttgggtgacatagtacctagttccagaaaatcaacacctccatcatctggtgcaaaatctgcagatgaacaagaccagtggaaaactgcaggcttgttttggcggtttactacagagcacactcctccgtatgatgtggtaccttccatgcgaccagtggtcctagtgggcccttctctgaagggctacgaggtcacagatatgatgcaaaaagcgctgtttgattttttaaaacacagatttgaagggcggatatccatcacaagggtcaccgctgacatctcgcttgccaaacgctcggtattaaacaatcccagtaagcacgcaataatagaaagatccaacacaaggtcaagcttagcggaagttcagagtgaaatcgaaaggatttttgaacttgcaagaacattgcagttggtggtccttgacgcggatacaattaatcatccagctcaactcagtaaaacctccttggcccctattatagtatatgtaaagatttcttctcctaaggttttacaaaggttaataaaatctcgagggaaatctcaagctaaacacctcaacgtccagatggtagcagctgataaactggctcagtgtcctccagagctgttcgatgtgatcttggatgagaaccagcttgaggatgcctgtgagcaccttgccgactatctggaggcctactggaaggccacccatcctcccagcagtagcctccccaaccctctccttagccgtacattagccacttcaagtctgcctcttagccccaccctagcctctaattcacagggttctcaaggtgatcagaggactgatcgctccgctcctatccgttctgcttcccaagctgaagaagaacctagtgtggaaccagtcaagaaatcccagcaccgctcttcctcctcagccccacaccacaaccatcgcagtgggacaagtcgcggcctctccaggcaagagacatttgactcggaaacccaggagagtcgagactctgcctacgtagagccaaaggaagattattcccatgaccacgtggaccactatgcctcacaccgtgaccacaaccacagagacgagacccacgggagcagtgaccacagacacagggagtcccggcaccgttcccgggacgtggatcgagagcaggaccacaacgagtgcaacaagcagcgcagccgtcataaatccaaggatcgctactgtgaaaaggatggagaagtgatatcaaaaaaacggaatgaggctggggagtggaacagggatgtttacatcccccaatgagttttgcccttttgtgtttttttttttttttttttgaagtcttgtataactaacagcatccccaaaacaaagtctttggggtctacactgcaatcatatgtgatctgtcttgtaatattttgtattattgctgttgcttgaatagcaatagcatggatagagtattgagatactttttcttttgtaagtgctacataaattggcctggtatggctgcagtcctccggttgcatactggactcttcaaaaactgttttgggtagctgccacttgaacaaaatctgttgccacccaggtgatgttagtgttttaagaaatgtagttgatgtatccaacaagccagaatcagcacagataaaaagtggaatttcttgtttctccagatttttaatacgttaatacgcaggcatctgatttgcatattcattcatggaccactgtttcttgcttgtacctctggctgactaaatttggggacagattcagtcttgccttacacaaaggggatcataaagttagaatctattttctatgtactagtactgtgtactgtatagacagtttgtaaatgttatttctgcaaacaaacacctccttattatatataatatatatatatatatcagtttgatcacactattttagagtcttaatgccaagtcagcagatttgctttatgaattacagggactagaaatgcccacattcaggaaatttgtaataacattgtctagacacctatcctcattctagtagaaagtgtgtacatactgtaaatatgtgtgattgcttgacttgaaaaggtttgaattctgaatgttataccatccttgtaagtaagtttgtaatttccaccataaattatggtaaatataaaactccagaggttgttctactccatacagttcacactgattgtgacacattcttagtagctagtgtctgttctagtcactgcactggagtctacgagccggaactcgctatatgcacgtgtgtgtgtccgtatgtaagaaagtgtgcaccgagtgactgaatggttgagatgaattggaatgctgaagactaacgaagaaactagagactgatatcgagcattctgcccacctcgctctgtatttaattaattgtgctatatgttgctttaacaacccattgagcagtcagggaatgtgagtaagcttgctgccaaaggtaactaggaaagcattcatctgctgcctccttgtttttgctcctagagagtgaaaatacaggcaattttactgtgagtgtttcactggaaatgtacaatctttgtgtgttagagtatttgttttagtaagaaatgtttacacagcttgtggaattatttcgtgggaaaataaatttttataacttctcccaaaaaaaaaaaaaaaaa

SEQ ID NO: 1148 - protein, 608 aa, Homo sapiens
MNQGSGLDLLKISYGKGARRKNRFKGSDGSTSSDTTSNSFVRQGSADSYTSRPSDSDVSLEEDREAVRREAERQAQAQLEKAKTKPVAFAVRTNVSYSAAHEDDVPVPGMAISFEAKDFLHVKEKFNNDWWIGRLVKEGCEIGFIPSPVKLENMRLQHEQRAKQGKFYSSKSGGNSSSSLGDIVPSSRKSTPPSSGAKSADEQDQWKTAGLFWRFTTEHTPPYDVVPSMRPVVLVGPSLKGYEVTDMMQKALFDFLKHRFEGRISITRVTADISLAKRSVLNNPSKHAIIERSNTRSSLAEVQSEIERIFELARTLQLVVLDADTINHPAQLSKTSLAPIIVYVKISSPKVLQRLIKSRGKSQAKHLNVQMVAADKLAQCPPELFDVILDENQLEDACEHLADYLEAYWKATHPPSSSLPNPLLSRTLATSSLPLSPTLASNSQGSQGDQRTDRSAPIRSASQAEEEPSVEPVKKSQHRSSSSAPHHNHRSGTSRGLSRQETFDSETQESRDSAYVEPKEDYSHDHVDHYASHRDHNHRDETHGSSDHRHRESRHRSRDVDREQDHNECNKQRSRHKSKDRYCEKDGEVISKKRNEAGEWNRDVYIPQ

SEQ ID NO: 1149 - DNA, 3375 bp, Homo sapiens
gactacacaccccaagccagcaagaaaaaggaaagcagttgctatgctgttcagcaaagcaagacttggctgccttttagctagtcctgaattcttgctcctgtgaagaaaattcctgctggagtgctgggcgcacttggaattggtctagcatgcttgacagacgccttatagctcctcaaactaaatacattattcctgggggttcggcagactcctacactagccgtccatccgattccgatgtatctctggaggaggaccgggaggcagtgcgcagagaagcggagcggcaggcccaggcacagttggaaaaagcaaagacaaagcccgttgcatttgcggttcggacaaatgtcagctacagtgcggcccatgaagatgatgttccagtgcctggcatggccatctcattcgaagcaaaagattttctgcatgttaaggaaaaatttaacaatgactggtggatagggcgattggtaaaagaaggctgtgaaatcggattcattccaagcccagtcaaactagaaaacatgaggctgcagcatgaacagagagccaagcaagggaaattctactccagtaaatcaggaggaaattcatcatccagtttgggtgacatagtacctagttccagaaaatcaacacctccatcatctgctatagacatagatgctactggcttagatgcagaagaaaatgatattccagcaaaccaccgctcccctaaacccagtgcaaacagtgtaacgtcaccccactccaaagagaaaagaatgcccttctttaagaagacagagcacactcctccgtatgatgtggtaccttccatgcgaccagtggtcctagtgggcccttctctgaagggctacgaggtcacagatatgatgcaaaaagcgctgtttgattttttaaaacacagatttgaagggcggatatccatcacaagggtcaccgctgacatctcgcttgccaaacgctcggtattaaacaatcccagtaagcacgcaataatagaaagatccaacacaaggtcaagcttagcggaagttcagagtgaaatcgaaaggatttttgaacttgcaagaacattgcagttggtggtccttgacgcggatacaattaatcatccagctcaactcagtaaaacctccttggcccctattatagtatatgtaaagatttcttctcctaaggttttacaaaggttaataaaatctcgagggaaatctcaagctaaacacctcaacgtccagatggtagcagctgataaactggctcagtgtcctccagagctgttcgatgtgatcttggatgagaaccagcttgaggatgcctgtgagcaccttgccgactatctggaggcctactggaaggccacccatcctcccagcagtagcctccccaaccctctccttagccgtacattagccacttcaagtctgcctcttagccccaccctagcctctaattcacagggttctcaaggtgatcagaggactgatcgctccgctcctatccgttctgcttcccaagctgaagaagaacctagtgtggaaccagtcaagaaatcccagcaccgctcttcctcctcagccccacaccacaaccatcgcagtgggacaagtcgcggcctctccaggcaagagacatttgactcggaaacccaggagagtcgagactctgcctacgtagagccaaaggaagattattcccatgaccacgtggaccactatgcctcacaccgtgaccacaaccacagagacgagacccacgggagcagtgaccacagacacagggagtcccggcaccgttcccgggacgtggatcgagagcaggaccacaacgagtgcaacaagcagcgcagccgtcataaatccaaggatcgctactgtgaaaaggatggagaagtgatatcaaaaaaacggaatgaggctggggagtggaacagggatgtttacatcccccaatgagttttgcccttttgtgtttttttttttttttttttgaagtcttgtataactaacagcatccccaaaacaaagtctttggggtctacactgcaatcatatgtgatctgtcttgtaatattttgtattattgctgttgcttgaatagcaatagcatggatagagtattgagatactttttcttttgtaagtgctacataaattggcctggtatggctgcagtcctccggttgcatactggactcttcaaaaactgttttgggtagctgccacttgaacaaaatctgttgccacccaggtgatgttagtgttttaagaaatgtagttgatgtatccaacaagccagaatcagcacagataaaaagtggaatttcttgtttctccagatttttaatacgttaatacgcaggcatctgatttgcatattcattcatggaccactgtttcttgcttgtacctctggctgactaaatttggggacagattcagtcttgccttacacaaaggggatcataaagttagaatctattttctatgtactagtactgtgtactgtatagacagtttgtaaatgttatttctgcaaacaaacacctccttattatatataatatatatatatatatcagtttgatcacactattttagagtcttaatgccaagtcagcagatttgctttatgaattacagggactagaaatgcccacattcaggaaatttgtaataacattgtctagacacctatcctcattctagtagaaagtgtgtacatactgtaaatatgtgtgattgcttgacttgaaaaggtttgaattctgaatgttataccatccttgtaagtaagtttgtaatttccaccataaattatggtaaatataaaactccagaggttgttctactccatacagttcacactgattgtgacacattcttagtagctagtgtctgttctagtcactgcactggagtctacgagccggaactcgctatatgcacgtgtgtgtgtccgtatgtaagaaagtgtgcaccgagtgactgaatggttgagatgaattggaatgctgaagactaacgaagaaactagagactgatatcgagcattctgcccacctcgctctgtatttaattaattgtgctatatgttgctttaacaacccattgagcagtcagggaatgtgagtaagcttgctgccaaaggtaactaggaaagcattcatctgctgcctccttgtttttgctcctagagagtgaaaatacaggcaattttactgtgagtgtttcactggaaatgtacaatctttgtgtgttagagtatttgttttagtaagaaatgtttacacagcttgtggaattatttcgtgggaaaataaatttttataacttctcccaaaaaaaaaaaaaaaaa

SEQ ID NO: 1150 - protein, 606 aa, Homo sapiens
MLDRRLIAPQTKYIIPGGSADSYTSRPSDSDVSLEEDREAVRREAERQAQAQLEKAKTKPVAFAVRTNVSYSAAHEDDVPVPGMAISFEAKDFLHVKEKFNNDWWIGRLVKEGCEIGFIPSPVKLENMRLQHEQRAKQGKFYSSKSGGNSSSSLGDIVPSSRKSTPPSSAIDIDATGLDAEENDIPANHRSPKPSANSVTSPHSKEKRMPFFKKTEHTPPYDVVPSMRPVVLVGPSLKGYEVTDMMQKALFDFLKHRFEGRISITRVTADISLAKRSVLNNPSKHAIIERSNTRSSLAEVQSEIERIFELARTLQLVVLDADTINHPAQLSKTSLAPIIVYVKISSPKVLQRLIKSRGKSQAKHLNVQMVAADKLAQCPPELFDVILDENQLEDACEHLADYLEAYWKATHPPSSSLPNPLLSRTLATSSLPLSPTLASNSQGSQGDQRTDRSAPIRSASQAEEEPSVEPVKKSQHRSSSSAPHHNHRSGTSRGLSRQETFDSETQESRDSAYVEPKEDYSHDHVDHYASHRDHNHRDETHGSSDHRHRESRHRSRDVDREQDHNECNKQRSRHKSKDRYCEKDGEVISKKRNEAGEWNRDVYIPQ

SEQ ID NO: 1151 - DNA, 3322 bp, Homo sapiens
gaggaggaggggacccgccgccgggggctggctgcttcgctccgagccgacttttcgccaatggtccaaagggacatgtccaagtcgcctcccacagcggcggcggcggtggcgcaggagatccagatggaactgctagagaacgtggctcccgcgggggcgctcggagccgccgcacagtcatatggaaaaggagccagaaggaaaaacagatttaaaggatctgatggaagcacgtcatctgatactacctcaaatagttttgttcgccagggttcggcagactcctacactagccgtccatccgattccgatgtatctctggaggaggaccgggaggcagtgcgcagagaagcggagcggcaggcccaggcacagttggaaaaagcaaagacaaagcccgttgcatttgcggttcggacaaatgtcagctacagtgcggcccatgaagatgatgttccagtgcctggcatggccatctcattcgaagcaaaagattttctgcatgttaaggaaaaatttaacaatgactggtggatagggcgattggtaaaagaaggctgtgaaatcggattcattccaagcccagtcaaactagaaaacatgaggctgcagcatgaacagagagccaagcaagggaaattctactccagtaaatcaggaggaaattcatcatccagtttgggtgacatagtacctagttccagaaaatcaacacctccatcatctgctaagcagaagcagaagcacactcctccgtatgatgtggtaccttccatgcgaccagtggtcctagtgggcccttctctgaagggctacgaggtcacagatatgatgcaaaaagcgctgtttgattttttaaaacacagatttgaagggcggatatccatcacaagggtcaccgctgacatctcgcttgccaaacgctcggtattaaacaatcccagtaagcacgcaataatagaaagatccaacacaaggtcaagcttagcggaagttcagagtgaaatcgaaaggatttttgaacttgcaagaacattgcagttggtggtccttgacgcggatacaattaatcatccagctcaactcagtaaaacctccttggcccctattatagtatatgtaaagatttcttctcctaaggttttacaaaggttaataaaatctcgagggaaatctcaagctaaacacctcaacgtccagatggtagcagctgataaactggctcagtgtcctccagagctgttcgatgtgatcttggatgagaaccagcttgaggatgcctgtgagcaccttgccgactatctggaggcctactggaaggccacccatcctcccagcagtagcctccccaaccctctccttagccgtacattagccacttcaagtctgcctcttagccccaccctagcctctaattcacagggttctcaaggtgatcagaggactgatcgctccgctcctatccgttctgcttcccaagctgaagaagaacctagtgtggaaccagtcaagaaatcccagcaccgctcttcctcctcagccccacaccacaaccatcgcagtgggacaagtcgcggcctctccaggcaagagacatttgactcggaaacccaggagagtcgagactctgcctacgtagagccaaaggaagattattcccatgaccacgtggaccactatgcctcacaccgtgaccacaaccacagagacgagacccacgggagcagtgaccacagacacagggagtcccggcaccgttcccgggacgtggatcgagagcaggaccacaacgagtgcaacaagcagcgcagccgtcataaatccaaggatcgctactgtgaaaaggatggagaagtgatatcaaaaaaacggaatgaggctggggagtggaacagggatgtttacatcccccaatgagttttgcccttttgtgtttttttttttttttttttgaagtcttgtataactaacagcatccccaaaacaaagtctttggggtctacactgcaatcatatgtgatctgtcttgtaatattttgtattattgctgttgcttgaatagcaatagcatggatagagtattgagatactttttcttttgtaagtgctacataaattggcctggtatggctgcagtcctccggttgcatactggactcttcaaaaactgttttgggtagctgccacttgaacaaaatctgttgccacccaggtgatgttagtgttttaagaaatgtagttgatgtatccaacaagccagaatcagcacagataaaaagtggaatttcttgtttctccagatttttaatacgttaatacgcaggcatctgatttgcatattcattcatggaccactgtttcttgcttgtacctctggctgactaaatttggggacagattcagtcttgccttacacaaaggggatcataaagttagaatctattttctatgtactagtactgtgtactgtatagacagtttgtaaatgttatttctgcaaacaaacacctccttattatatataatatatatatatatatcagtttgatcacactattttagagtcttaatgccaagtcagcagatttgctttatgaattacagggactagaaatgcccacattcaggaaatttgtaataacattgtctagacacctatcctcattctagtagaaagtgtgtacatactgtaaatatgtgtgattgcttgacttgaaaaggtttgaattctgaatgttataccatccttgtaagtaagtttgtaatttccaccataaattatggtaaatataaaactccagaggttgttctactccatacagttcacactgattgtgacacattcttagtagctagtgtctgttctagtcactgcactggagtctacgagccggaactcgctatatgcacgtgtgtgtgtccgtatgtaagaaagtgtgcaccgagtgactgaatggttgagatgaattggaatgctgaagactaacgaagaaactagagactgatatcgagcattctgcccacctcgctctgtatttaattaattgtgctatatgttgctttaacaacccattgagcagtcagggaatgtgagtaagcttgctgccaaaggtaactaggaaagcattcatctgctgcctccttgtttttgctcctagagagtgaaaatacaggcaattttactgtgagtgtttcactggaaatgtacaatctttgtgtgttagagtatttgttttagtaagaaatgtttacacagcttgtggaattatttcgtgggaaaataaatttttataacttctcccaaaaaaaaaaaaaaaaa

SEQ ID NO: 1152 - protein, 619 aa, Homo sapiens
MVQRDMSKSPPTAAAAVAQEIQMELLENVAPAGALGAAAQSYGKGARRKNRFKGSDGSTSSDTTSNSFVRQGSADSYTSRPSDSDVSLEEDREAVRREAERQAQAQLEKAKTKPVAFAVRTNVSYSAAHEDDVPVPGMAISFEAKDFLHVKEKFNNDWWIGRLVKEGCEIGFIPSPVKLENMRLQHEQRAKQGKFYSSKSGGNSSSSLGDIVPSSRKSTPPSSAKQKQKHTPPYDVVPSMRPVVLVGPSLKGYEVTDMMQKALFDFLKHRFEGRISITRVTADISLAKRSVLNNPSKHAIIERSNTRSSLAEVQSEIERIFELARTLQLVVLDADTINHPAQLSKTSLAPIIVYVKISSPKVLQRLIKSRGKSQAKHLNVQMVAADKLAQCPPELFDVILDENQLEDACEHLADYLEAYWKATHPPSSSLPNPLLSRTLATSSLPLSPTLASNSQGSQGDQRTDRSAPIRSASQAEEEPSVEPVKKSQHRSSSSAPHHNHRSGTSRGLSRQETFDSETQESRDSAYVEPKEDYSHDHVDHYASHRDHNHRDETHGSSDHRHRESRHRSRDVDREQDHNECNKQRSRHKSKDRYCEKDGEVISKKRNEAGEWNRDVYIPQ

SEQ ID NO: 1153 - DNA, 3445 bp, Homo sapiens
gaggaggaggggacccgccgccgggggctggctgcttcgctccgagccgacttttcgccaatggtccaaagggacatgtccaagtcgcctcccacagcggcggcggcggtggcgcaggagatccagatggaactgctagagaacgtggctcccgcgggggcgctcggagccgccgcacagtcatatggaaaaggagccagaaggaaaaacagatttaaaggatctgatggaagcacgtcatctgatactacctcaaatagttttgttcgccagggttcggcagactcctacactagccgtccatccgattccgatgtatctctggaggaggaccgggaggcagtgcgcagagaagcggagcggcaggcccaggcacagttggaaaaagcaaagacaaagcccgttgcatttgcggttcggacaaatgtcagctacagtgcggcccatgaagatgatgttccagtgcctggcatggccatctcattcgaagcaaaagattttctgcatgttaaggaaaaatttaacaatgactggtggatagggcgattggtaaaagaaggctgtgaaatcggattcattccaagcccagtcaaactagaaaacatgaggctgcagcatgaacagagagccaagcaagggaaattctactccagtaaatcaggaggaaattcatcatccagtttgggtgacatagtacctagttccagaaaatcaacacctccatcatctgctatagacatagatgctactggcttagatgcagaagaaaatgatattccagcaaaccaccgctcccctaaacccagtgcaaacagtgtaacgtcaccccactccaaagagaaaagaatgcccttctttaagaagacagagcacactcctccgtatgatgtggtaccttccatgcgaccagtggtcctagtgggcccttctctgaagggctacgaggtcacagatatgatgcaaaaagcgctgtttgattttttaaaacacagatttgaagggcggatatccatcacaagggtcaccgctgacatctcgcttgccaaacgctcggtattaaacaatcccagtaagcacgcaataatagaaagatccaacacaaggtcaagcttagcggaagttcagagtgaaatcgaaaggatttttgaacttgcaagaacattgcagttggtggtccttgacgcggatacaattaatcatccagctcaactcagtaaaacctccttggcccctattatagtatatgtaaagatttcttctcctaaggttttacaaaggttaataaaatctcgagggaaatctcaagctaaacacctcaacgtccagatggtagcagctgataaactggctcagtgtcctccagagctgttcgatgtgatcttggatgagaaccagcttgaggatgcctgtgagcaccttgccgactatctggaggcctactggaaggccacccatcctcccagcagtagcctccccaaccctctccttagccgtacattagccacttcaagtctgcctcttagccccaccctagcctctaattcacagggttctcaaggtgatcagaggactgatcgctccgctcctatccgttctgcttcccaagctgaagaagaacctagtgtggaaccagtcaagaaatcccagcaccgctcttcctcctcagccccacaccacaaccatcgcagtgggacaagtcgcggcctctccaggcaagagacatttgactcggaaacccaggagagtcgagactctgcctacgtagagccaaaggaagattattcccatgaccacgtggaccactatgcctcacaccgtgaccacaaccacagagacgagacccacgggagcagtgaccacagacacagggagtcccggcaccgttcccgggacgtggatcgagagcaggaccacaacgagtgcaacaagcagcgcagccgtcataaatccaaggatcgctactgtgaaaaggatggagaagtgatatcaaaaaaacggaatgaggctggggagtggaacagggatgtttacatcccccaatgagttttgcccttttgtgtttttttttttttttttttgaagtcttgtataactaacagcatccccaaaacaaagtctttggggtctacactgcaatcatatgtgatctgtcttgtaatattttgtattattgctgttgcttgaatagcaatagcatggatagagtattgagatactttttcttttgtaagtgctacataaattggcctggtatggctgcagtcctccggttgcatactggactcttcaaaaactgttttgggtagctgccacttgaacaaaatctgttgccacccaggtgatgttagtgttttaagaaatgtagttgatgtatccaacaagccagaatcagcacagataaaaagtggaatttcttgtttctccagatttttaatacgttaatacgcaggcatctgatttgcatattcattcatggaccactgtttcttgcttgtacctctggctgactaaatttggggacagattcagtcttgccttacacaaaggggatcataaagttagaatctattttctatgtactagtactgtgtactgtatagacagtttgtaaatgttatttctgcaaacaaacacctccttattatatataatatatatatatatatcagtttgatcacactattttagagtcttaatgccaagtcagcagatttgctttatgaattacagggactagaaatgcccacattcaggaaatttgtaataacattgtctagacacctatcctcattctagtagaaagtgtgtacatactgtaaatatgtgtgattgcttgacttgaaaaggtttgaattctgaatgttataccatccttgtaagtaagtttgtaatttccaccataaattatggtaaatataaaactccagaggttgttctactccatacagttcacactgattgtgacacattcttagtagctagtgtctgttctagtcactgcactggagtctacgagccggaactcgctatatgcacgtgtgtgtgtccgtatgtaagaaagtgtgcaccgagtgactgaatggttgagatgaattggaatgctgaagactaacgaagaaactagagactgatatcgagcattctgcccacctcgctctgtatttaattaattgtgctatatgttgctttaacaacccattgagcagtcagggaatgtgagtaagcttgctgccaaaggtaactaggaaagcattcatctgctgcctccttgtttttgctcctagagagtgaaaatacaggcaattttactgtgagtgtttcactggaaatgtacaatctttgtgtgttagagtatttgttttagtaagaaatgtttacacagcttgtggaattatttcgtgggaaaataaatttttataacttctcccaaaaaaaaaaaaaaaaa

SEQ ID NO: 1154 - protein, 660 aa, Homo sapiens
MVQRDMSKSPPTAAAAVAQEIQMELLENVAPAGALGAAAQSYGKGARRKNRFKGSDGSTSSDTTSNSFVRQGSADSYTSRPSDSDVSLEEDREAVRREAERQAQAQLEKAKTKPVAFAVRTNVSYSAAHEDDVPVPGMAISFEAKDFLHVKEKFNNDWWIGRLVKEGCEIGFIPSPVKLENMRLQHEQRAKQGKFYSSKSGGNSSSSLGDIVPSSRKSTPPSSAIDIDATGLDAEENDIPANHRSPKPSANSVTSPHSKEKRMPFFKKTEHTPPYDVVPSMRPVVLVGPSLKGYEVTDMMQKALFDFLKHRFEGRISITRVTADISLAKRSVLNNPSKHAIIERSNTRSSLAEVQSEIERIFELARTLQLVVLDADTINHPAQLSKTSLAPIIVYVKISSPKVLQRLIKSRGKSQAKHLNVQMVAADKLAQCPPELFDVILDENQLEDACEHLADYLEAYWKATHPPSSSLPNPLLSRTLATSSLPLSPTLASNSQGSQGDQRTDRSAPIRSASQAEEEPSVEPVKKSQHRSSSSAPHHNHRSGTSRGLSRQETFDSETQESRDSAYVEPKEDYSHDHVDHYASHRDHNHRDETHGSSDHRHRESRHRSRDVDREQDHNECNKQRSRHKSKDRYCEKDGEVISKKRNEAGEWNRDVYIPQ

SEQ ID NO: 1155 - DNA, 3373 bp, Homo sapiens
gaggaggaggggacccgccgccgggggctggctgcttcgctccgagccgacttttcgccaatggtccaaagggacatgtccaagtcgcctcccacagcggcggcggcggtggcgcaggagatccagatggaactgctagagaacgtggctcccgcgggggcgctcggagccgccgcacagtcatatggaaaaggagccagaaggaaaaacagatttaaaggatctgatggaagcacgtcatctgatactacctcaaatagttttgttcgccagggttcggcagactcctacactagccgtccatccgattccgatgtatctctggaggaggaccgggaggcagtgcgcagagaagcggagcggcaggcccaggcacagttggaaaaagcaaagacaaagcccgttgcatttgcggttcggacaaatgtcagctacagtgcggcccatgaagatgatgttccagtgcctggcatggccatctcattcgaagcaaaagattttctgcatgttaaggaaaaatttaacaatgactggtggatagggcgattggtaaaagaaggctgtgaaatcggattcattccaagcccagtcaaactagaaaacatgaggctgcagcatgaacagagagccaagcaagggaaattctactccagtaaatcaggaggaaattcatcatccagtttgggtgacatagtacctagttccagaaaatcaacacctccatcatctggtgcaaaatctgcagatgaacaagaccagtggaaaactgcaggcttgttttggcggtttactacagagcacactcctccgtatgatgtggtaccttccatgcgaccagtggtcctagtgggcccttctctgaagggctacgaggtcacagatatgatgcaaaaagcgctgtttgattttttaaaacacagatttgaagggcggatatccatcacaagggtcaccgctgacatctcgcttgccaaacgctcggtattaaacaatcccagtaagcacgcaataatagaaagatccaacacaaggtcaagcttagcggaagttcagagtgaaatcgaaaggatttttgaacttgcaagaacattgcagttggtggtccttgacgcggatacaattaatcatccagctcaactcagtaaaacctccttggcccctattatagtatatgtaaagatttcttctcctaaggttttacaaaggttaataaaatctcgagggaaatctcaagctaaacacctcaacgtccagatggtagcagctgataaactggctcagtgtcctccagagctgttcgatgtgatcttggatgagaaccagcttgaggatgcctgtgagcaccttgccgactatctggaggcctactggaaggccacccatcctcccagcagtagcctccccaaccctctccttagccgtacattagccacttcaagtctgcctcttagccccaccctagcctctaattcacagggttctcaaggtgatcagaggactgatcgctccgctcctatccgttctgcttcccaagctgaagaagaacctagtgtggaaccagtcaagaaatcccagcaccgctcttcctcctcagccccacaccacaaccatcgcagtgggacaagtcgcggcctctccaggcaagagacatttgactcggaaacccaggagagtcgagactctgcctacgtagagccaaaggaagattattcccatgaccacgtggaccactatgcctcacaccgtgaccacaaccacagagacgagacccacgggagcagtgaccacagacacagggagtcccggcaccgttcccgggacgtggatcgagagcaggaccacaacgagtgcaacaagcagcgcagccgtcataaatccaaggatcgctactgtgaaaaggatggagaagtgatatcaaaaaaacggaatgaggctggggagtggaacagggatgtttacatccgccaatgagttttgcccttttgtgtttttttttttttttttttgaagtcttgtataactaacagcatccccaaaacaaagtctttggggtctacactgcaatcatatgtgatctgtcttgtaatattttgtattattgctgttgcttgaatagcaatagcatggatagagtattgagatactttttcttttgtaagtgctacataaattggcctggtatggctgcagtcctccggttgcatactggactcttcaaaaactgttttgggtagctgccacttgaacaaaatctgttgccacccaggtgatgttagtgttttaagaaatgtagttgatgtatccaacaagccagaatcagcacagataaaaagtggaatttcttgtttctccagatttttaatacgttaatacgcaggcatctgatttgcatattcattcatggaccactgtttcttgcttgtacctctggctgactaaatttggggacagattcagtcttgccttacacaaaggggatcataaagttagaatctattttctatgtactagtactgtgtactgtatagacagtttgtaaatgttatttctgcaaacaaacaccttcttattatatataatatatatatatatatcagtttgatcacactattttagagtcttaatgccaagtcagcagatttgctttatgaattacagggactagaaatgcccacattcaggaaatttgtaataacattgtctagacacctatcctcattctagtagaaagtgtgtacatactgtaaatatgtgtgattgcttgacttgaaaaggtttgaattctgaatgttataccatccttgtaagtaagtttgtaatttccaccataaattatggtaaatataaaactccagaggttgttctactccatacagttcacactgattgtgacacattcttagtagctagtgtctgttctagtcactgcactggagtctacgagccggaactcgctatatgcacgtgtgtgtgtccgtatgtaagaaagtgtgcaccgagtgactgaatggttgagatgaattggaatgctgaagactaacgaagaaactagagactgatatcgagcattctgcccacctcgctctgtatttaattaattgtgctatatgttgctttaacaacccattgagcagtcagggaatgtgagtaagcttgctgccaaaggtaactaggaaagcattcatctgctgcctccttgtttttgctcctagagagtgaaaatacaggcaattttactgtgagtgtttcactggaaatgtacaatctttgtgtgttagagtatttgttttagtaagaaatgtttacacagcttgtggaattatttcgtgggaaaataaatttttataacttctcccaaaaaaaaaaaaaaaaa

SEQ ID NO: 1156 - protein, 636 aa, Homo sapiens
MVQRDMSKSPPTAAAAVAQEIQMELLENVAPAGALGAAAQSYGKGARRKNRFKGSDGSTSSDTTSNSFVRQGSADSYTSRPSDSDVSLEEDREAVRREAERQAQAQLEKAKTKPVAFAVRTNVSYSAAHEDDVPVPGMAISFEAKDFLHVKEKFNNDWWIGRLVKEGCEIGFIPSPVKLENMRLQHEQRAKQGKFYSSKSGGNSSSSLGDIVPSSRKSTPPSSGAKSADEQDQWKTAGLFWRFTTEHTPPYDVVPSMRPVVLVGPSLKGYEVTDMMQKALFDFLKHRFEGRISITRVTADISLAKRSVLNNPSKHAIIERSNTRSSLAEVQSEIERIFELARTLQLVVLDADTINHPAQLSKTSLAPIIVYVKISSPKVLQRLIKSRGKSQAKHLNVQMVAADKLAQCPPELFDVILDENQLEDACEHLADYLEAYWKATHPPSSSLPNPLLSRTLATSSLPLSPTLASNSQGSQGDQRTDRSAPIRSASQAEEEPSVEPVKKSQHRSSSSAPHHNHRSGTSRGLSRQETFDSETQESRDSAYVEPKEDYSHDHVDHYASHRDHNHRDETHGSSDHRHRESRHRSRDVDREQDHNECNKQRSRHKSKDRYCEKDGEVISKKRNEAGEWNRDVYIRQ

SEQ ID NO: 1157 - DNA, 2246 bp, Homo sapiens
ccgccgagaaatagggggcgcgtgtttggaaattgatagaaaagataaagggaccgagctgctgtcagcctggcttactgatctgcgtccgtttcaccacggattcagttactaagcattttttttctttttttggttctttgcaacgtgagtggcattggctcagtgatttccatgagcatctctaccagaaaacattgcctcgatgaggtgtggtggaagcccggcagccccttctaatcggctaggcttgagaaagcgtgtacctctgcatttccgaaattaactcagcgtgatcggcaagattttcctcagcatctggtgtcaagacactcgtcactattaattcggaaagaaaaaaaaaaaacaaaacaccgttttccagcatttctctttgtggagaactaaacaacaggaaaaatgtctattttccctaagatatctttgagacctgaggttgaaaactatcttaaggaaggctttatgaataaggagattgtgactgctttaggtaaacaagaagcagaaaggaagtttgaaactttgttaaagcacctgtcacatcctccatcatttacaactgtcagagtgaatacacatttagcctcagtacaacatgtgaaaaatctgttacttgatgaacttcagaagcagtttaatggattaagtgttcctattcttcaacatccagaccttcaagatgtgttacttattcctgttattggacccagaaagaatattaaaaaacaacagtgtgaagccattgttggagcccagtgtggcaatgcagttttaagaggagcccatgtctatgccccaggaattgtgtcagcatcacaatttatgaaagctggagatgttatttctgtatactctgatattaaaggaaaatgtaagaaaggagccaaagaatttgatggaacaaaagtatttcttggaaatgggatttctgaactaagccgcaaagaaatcttcagtggattacctgaactgaaaggcatgggcataagaatgacagaaccagtatatctcagcccttcatttgacagtgtactgccccgttacttatttttacaaaatttgccatctgccttagtaagtcatgtactaaatcctcaacctggagagaagattctagacttgtgtgcagcacctggagggaaaacaacacacattgcagcactaatgcatgatcagggagaagttatagcactggataaaatcttcaacaaagtagaaaaaatcaaacagaatgccttattgttagggctgaattccatcagggcattttgttttgatggaacaaaggcggttaaacttgatatggtggaggacacagaaggagaacctccatttctaccagaatcctttgaccgaattcttctggatgcaccctgtagtggaatgggacagagaccaaacatggcctgtacttggtctgtgaaggaagtggcatcatatcagccattacagcgaaaactcttcactgcagcggttcagctgctgaagccagagggtgtgctggtttatagcacgtgcactataacactggccgaaaatgaagaacaggttgcctgggccctgacaaaatttccttgccttcagcttcagccccaggaaccgcagattggaggagaaggaatgaggggagctgggctctcatgtgaacagttgaaacagctgcagcgatttgatccatcggctgtgccattaccggacactgacatggactctcttagagaggccagaagagaagacatgttgcgtctggctaataaggactctataggtttttttattgcaaaatttgtaaaatgcaaaagcacataggagagggatggatgctcagaaatgaaaattccaaacatttgctgtctgtggtttttttttttttttttttttaaccaaagtgttgtcaggccaactgaatgatgatgtggttgctatggaaacagaaaaggctgccagctgttttaccagggatccagagacatagaggaagtagggggtggtatgagattatattttctgtttttaaaagattttttttttttatgtatttagtagagtataaagaaaagcagatgcctatagatgtctggagcatattttcatttgtgatctaatgttttaatttgtaaagtgtacaagtcatttttaatgttaaaaattagtgaatctaacaaaaggaataaattagcaatatttgaaaaaaaaaaaaaaaaaaaaaaaaaaaaaaaaaaaaa

SEQ ID NO: 1158 - protein, 469 aa, Homo sapiens
MSIFPKISLRPEVENYLKEGFMNKEIVTALGKQEAERKFETLLKHLSHPPSFTTVRVNTHLASVQHVKNLLLDELQKQFNGLSVPILQHPDLQDVLLIPVIGPRKNIKKQQCEAIVGAQCGNAVLRGAHVYAPGIVSASQFMKAGDVISVYSDIKGKCKKGAKEFDGTKVFLGNGISELSRKEIFSGLPELKGMGIRMTEPVYLSPSFDSVLPRYLFLQNLPSALVSHVLNPQPGEKILDLCAAPGGKTTHIAALMHDQGEVIALDKIFNKVEKIKQNALLLGLNSIRAFCFDGTKAVKLDMVEDTEGEPPFLPESFDRILLDAPCSGMGQRPNMACTWSVKEVASYQPLQRKLFTAAVQLLKPEGVLVYSTCTITLAENEEQVAWALTKFPCLQLQPQEPQIGGEGMRGAGLSCEQLKQLQRFDPSAVPLPDTDMDSLREARREDMLRLANKDSIGFFIAKFVKCKST

SEQ ID NO: 1159 - DNA, 3589 bp, Homo sapiens
aggtaggtgggtacagaccgaggggactacgggtcggcgttgggctcagtgggctcgaaacaaagggctgtccggtggggattcgtcgcggcgccttctgagtggtcgggtcgaggcttctcggcctagcagtgccctcgctgcgcgatctcaggcgggttctcctcggctccgcgcagcccgcgccgcggtgggggacccggcgcagcggcacctgctgccgagggaccccgcggcccgccccggtgctcgtgatggggctgatcttcgccaaactgtggagcctcttctgtaaccaagaacacaaagtaattatagtgggactggataatgcagggaaaaccaccattctttaccaattcttaatgaatgaagtggttcatacttctccaaccataggaagcaatgttgaagaaatagttgtgaagaacactcattttcttatgtgggatattggtggtcaggagtctctgcgatcatcctggaacacatattactcaaatacagagttcatcattcttgttgttgatagcattgacagggaacgactagctattacaaaagaagaattatacagaatgttggctcatgaggatttacggaaggctgcagtccttatctttgcaaataaacaggatatgaaagggtgtatgacagcagctgaaatctcgaaatacctcacccttagttcaattaaggatcatccatggcacattcaatcctgctgtgctctcacaggagaagggttatgccaaggtctagagtggatgacctcccggattggtgtgagataacttttttgcttgaaagagactgctctatttattctgtgacatgaacattttttcctagtacctttggctgctaaggcagcagcatgtttaatttataacaacacaaacctctgagagcaacacttgaatcaagtgcagctgaactggaacataaaagattttttcttaactttttttttttaacacactaatcttcagttggatgaatgtaatgtataactatgttttcagcaacaattcttctgtttattctaattaatcagtgactgccttgtaagaaatgtttgtcatatgcgtgatgtcttctgaaatattcttataaccttaatgaccaattgctttcaattcttgaccagcactccctcccaaccagagaattactggtttgatagagtagtcttggaaaccatcaggtactgcctgcagacttctccagcactaaatatatttgttccctctataaaccattcatctttcggacagaacttactgtaaagaaagaaatctgcctagaggatatatgtaaggaagattccacatcatgagtacttgccttttaactttcccccacattactgttgagtcatggaataatgtttaagttgttatttgcatggaaattaagtaggctgtttatttatctaaaggaatcaagtccactcttctgcctgcaacatttgttcaaaaactaaccaaggtaaaatatttatttgaaagcccaactttgatgttaaatattcttgaataaatctgttattttaagaatatcacattattcaatgcatataaaactatcagaagttagtaaatcataccagcactaaaaataagacaattggaatatattttagcatcagtttacaaacaactttattatcaacagaaattttagctcttttctttgcaagatatatcacagctgctttgggcagtagctgaagccgaagtatgaacagtccattttgtttcttaaaatttgaagtcgtgtctgtcatagcatttttactaccagcagtatgttacttaaaaaactacatggctttccttgaatttatttgacggtattatgtaatagacttgaaacaattgccatctttgtagttatgccttgggttctaaaatgttataggaaactgctgaattgaatcctagcttttagaatattaataggagactcaaagttaatattcttaacaacttaaaattaaaaaaagtcataatctatcaaaagtttatttattggatggcattaaaacatttttgaggcagttgtctaatatgaacaataatctaaacaatatattccttaaattaagaggaaagacaagtgtcgtatttcgatcctgtttattcaaatgtgtgattttgctgaaatgaaagggataaaatgaatacttagagaataatacttcatttttgcagtactttttaattttgataaaaaagatacaaagttcataatatcaaaatatgtgttcaaaattggtattttaattttaatatttttgtaagttgatttaaattttgctcttttttcaggtgtgcttggtttattatatttagtcaagttaatttagtcgaatgtggtaacatttttctgatttatctttagttggagcacacccttgaactgaacagtggccaaaggaaagctttctgggctttggaaagtagttgtttaactttgttttaagccgttttcttagtgattctgtatcaagtagaggataagtgtagtttaacttagtttttaatataacccataatcaagaacatgagcgaaaagcagacataaatcgatatggatggtttgtggtgtgtgtgggatgtgggggaattaagaaaatgccatttacctaagcacagtttgcctgaatttctgcttggttgtgttgtttaccgtaagtactgagggtagtttccctaagtctgtcctgagaaaaagcatacttagtactcctgtatttgttcttatgaaatgactatctgccttcttgtatctagtaagattggctggctcaattttcttctgtcaaattatatggttattttttatattaccacatcagcattatattaaaagtgtttttaatagttgattgtattttgccaactactagtatagactcaaatttgctatttaatttttaaaatacaatttattttgtaaatcctttaaaaaatatttggttagttttggattagaaatgatttatgttagccatgtgttgaagatgaaattggcatcagtgtagacggtgctgattgggaaaagttcatgattaggaaattcatgtaagactttttaagagtattttttaggttttcactcaatctttcctgtcacagtaacgtgaaaactgattattctttactccaagagaatgttttaacccaagcaagtatctaatactagagcattggttctgacattcattgtaaatcagtgaactgtaagatactgtctaaaaaatgtacatttgtaattagtgcctttattcatattttgaaataagttcttagttttatattatacctgttctttagaagtcatgttagcagctaattatttcagtgatgaaataatttgtgttttatatcccccttcacctccatgtattggttagcacagtttatagtaagtgaaaagcaagggacccacctacattaccttcaggagactgttctaccttttaatttgaaaacaaggaaattaaattttaacagaaatcttttaagtatgttataaccaaagtgttcaattatccttgcaagttcaaatacagcatttttct

SEQ ID NO: 1160 - protein, 179 aa, Homo sapiens
MGLIFAKLWSLFCNQEHKVIIVGLDNAGKTTILYQFLMNEVVHTSPTIGSNVEEIVVKNTHFLMWDIGGQESLRSSWNTYYSNTEFIILVVDSIDRERLAITKEELYRMLAHEDLRKAAVLIFANKQDMKGCMTAAEISKYLTLSSIKDHPWHIQSCCALTGEGLCQGLEWMTSRIGVR

SEQ ID NO: 1161 - DNA, 2997 bp, Homo sapiens
tttgtccaggaacgcctacgtttgtggcaggtggagacagcttattaggcagcctgctctcctcttatgatggccttggtccgggatcgcagggctcattatgtcatgagcatagttattagatgggttcactgcttttcctcctccttgagggggacctttggcacacgctgggaggccatgaaagccaaggccaccgagctgcgtgtctgctgcgcgcgtaggaagcgagaagctcgggaattcaagcccccgcaaatgcgcgggtccacgagacttaacatttcagatgatttaaagattggctttttcagcacagaccatgccactcaaactgattccagtgaaatactgtcagtaaaagaattgagttcatctacgcaaaagttagcacagatgatgaaatccctccaggtagattttgggttcctcaaacaattgcttcagttgaagtttgaggaccgactgaaagaggaatctttgagtctcttcaccattctgcatgacaggatcctagaaattgaaaagcattatcaacagaatgaggataagatgagaaaatccttcaatcagcagttagctgatgccatagctgttatcaaaggaatgtaccagccactgtgaaaccaaacattgagatactctggatgtgctgaaggtagcaaggtggaaagataagaagcagaggggtccttggtaatgtcatggagccatgaaagtaaccctggacttgccctgcctctggcctcttattcatgagataacaacccctcagtgtctaagccactgttagttggcttttcagttacttgcagctgaaaacatcccaggacagattgctctgctaacgatctctgtgactctgtgccaaactgtgtttccaaaggcatctgtgacactgtctcccacttacctgctcttgtgcaatgtttctctcccatcaagaggtggaatctgattcccctcccttgaatcagggctgcccttagtgacttgctgataaacacagaatgtggaggaagtgaagctgcgtgacttttaagttaacgtcaaaagaagtcttgcaagttcatccttattcactctgaatgtttcccctctacattgtccctccctgaattgagctaccatgctgacaaaagcccatgccatatggaagatctacatgtaggtactactgggtctccaggctcatctgagcccagcctttgagtcaccccagcccaggagtcaaaaatatgagtggagaagcgtccagatgactccagctaccagccatgtagactctttttatgtgaggtcacaggtcttacagaggagagataggccatccctgctgtgcttctactaattcccgactcattgaatttgtttttttttttctttgttttgctttttatttttgggtctttttttttttttttttttttttagagacagggatctcactgtctcccaggctggaatgtagggtgtgctcatagctcactgtagccttaaacttctggactcaagtgatcctctggcctcagcctcctgagtagctgggactacaggcatgtaccagcacacccagttaatttaaatatatatatatatatgacatgggatcttgctatgttatccaggctggtcttgaactcctgtcctcaagtaatcctcctgccttagcattccagagtgctaagattacaaccatgagccactgtgctggcctaattaatatttaatggaagaagacggaaggaagaaagagaaagagggaaggagggaaaatgagcattatctgtagcagttttatatatattgattttgtaaccaaaaatcttgctaaattcttgtgtttattttaataagttttctatagactctttggggctttctatgtaaacagttatgcaactgagaataaatattttttgtcacttcatttttcatccataaaccatgtaatcatttcagcagtggcctgtctggagcagctgctgcaaagatgccggctgcagcaggggagatatggccagggctgtacactctactaagctggcaggagccaggaacaagcaggagcggtgctcaccttctgagttggtgatgggggagctccacgctcctagaggcagctgcagctgcccagccatggctgcagacccaggcatccctgtgctcttgggggcctaggaagcccccctgctcccacaggctcggaagtgcctactcctgctgcctggcctctcctcactcctggcacccactctgattctgaagcaaagttgtggccaagcccaggcgctgttatgacccagccaggtgtgtgtgtgcttgggatggtgctgacacaccagccctctgctgccttggccccctccagagtttgggtgccaacaagcatgggagggaggccaagggggcactgagggtggcacagcacaggcctgcaggtgtcccttggcatgaacagcctgggcaccatgaacagcagcaggaagcgacaggctcccgagtggaaagggatgtgtcgctggtgaagccccaccttcaacccaggggtggcctgaagcctgggggccaggctgccagttccacagactggagtgagaacttatggtgcttttttcaggcccacctatggctgcccattgaccaatcagcatgagcttcctcccctctgaagcccataaaaaccctagactcagccagactctggcagaagtggggatgacctgcctgcagagaggagttatttgctgtggggtcttctctcagctaagagctgaacagatatcaggatgacctgcctgcagaaaggagctacccactgtgggtcttctcttagctgggagctgagcagatgctgggatgacctgcttgcagaaaggagctacccacttcagatctcctgcaagctgtactgttgctcaataaagcacctctttgccttaaaaaaaaaaaaaaaaaaaaaaaaaaaaaaaaaaaaaaaaaaaaaaaaaaaaaaaa

SEQ ID NO: 1162 - protein, 184 aa, Homo sapiens
MALVRDRRAHYVMSIVIRWVHCFSSSLRGTFGTRWEAMKAKATELRVCCARRKREAREFKPPQMRGSTRLNISDDLKIGFFSTDHATQTDSSEILSVKELSSSTQKLAQMMKSLQVDFGFLKQLLQLKFEDRLKEESLSLFTILHDRILEIEKHYQQNEDKMRKSFNQQLADAIAVIKGMYQPL

SEQ ID NO: 1163 - DNA, 3512 bp, Homo sapiens
atgccggaagctttcctgccacgcaagctttccgagcatgctaactcgccccaagcagctcccatcccgcagcatccactgcagccgctgaggagagtggcgcagcgcagaaaccagtgcccagtgcccaggtgggggaagcggtccgtgggagtcacgtgggcgggaggcccagccaggatcccaggactgctcaggcctccgcgcccccggcctcgccccgcccgcgcgcgctcgcgcgccgagggccacgcccgtgacgtcggcggagcgcgtccccagcggccgccgcgggccgaagcagctgcagcgggcgcggcgccccgggtctgcgggccgagcgcaccggcaggggtcgagctcgcgtcccgtccccgcccccctgcgctgtggcgcagcaggaatttggccgggacccgggcgctattcgcggctgctgactcgcggcggccggctgcctttcgctcatctctattctggggccgttgggtcaccgcgctccgccggccccctcccccgggcccggagggtgtgtcccccgctccggggctcgccgcgcctataaggggccgagcggcgggcagggacatgcagctctacagcagcgtctgcacccactaccccgccggggccccgggtcccacggccgccgcccccgcgccacccgccgccgctacccccttcaaggtctcgctgcagcccccgggagccgccggcgccgcgcccgagcccgagaccggtgagtgccagcccgccgcggccgccgagcaccgggaagccgccgctgtccccgccgccaagatgcccgccttctcctcctgcttcgaggtggtgtccggggccgccgcgcccgcctccgccgccgccggcccgcccggcgcgtcctgcaagccgccgctgccgccgcactacacgtccaccgcacagatcaccgtgcgggccctgggcgccgacaggctcctgctgcacgggcccgatcccgttcccggcgccgcgggctccgccgctgccccgcgcggccgctgcctcctgctcgccccggcgcccgcagccccggtcccgccgcggcggggctcctcggcctggctcctggaggagctgctgcggcccgactgccccgagcccgcgggcttggacgcgacacgggaggggcccgatcggaacttccgactgagcgagcaccgccaggccctggccgccgccaagcaccgaggccccgcggcgaccccggggagccccgatcccggccccggtccgtggggcgaagagcacttggcggagaggggccccaggggctgggagaggggcggcgatcgctgcgacgcgcccggtggggacgcggcgcggaggcccgacccagaggccgaggcaccccccgccgggagcatcgaggccgccccgagtagtgcggcggagccggtgatcgtctccaggtcggatcccagagacgagaagctggccctatacctggccgaggtggagaagcaggacaagtatctgcggcagaggaataagtaccgattccacatcattccagacggcaactgcctctaccgagctgtcagcaagacggtgtatggggaccagagcctgcaccgggagttgagggagcagacggtgcactacatcgccgaccatctcgaccacttcagccccctgattgagggcgacgtgggggagtttatcatcgctgctgcccaagacggggcatgggccgggtacccggagttgctggccatggggcagatgctgaatgtgaatatccatttaactactggagggaggctggagagtcccacggtgtctaccatgattcattatttgggcccagaggattccctgaggcctagtatttggctcagttggctcagtaacggacactatgatgctgtatttgatcactcctatcctaacccagagtacgacaactggtgcaaacaaactcaagtgcaaaggaaacgcgacgaagaacttgccaaatctatggccatatccttgtctaaaatgtatattgaacaaaatgcatgctcttgaaatgtctcaaaaccttacaccctgggaataattgcatatataacttgtgtttggagaatcacatgaactttaatcagggtaatagcactttcaaacttgctagtagattttactgtaggtgtaatgccttaatcatctttttgaatgttttctcagagctggaggttgctgggcacctaaatgatgtttcatgatagctttgggtgattttactgctatttataatttgctgtataaagtgagcattacttaatttgcaagctgatttctcacagtgtaaatttgttcattcctggtagtctattttctataaaaatgtatttttgcacaacatttttaaaaactggtgtaccttcatctatgacgtgttccattttgacaaacagctttcaggcgtaaatccagagaagtgctttatatgaaatgtattattttgaacagagtttgtgatttggtagttattttatgttgttgaaatttgaatttcacaattcttagataattatttcaaatggatattgatgcattcttgttaccagatgtttggcccattccattttgatgaaacagagctgttgttttggaagtcattatttttctagaaatggcgaatcttttaaagaaaattacttaatggaaggttgtgggaaggtgtttttttgtgttttttttttggtttttgttttgtttttcctcttttaagggatagtagcaggtcttacttgaatgaaagtctgatatttgctgatggcagaatgattattctgtaccctggttgatgtgtagagtagattgtctggtgctctcagttgtttttatttacatttgtcacgttgttgtaagagaatgttaacatggtataaaactctgtgacaagataagcctcctgctttatataacttcttgaatccagctaagagatttataaactaatggcataaatgtctggagccaaccttggcagttatagcaggagaacactgtcttaatatttctttacattctttcaaaaggcaaaataggattgccctgtattgatgtagaaatgtctgtaaacagagcttgtatggtttgctgggtcaaacaatgtttccaacttaaaatcaatctcattgccactttaactacttttagtcatatttattaagtaatgcagtttgtactttttttattttgtaacattttgtgatttttttgtacaaaactgtatttgtacaatagagcaattcccagctgatggaatgaatgaataaaatgcaaaattatacttttacaatgcctttttggatagagtggtttttaaattgtgatgtttgtaggaaactttcttgcatgtatgcatgtacacaattttttttttccataaagatgccacagcaatagagaggtttcctaaattatcacatgaagaggataggctaatcatgagtaatttcaaaggataagtctgaataaaatataatttaaaagtggagtaa

SEQ ID NO: 1164 - protein, 677 aa, Homo sapiens
MPEAFLPRKLSEHANSPQAAPIPQHPLQPLRRVAQRRNQCPVPRWGKRSVGVTWAGGPARIPGLLRPPRPRPRPARARSRAEGHARDVGGARPQRPPRAEAAAAGAAPRVCGPSAPAGVELASRPRPPALWRSRNLAGTRALFAAADSRRPAAFRSSLFWGRWVTALRRPPPPGPEGVSPAPGLAAPIRGRAAGRDMQLYSSVCTHYPAGAPGPTAAAPAPPAAATPFKVSLQPPGAAGAAPEPETGECQPAAAAEHREAAAVPAAKMPAFSSCFEVVSGAAAPASAAAGPPGASCKPPLPPHYTSTAQITVRALGADRLLLHGPDPVPGAAGSAAAPRGRCLLLAPAPAAPVPPRRGSSAWLLEELLRPDCPEPAGLDATREGPDRNFRLSEHRQALAAAKHRGPAATPGSPDPGPGPWGEEHLAERGPRGWERGGDRCDAPGGDAARRPDPEAEAPPAGSIEAAPSSAAEPVIVSRSDPRDEKLALYLAEVEKQDKYLRQRNKYRFHIIPDGNCLYRAVSKTVYGDQSLHRELREQTVHYIADHLDHFSPLIEGDVGEFIIAAAQDGAWAGYPELLAMGQMLNVNIHLTTGGRLESPTVSTMIHYLGPEDSLRPSIWLSWLSNGHYDAVFDHSYPNPEYDNWCKQTQVQRKRDEELAKSMAISLSKMYIEQNACS

SEQ ID NO: 1165 - DNA, 3572 bp, Homo sapiens
atacggtgcaacgggtccgcgggaatcttggatgcgcggaggtcccgagaccaggtgcgtgtgctaagctcaggtctgagcacggtggatcccatgggtgtggctctgaggaaattgacgcagtggactgctgccggacatggaactggaatcctcgaaatcacccctctaaatgaagcgatattgaaagaaattattgtgtttgtggagagttttatctataaacatcctcaagaggcaaaatttgtttttgtggaaccacttgaatggaacacaagtttggcgccctcagcatttgaatcaggttatgttgtcagtgaaacaacagtcaaatcagaagaagttgataaaaatggacagcctttgctatttctctctgtaccacaaattaaaattaggagctttgggcagctgtcacgcttgttacttattgccaaaactgggaagttgaaggaagcccaagcatgtgttgaagctaacagagaccccatagtaaaaatcctgggctctgattataatacaatgaaagaaaactcaattgcattaaatattcttggcaaaattaccagagatgatgatcctgaaagtgaaattaagatgaagattgctatgctgcttaagcaattggatctgcacctcctcaatcattctctaaaacatatttcattagaaataagtttaagtcccatgacggtgaagaaggatatagaactgctcaaacgtttctcaggaaaaggaaaccaaacagtcttggaatctattgaatatacctcagattatgaattttcaaatggatgtcgagccccaccgtggagacaaattcgtggggaaatttgttatgtgctggtgaaacctcacgatggtgagactctgtgcattacttgcagtgcaggaggagtatttttaaatggtggcaaaacagatgatgaaggggacgttaattatgagagaaaaggttcaatttataaaaaccttgtcacatttttaagagaaaaatcaccaaaattttcagaaaatatgtctaaattgggaattagcttcagtgaagaccagcaaaaggaaaaggatcagcttggcaaagcccccaagaaggaagaagcagctgccctccgcaaagacatttctggttcagacaaaaggtcactggagaagaaccaaattaatttttggaggaatcaaatgaccaagagatgggaaccaagcttaaactggaagaccactgttaattacaaaggcaaaggctcagcaaaagaaatccaagaggacaaacacacaggaaaacttgaaaaaccaagaccatctgtttcacacggaagagcacaattacttcggaagagtgctgaaaagattgaggaaactgttagcgatagctcctcagaaagtgaggaagatgaagaaccacctgaccatcgtcaggaagcaagtgcagatttgccatcagaatattggcaaattcagaagctggtgaaatatttaaagggaggaaatcaaacagctacagtgattgcgttgtgttcaatgagggatttcagcttagctcaagaaacctgccagttggccatcagagatgttggaggcctggaagtgctgataaatttgcttgaaaccgatgaagtcaaatgtaagattggttcattaaaaatactgaaggaaatcagtcataatcctcaaatcagacagaatattgttgaccttgggggcttaccaattatggtgaatatacttgattctccacacaagagtctaaaatgtttggcagccgagactatcgcgaatgttgccaagtttaaaagagcacggcgggtggtgaggcagcacgggggtatcaccaaactggttgctctactagactgtgcacatgattccacaaaacctgcccaatcgagtctgtatgaggccagagacgtggaagtggctcgctgtggggcactggccctgtggagctgcagtaagagtcatacgaataaagaagccatccgcaaagctgggggcattcctctgttggctcggctgctgaagacttctcatgaaaacatgctaattccagtggtggggacattgcaagagtgtgcatcagaggaaaactaccgggctgcaatcaaagcagaaaggatcattgaaaaccttgtcaagaacctaaatagtgagaatgagcagctgcaggagcactgcgccatggccatttaccagtgtgctgaagataaggaaacccgggacctcgttaggctgcacggaggacttaagcccttggccagtctactcaataacactgacaataaagagcggttagctgctgtcacaggggctatatggaaatgttccatcagcaaagagaatgttaccaagtttcgggaatacaaagccattgaaaccttggtgggacttctaacagatcagcctgaagaagtacttgtgaatgtggttggggccttgggagaatgctgccaagaacgtgaaaaccgagtcattgtccggaaatgtggtggcattcaaccacttgtgaacctccttgttggaataaaccaagctcttcttgtgaatgttacaaaagcagttggtgcttgtgcagtagaacctgaaagtatgatgataattgatcgcttagatggagttcgtttgttgtggtccctgctgaaaaatcctcacccagacgtgaaggccagcgcagcatgggcactctgtccatgcatcaaaaatgcaaaggatgctggggaaatggttcgttcctttgttggtggtttggaacttattgtcaatttactgaaatcagataacaaagaagttctggcaagtgtatgtgctgccattaccaacatagcaaaagatcaagaaaatttagctgttatcacagatcatggagttgttcctttattgtccaaactggcaaatacaaataacaataaattgagacatcatctagcagaagctatttcacgttgctgtatgtggggcaggaatagagtggccttcggtgagcacaaagcagtggctccactagtgcgttatctgaaatcaaatgacaccaacgtgcatcgggcgacagctcaggccttgtaccaactctcagaagacgccgataactgcatcaccatgcatgagaatggtgcagtaaagcttctactggatatggttgggtcccctgaccaggatctccaggaagctgcagctggttgtatatccaatatccgcaggctggctcttgctacagagaaggcaagatacacttgaaatttaaatggacattacaagctatcaaattctacatgacacaggacatgtcactcccatggccagaaagcctaaattgggaaacagttgttagcaaaccctttcaaccatctaaatgaaaacacacaaattgaaaatgcacagaatgtttttcatctgaaaattgcatggagacttttgtttctatttaatgttttcgagatatgacatgtgataagatggaaagccaataaacctgtgataagtttctaagaatatgagaatatacgtatatgatgtatttttagttcagtgatgcttttgtatttgtggcgattttaataaaaaggatatggccttcccaa

SEQ ID NO: 1166 - protein, 1044 aa, Homo sapiens
MGVALRKLTQWTAAGHGTGILEITPLNEAILKEIIVFVESFIYKHPQEAKFVFVEPLEWNTSLAPSAFESGYVVSETTVKSEEVDKNGQPLLFLSVPQIKIRSFGQLSRLLLIAKTGKLKEAQACVEANRDPIVKILGSDYNTMKENSIALNILGKITRDDDPESEIKMKIAMLLKQLDLHLLNHSLKHISLEISLSPMTVKKDIELLKRFSGKGNQTVLESIEYTSDYEFSNGCRAPPWRQIRGEICYVLVKPHDGETLCITCSAGGVFLNGGKTDDEGDVNYERKGSIYKNLVTFLREKSPKFSENMSKLGISFSEDQQKEKDQLGKAPKKEEAAALRKDISGSDKRSLEKNQINFWRNQMTKRWEPSLNWKTTVNYKGKGSAKEIQEDKHTGKLEKPRPSVSHGRAQLLRKSAEKIEETVSDSSSESEEDEEPPDHRQEASADLPSEYWQIQKLVKYLKGGNQTATVIALCSMRDFSLAQETCQLAIRDVGGLEVLINLLETDEVKCKIGSLKILKEISHNPQIRQNIVDLGGLPIMVNILDSPHKSLKCLAAETIANVAKFKRARRVVRQHGGITKLVALLDCAHDSTKPAQSSLYEARDVEVARCGALALWSCSKSHTNKEAIRKAGGIPLLARLLKTSHENMLIPVVGTLQECASEENYRAAIKAERIIENLVKNLNSENEQLQEHCAMAIYQCAEDKETRDLVRLHGGLKPLASLLNNTDNKERLAAVTGAIWKCSISKENVTKFREYKAIETLVGLLTDQPEEVLVNVVGALGECCQERENRVIVRKCGGIQPLVNLLVGINQALLVNVTKAVGACAVEPESMMIIDRLDGVRLLWSLLKNPHPDVKASAAWALCPCIKNAKDAGEMVRSFVGGLELIVNLLKSDNKEVLASVCAAITNIAKDQENLAVITDHGVVPLLSKLANTNNNKLRHHLAEAISRCCMWGRNRVAFGEHKAVAPLVRYLKSNDTNVHRATAQALYQLSEDADNCITMHENGAVKLLLDMVGSPDQDLQEAAAGCISNIRRLALATEKARYT

SEQ ID NO: 1167 - DNA, 5207 bp, Homo sapiens
aatggaactaacaggaaccacctgtgcacttccttttacaggaatgttcataaacagcaggttctcctaggctttgaacaaaatttagcttctccaaggccaaaagcctcattgtgaagagaaagaaaggtatagcagtcttggcagttgctgaactgaattcctggctgatttccttactgcataaactcaactgctctcactgaggtcgtcattaagtcctgtgtgtgtttgggcaggccgacttgatttacagccagcactccactgcggaaacggcttacaaaatatacagatcttggtagacaacgtggctgcaggctgttgaattggaattccctgtggctgtccgaaggcagggtgtccggagagcggtgggctgacctgttcctacaccttgcatcatgccagctttgtcaacgggatctgggagtgacactggtctgtatgagctgttggctgctctgccagcccagctgcagccacatgtggatagccaggaagacctgaccttcctctgggatatgtttggtgaaaaaagcctgcattcattggtaaagattcatgaaaaactacactactatgagaagcagagtccggtgcccattctccatggtgcggcggccttggccgatgatctggccgaagagcttcagaacaagccattaaacagtgagatcagagagctgttgaaactactgtcaaaacccaatgtgaaggctttgctctctgtacatgatactgtggctcagaagaattacgacccagtgttgcctcctatgcctgaagatattgacgatgaggaagactcagtaaaaataatccgtctggtcaaaaatagagaaccactgggagctaccattaagaaggatgaacagaccggggcgatcattgtggccagaatcatgagaggaggagctgcagatagaagtggtcttattcatgttggtgatgaacttagggaagtcaacgggataccagtggaggataaaaggcctgaggaaataatacagattttggctcagtctcagggagcaattacatttaagattatacccggcagcaaagaggagacaccatcaaaagaaggcaagatgtttatcaaagccctctttgactataatcctaatgaggataaggcaattccatgtaaggaagctgggctttctttcaaaaagggagatattcttcagattatgagccaagatgatgcaacttggtggcaagcgaaacacgaagctgatgccaaccccagggcaggcttgatcccctcaaagcatttccaggaaaggagattggctttgagacgaccagaaatattggttcagcccctgaaagtttccaacaggaaatcatctggttttagaaaaagttttcgtcttagtagaaaagataagaaaacaaataaatccatgtatgaatgcaagaagagtgatcagtacgacacagctgacgtacccacatacgaagaagtgacaccgtatcggcgacaaactaatgaaaaatacagactcgttgtcttggttggtcccgtgggagtagggctgaatgaactgaaacgaaagctgctgatcagtgacacccagcactatggcgtgacagtgccccataccaccagagcaagaagaagccaggagagtgatggtgttgaatacattttcatttccaagcatttgtttgagacagatgtacaaaataacaagtttattgaatatggagaatataaaaacaactactacggcacaagtatagactcagttcggtctgtccttgctaaaaacaaagtttgtttgttggatgttcagcctcatacagtgaagcatttaaggacactagaatttaagccctatgtgatatttataaagcctccatcaatagagcgtttgagagaaacaagaaaaaatgcaaagattatttcaagcagagatgaccaaggtgctgcaaaacccttcacagaagaagattttcaagaaatgattaaatctgcacagataatggaaagtcaatatggtcatctttttgacaaaattataataaatgatgacctcactgtggcattcaatgagctcaaaacaacttttgacaaattagagacagagacccattgggtgccagtgagctggttacattcataactaagagaaatttccataattgtctttttctatagagtgcatgatgaaatcaattacagttttggtagtagggtttttaaatctatatcactgtcatagatgtacaatcttggttcaagttgaatgctggttttgtttgtatctttttacagccttatttcaaacgccatgtgttagtataagatccgaaatcaaaatatgcacagtactgtattctaagcaaaacctcaaaccttctcgttgtcttcaataccgctctatctccaagatgaggctgaaattttcagagagacttagctagaggcttagtatgtatgggagttcagcgcttctgctggtctcaggtgtggctgctgctgtcgagtttgaatgttagctgttgaaggtatcaattcagcagccatgagcagctccagacagacaggtgagctctgctgtttctgggtggatcatcacagatttagccgggcaggcagtaaggtgtcctcttactattcaaaaagtgtagactttcttacatattcgcaatacgttcacagtgtgtgcattttaaaataattcttaaaggagtaactgaaattttaccttgagtgaatggccttcataatatagcttgagaagtccttttgagtacctgtcagtgactcaacaacatttaataagggaaagtagacttttaacagttattatatatgtaacgaaaagcctttcctttgggattaatataagtaagaatggtagccttgtggcaagaaatgattacaaaggatatttttatttgtaattcctcagaagacaatttatgaagtcacccaaaatgttattttagctggttttggatttttccaataaattagaagaaggatttctattctaaaacatgtaaaacctgttttacatattactgatacaattaaagattatttttcatctatgtgcaatagatcacccctctttaaattgctctaagatttattttagaaaacttttcatgtgatgttatttctttgtcatcaaaatgcttgttaacactgtccagacaccatcctaaccttgccattgttaaagaagtttaggaaagactcttatattgtaaatatttagatgggttctctcacttttctttgatactactgattttcagcaagtgaattatataattcaaaatgctagaaatgtctatccgttctataagagagcatatcctgccgttcttgcatgcagtgaagccctgcccgtcgaaaatcattgcatctgtgactttcaaagtggaaaaaaaaatgttatttttttgttgatttgtaaagagagtttaaatgtcatgtgaaaaaaaatagaatgtagtaaaattctatatatttatgaaatattttaaaggcatatttttttaaatatcaaacggggctattcataaaataaactgattgtatgtcaagatgtcctaatttaaaagagtagttttataaatcatggtcaacattccatgtaaatatttgagctttacaaagatagatccaagtgtgcgatctgtgcactgcacatttgatagcattattcactggttttccttcatacttgtcaagttcatattagaagcagagacaaaaaccactccaatggccttgacacatagtcacaccaaaatagataatcagactaagtattatataacaacgtgatccagacagtgagttctaagtgtattaattaaatagcaaaaaattttgtttttaaaaaatgaaagagggagggttgccaacctgaagtcttaagtagattgtttgggtagcatatttccttctttgaacattgtctgaaattttctataaatcaagacttcttgtacaaagaatgatgggacatatgtaataattcaggcaatcacctgagtaatttaggcagtccaaattctttaccctgaaatacccacattttaaaaaaattgcagataattgcttcagttatttactttggggacagagatatagtgtaaagtgggagaaactgagtccttttttggtggtggtaataataagatgttataaaaatataacattttaaaaaagaaaggtccagaccttaagcgcagagctagaacaatattttttaaataatggggggaaaagggggcactttggtaattttagaaatcaggtagtatacttttttttttttttttgagacagggtcttgccatgttgctcaggctggtcttgaactcctgggctcaagcaatcctcctgccttggcctcccaaagtgctgggattacaggcatgatccaccgtgcccagccggtagacgtggtcttaaaaacagtgtttacatggccatcttgatgcttagaaagataattgattaaaatttaataaggcagggccaactccgagagttcattgacaacggcagcaaaaaggccctgaattctgtactttcttcccccagcctccttctccagcaaggagaatagcactcctccctccagaagccagctccctaagttggagccactatgtaagagaagaggaacgttcactttttaaaattcatatatttaaaaatcaagaccaaaaagtaaattctgtactcctattattgactgtagtcaatcaaacataaaaaggtgaaagtaaaatttaattttttacccttattttactgaccaatatggaagttcttggtatctttaaggctgaccttcctggtattgtgtaatgattgaatgtatctaaactgtaataatttgaaactgacaaacataaccttctcagacttacaaaactatgttctttctaaagatacagatttttattattttattttgactaggaaggatttataaataaatgtaatgaaaaatctttgatcttaataaagtaccttcaaacagtgtgtgtacttacttgaaaattgtttttgcacttggatattctattttattatactactattgtgatctattccattatactatttcccatggtagaacaaattatattttctactgtgatatgaagtgatgtaattgaacttgccatgtctaaaattaaatttcatatttttttcaatcaaa

SEQ ID NO: 1168 - protein, 576 aa, Homo sapiens
MPALSTGSGSDTGLYELLAALPAQLQPHVDSQEDLTFLWDMFGEKSLHSLVKIHEKLHYYEKQSPVPILHGAAALADDLAEELQNKPLNSEIRELLKLLSKPNVKALLSVHDTVAQKNYDPVLPPMPEDIDDEEDSVKIIRLVKNREPLGATIKKDEQTGAIIVARIMRGGAADRSGLIHVGDELREVNGIPVEDKRPEEIIQILAQSQGAITFKIIPGSKEETPSKEGKMFIKALFDYNPNEDKAIPCKEAGLSFKKGDILQIMSQDDATWWQAKHEADANPRAGLIPSKHFQERRLALRRPEILVQPLKVSNRKSSGFRKSFRLSRKDKKTNKSMYECKKSDQYDTADVPTYEEVTPYRRQTNEKYRLVVLVGPVGVGLNELKRKLLISDTQHYGVTVPHTTRARRSQESDGVEYIFISKHLFETDVQNNKFIEYGEYKNNYYGTSIDSVRSVLAKNKVCLLDVQPHTVKHLRTLEFKPYVIFIKPPSIERLRETRKNAKIISSRDDQGAAKPFTEEDFQEMIKSAQIMESQYGHLFDKIIINDDLTVAFNELKTTFDKLETETHWVPVSWLHS

SEQ ID NO: 1169 - DNA, 3952 bp, Homo sapiens
attttagacacaagcgagaggatcatggcggatggccccaggtgtaagcgcagaaagcaggcgaacccgcggcgcaataacgttacaaattataatactgtggtagaaacaaattcagattcagatgatgaagacaaactgcatattgtggaagaagaaagtgttacagatgcagctgactgtgaaggtgtaccagaggatgacctgccaacagaccagacagtgttaccagggaggagcagtgaaagagaagggaatgctaagaactgctgggaggatgacagaaaggaagggcaagaaatcctggggcctgaagctcaggcagatgaagcaggatgtacagtaaaagatgatgaatgcgagtcagatgcagaaaatgagcaaaaccatgatcctaatgttgaagagtttctacaacaacaagacactgctgtcatttttcctgaggcacctgaagaggaccagaggcagggcacaccagaagccagtggtcatgatgaaaatggaacaccagatgcattttcacaattactcacctgtccatattgtgatagaggctataaacgctttacctctctgaaagaacacattaaatatcgtcatgaaaagaatgaagataactttagttgctccctgtgcagttacacctttgcatacagaacccaacttgaacgtcacatgacatcacataaatcaggaagagatcaaagacatgtgacgcagtctgggtgtaatcgtaaattcaaatgcactgagtgtggaaaagctttcaaatacaaacatcacctaaaagagcacttaagaattcacagtggagagaagccatatgaatgcccaaactgcaagaaacgcttttcccattctggctcctatagctcacacataagcagtaagaaatgtatcagcttgatacctgtgaatgggcgaccaagaacaggactcaagacatctcagtgttcttcaccgtctctttcagcatcaccaggcagtcccacacgaccacagatacggcaaaagatagagaataaaccccttcaagaacaactttctgttaaccaaattaaaactgaacctgtggattatgaattcaaacccatagtggttgcttcaggaatcaactgttcaacccctttacaaaatggggttttcactggtggtggcccattacaggcaaccagttctcctcagggcatggtgcaagctgttgttctgccaacagttggtttggtgtctcccataagtatcaatttaagtgatattcagaatgtacttaaagtggcgatagatggtaatgtaataaggcaagtgttggagaataatcaagccaatcttgcatccaaagaacaagaaacaatcaatgcttcacccatacaacaaggtggccattctgttatttcagccatcagtcttcctttggttgatcaagatggaacaaccaaaattatcatcaactacagtcttgagcagcctagccaacttcaagttgttcctcaaaatttaaaaaaagaaaatccagtcgctacaaacagttgtaaaagtgaaaagttaccagaagatcttactgttaagtctgagaaggacaaaagctttgaagggggggtgaatgatagcacttgtcttctgtgtgatgattgtccaggagatattaatgcacttccagaattaaagcactatgacctaaagcagcctactcagcctcctccactccctgcagcagaagctgagaagcctgagtcctctgtttcatcagctactggagatggcaatttgtctcctagtcagccacctttaaagaacctcttgtctctcctaaaagcatattatgctttgaatgcacaaccaagtgcagaagagctctcaaaaattgctgattcagtaaacctaccactggatgtagtaaaaaagtggtttgaaaagatgcaagctggacagatttcagtgcagtcttctgaaccatcttctcctgaaccaggcaaagtaaatacccctgccaagaacaatgatcagcctcaatctgcaaatgcaaatgaaccccaggacagcacagtaaatctacaaagtcctttgaagatgactaactccccagttttaccagtgggatcaaccaccaatggttccagaagtagtacaccatccccatcacctctaaacctttcctcatccagaaatacacagggttacttgtacacagctgagggtgcacaagaagagccacaagtagaacctcttgatctttcactaccaaagcaacagggagaattattagaaaggtcaactatcactagtgtttaccagaacagtgtttattctgtccaggaagaacccttgaacttgtcttgcgcaaaaaaggagccacaaaaggacagttgtgttacagactcagaaccagttgtaaatgtaatcccaccaagtgccaaccccataaatatcgctatacctacagtcactgcccagttacccacaatcgtggccattgctgaccagaacagtgttccatgcttaagagcgctagctgccaataagcaaacgattctgattccccaggtggcatacacctactcaactacggtcagccctgcagtccaagaaccacccttgaaagtgatccagccaaatggaaatcaggatgaaagacaagatactagctcagaaggagtatcaaatgtagaggatcagaatgactctgattctacaccgcccaaaaagaaaatgcggaagacagaaaatggaatgtatgcttgtgatttgtgtgacaagatattccaaaagagtagttcattattgagacataaatatgaacacacaggtaaaagacctcatgagtgtggaatctgtaaaaaggcatttaaacacaaacatcatttgattgaacacatgcgattacattctggagaaaagccctatcaatgtgacaaatgtggaaagcgcttctcacactctgggtcttattctcaacacatgaatcatcgctactcctactgtaagagagaagcggaagaacgtgacagcacagagcaggaagaggcagggcctgaaatcctctcgaatgagcacgtgggtgccagggcgtctccctcacagggcgactcggacgagagagagagtttgacaagggaagaggatgaagacagtgaaaaagaggaagaggaggaggataaagagatggaagaattgcaggaagaaaaagaatgtgaaaaaccacaaggggatgaggaagaggaggaggaggaggaagaagtggaagaagaagaggtagaagaggcagagaatgagggagaagaagcaaaaactgaaggtctgatgaaggatgacagggctgaaagtcaagcaagcagcttaggacaaaaagtaggcgagagtagtgagcaagtgtctgaagaaaagacaaatgaagcctaatcgtttttctagaaggaaaataaattctaattgataatgaatttcgttcaatattatccttgcttttcatggaaacacagtaacctgtatgctgtgattcctgttcactactgtgtaaagtaaaaactaaaaaaatacaaaatacaaaacacacacacacacacacacacacacacacacacacacacacacaaaataaatccgggtgtgcctgaacctcagacctagtaatttttcatgcagttttcaaagttaggaacaagtttgtaacatgcagcagattagaaaaccttaatgactcagagagcaacaatacaagaggttaaaggaagctgattaattagatatgcatctggcattgttttatcttatcagtattatcactcttatgttggtttattcttaagctgtacaattgggagaaattttataattttttattggtaaacatatgctaaatccgcttcagtattttattatgttttttaaaatgtgagaacttctgcactacaaaattcccttcacagagaagtataatgtagttccggaattc

SEQ ID NO: 1170 - protein, 1124 aa, Homo sapiens
MADGPRCKRRKQANPRRNNVTNYNTVVETNSDSDDEDKLHIVEEESVTDAADCEGVPEDDLPTDQTVLPGRSSEREGNAKNCWEDDRKEGQEILGPEAQADEAGCTVKDDECESDAENEQNHDPNVEEFLQQQDTAVIFPEAPEEDQRQGTPEASGHDENGTPDAFSQLLTCPYCDRGYKRFTSLKEHIKYRHEKNEDNFSCSLCSYTFAYRTQLERHMTSHKSGRDQRHVTQSGCNRKFKCTECGKAFKYKHHLKEHLRIHSGEKPYECPNCKKRFSHSGSYSSHISSKKCISLIPVNGRPRTGLKTSQCSSPSLSASPGSPTRPQIRQKIENKPLQEQLSVNQIKTEPVDYEFKPIVVASGINCSTPLQNGVFTGGGPLQATSSPQGMVQAVVLPTVGLVSPISINLSDIQNVLKVAIDGNVIRQVLENNQANLASKEQETINASPIQQGGHSVISAISLPLVDQDGTTKIIINYSLEQPSQLQVVPQNLKKENPVATNSCKSEKLPEDLTVKSEKDKSFEGGVNDSTCLLCDDCPGDINALPELKHYDLKQPTQPPPLPAAEAEKPESSVSSATGDGNLSPSQPPLKNLLSLLKAYYALNAQPSAEELSKIADSVNLPLDVVKKWFEKMQAGQISVQSSEPSSPEPGKVNTPAKNNDQPQSANANEPQDSTVNLQSPLKMTNSPVLPVGSTTNGSRSSTPSPSPLNLSSSRNTQGYLYTAEGAQEEPQVEPLDLSLPKQQGELLERSTITSVYQNSVYSVQEEPLNLSCAKKEPQKDSCVTDSEPVVNVIPPSANPINIAIPTVTAQLPTIVAIADQNSVPCLRALAANKQTILIPQVAYTYSTTVSPAVQEPPLKVIQPNGNQDERQDTSSEGVSNVEDQNDSDSTPPKKKMRKTENGMYACDLCDKIFQKSSSLLRHKYEHTGKRPHECGICKKAFKHKHHLIEHMRLHSGEKPYQCDKCGKRFSHSGSYSQHMNHRYSYCKREAEERDSTEQEEAGPEILSNEHVGARASPSQGDSDERESLTREEDEDSEKEEEEEDKEMEELQEEKECEKPQGDEEEEEEEEEVEEEEVEEAENEGEEAKTEGLMKDDRAESQASSLGQKVGESSEQVSEEKTNEA

SEQ ID NO: 1171 - DNA, 420 bp, Homo sapiens
atgtacaacccctggcaggtgggagcctccctggcgccagctcgggcagggccacgccccttcccaactccccgcgctcggcctccggactgctcagggggccacgccccttccggattccccgcgctaggcctccggaccgctcagcggccccgccccttctcgagttctccgcgctcggcctccggacggctcagggggccacgccccgtcgcccggggccccgcccactcctcaagccccacgggactcccagcctacctccctcccgctgccgcactggactcccagacctcggcaccaaccgtatctcctgttactcgccccagggtggttgcccggggaaaaactccaagggtttcactggctggcctggaaaccctttcatctttgctccatcagcagcagctctttgattga

SEQ ID NO: 1172 - protein, 139 aa, Homo sapiens
MYNPWQVGASLAPARAGPRPFPTPRARPPDCSGGHAPSGFPALGLRTAQRPRPFSSSPRSASGRLRGPRPVARGPAHSSSPTGLPAYLPPAAALDSQTSAPTVSPVTRPRVVARGKTPRVSLAGLETLSSLLHQQQLFD

SEQ ID NO: 1173 - DNA, 4225 bp, Homo sapiens
ggagtcgcggctgcgagcaggttagagttacttgttattggtaaatagccactatggaggctaaggaccagaagaaacacagaaagaaaaacagtggacccaaagctgcaaagaaaaagaagcggcttctgcaggatctccagctaggagacgaagaagatgcccggaagagaaatcccaaagcttttgcagttcagtctgctgtgcggatggctcgatcctttcacaggactcaggatttgaagacaaaaaagcatcatattccagtggttgatcgaactccactagagcccccaccaatagtggtagtggtgatgggacctccaaaagttggaaagagcactttgatacaatgcctcattcggaactttacccggcagaagttgaccgagatcagaggccctgtgacgattgtgtcaggtaaaaagcgcagactcaccattattgaatgtgggtgtgacattaacatgatgattgatctggctaaagtagcagatctggtactgatgcttatagatgccagctttgggtttgaaatggaaacgtttgagtttctaaacatctgtcaagtacatggctttcctaaaattatgggagttctcacccacctcgactccttcaagcataataagcaactgaagaagacaaagaagcgattaaaacacaggttctggacggaagtttacccgggtgccaagctgttctacctttctggaatggtgcatggagaatatcaaaaccaagaaatccacaatctgggccgttttattacagttatgaagtttaggcctctcacatggcaaacttctcacccttatatcctggcagacaggatggaagatttgacaaacccagaggatatccgaacaaacatcaaatgtgaccggaaggtgtcactttatggttatttaagaggagcacacttgaaaaataaaagccaaattcacatgccaggggtaggagattttgccgtgagtgacatcagtttcctcccagacccttgcgctcttcctgaacaacaaaagaagcgctgtttaaatgagaaggagaagctggtttatgcgcctctttctggagttgggggtgtgctgtatgacaaagacgctgtctatgttgaccttggtggcagccacgtttttcaggatgaagtggggcccacccatgagctggtccagagtctcatctctacccactccaccattgatgccaagatggcttcaagtcgagtgacgctgttttctgattccaagccacttgggtcagaggatatagataatcaagggctaatgatgccaaaggaggaaaaacaaatggacttgaacactggtcgaatgcgtcggaaagccattttcggagatgaagatgaatctggagatagtgatgatgaagaagatgatgaaatgtctgaagatgacgggttggaaaacggctctagtgatgaggaagcagaagaggaggaaaatgctgagatgactgatcagtatatggctgttaagggcatcaaacgacggaaacttgagttggaagaagacagtgaaatggatttgccagcatttgctgacagtgacgatgaccttgagaggagctcagcggaagaaggggaagcggaggaagctgatgaaagcagtgaagaagaggactgcactgcaggagagaagggcatttcaggatcaaaggctgctggagaaggtagtaaagcagggctgtcaccagctaattgccagagtgaccgtgtgaatctggagaagtctttgctgatgaagaaagcagctctccccactttcgattctgggcattgcacagctgaagaggtgtttgcatctgaagatgaatctgaagaaagctcctcactcagtgcagaggaagaagactcagaaaatgaagaggctattagaaaaaagctttcaaagccttctcaagtgagcagtggtcagaaactggggccacagaacttcattgatgagaccagtgatatagaaaatttactcaaagaggaagaagattacaaggaagaaaataatgattccaaagaaacgtcaggtgccctcaagtggaaggaagacctttccagaaaggcagctgaggcctttctgaggcagcagcaagcagctccaaacctccgaaagcttatttatgggacagtgacagaagataatgaagaagaagatgatgatactctagaagagcttggagggttgtttcgtgtcaaccagcctgacagagagtgtaagcacaaggctgactctttggactgctccagatttcttgtggaggccccccatgactgggatttagaggaggttatgaacagtatcagagattgcttcgtgactggaaagtgggaagatgataaagatgcagccaaggtcttagcagaagatgaggagctctacggtgactttgaagacttggaaacaggggacgtgcacaagggaaaatcaggccccaatactcagaatgaagatatagagaaagaagttaaggaagaaattgaccctgacgaagaagaaagtgccaagaaaaagcatttggataagaagagaaaattgaaggagatgtttgatgcagaatatgatgaaggagaaagcacatattttgatgatcttaaaggagaaatgcagaaacaagcacagctgaatcgcgcagaatttgaagatcaagatgatgaagccagagttcagtatgagggttttcgacctgggatgtacgtccgcattgagattgaaaatgttccctgtgaatttgtgcagaactttgacccccattaccccattatcctgggtggcttgggcaacagtgagggaaatgttggctacgtgcagatgcgtctgaagaaacatcgctggtataagaaaatcctcaagtcccgagatccaatcatattttctgtagggtggaggaggtttcagaccatcccactgtattatatcgaagaccacaatggaagacaaaggcttctaaagtataccccacagcacatgcattgcggagcagccttttggggccctatcactccacagggaactggtttcttggcaatacagtctgtcagtggcataatgcctgattttcggatagctgctacaggagttgtccttgatctggataaatccataaaaattgtgaagaaattaaagctaactggttttccatataaaattttcaagaacacttcatttattaagggaatgtttaattctgccttggaagtggccaaatttgaaggtgctgtgattcgaacagtcagtgggataagggggcagatcaagaaagcactccgagctccagaaggagctttcagggccagctttgaggataagctgctgatgagcgatattgtcttcatgcgaacttggtatcctgtttccatcccagcgttctataacccagtaacatctttgttgaaaccagtgggtgagaaagacacctggtcaggaatgcggaccacgggccaactcaggctcgcccatggcatcagactaaaggcgaacaaggactctctgtataagccaatcctgaggcaaaagaaacattttaattcactgcacattccaaaagccttgcagaaggccctgccatttaagaacaagcccaagacccaagcaaaggcaggcaaggtgccaaaggacaggcggagaccggccgtcatacgcgagcctcatgaaagaaagatccttgcactgctggatgctctgagtacggtgcatagtcagaagatgaagaaggccaaggagcagcggcacctgcacaataaagagcacttcagagccaagcagaaggaggaggaggagaagctgaagcggcagaaggacctcaggaagaagctcttcagaattcaggggcagaaggaaagaagaaaccagaagtccagtttgaagggggctgagggccaattgcagtgagcctttggactggagggactgtccctggatctgcggaggtagacagtttcaaacatcacagtttgaatgcctgtgaatgacacgtcagtgggaaagagctcaagagatgtctctactcaaactgtgcctgcaggaggaggaacagagaagcctgggctgctgggactgggttcattctcatgacttggggctgtcgagatttaaagtgatgtaagctgtggttatgtggattctcttactttcctctgcctgcctcagtttaattattttgtcctacagaaatatcattaaaatatttttttgttaaaaaaaaaaaaaaaaaa

SEQ ID NO: 1174 - protein, 1282 aa, Homo sapiens
MEAKDQKKHRKKNSGPKAAKKKKRLLQDLQLGDEEDARKRNPKAFAVQSAVRMARSFHRTQDLKTKKHHIPVVDRTPLEPPPIVVVVMGPPKVGKSTLIQCLIRNFTRQKLTEIRGPVTIVSGKKRRLTIIECGCDINMMIDLAKVADLVLMLIDASFGFEMETFEFLNICQVHGFPKIMGVLTHLDSFKHNKQLKKTKKRLKHRFWTEVYPGAKLFYLSGMVHGEYQNQEIHNLGRFITVMKFRPLTWQTSHPYILADRMEDLTNPEDIRTNIKCDRKVSLYGYLRGAHLKNKSQIHMPGVGDFAVSDISFLPDPCALPEQQKKRCLNEKEKLVYAPLSGVGGVLYDKDAVYVDLGGSHVFQDEVGPTHELVQSLISTHSTIDAKMASSRVTLFSDSKPLGSEDIDNQGLMMPKEEKQMDLNTGRMRRKAIFGDEDESGDSDDEEDDEMSEDDGLENGSSDEEAEEEENAEMTDQYMAVKGIKRRKLELEEDSEMDLPAFADSDDDLERSSAEEGEAEEADESSEEEDCTAGEKGISGSKAAGEGSKAGLSPANCQSDRVNLEKSLLMKKAALPTFDSGHCTAEEVFASEDESEESSSLSAEEEDSENEEAIRKKLSKPSQVSSGQKLGPQNFIDETSDIENLLKEEEDYKEENNDSKETSGALKWKEDLSRKAAEAFLRQQQAAPNLRKLIYGTVTEDNEEEDDDTLEELGGLFRVNQPDRECKHKADSLDCSRFLVEAPHDWDLEEVMNSIRDCFVTGKWEDDKDAAKVLAEDEELYGDFEDLETGDVHKGKSGPNTQNEDIEKEVKEEIDPDEEESAKKKHLDKKRKLKEMFDAEYDEGESTYFDDLKGEMQKQAQLNRAEFEDQDDEARVQYEGFRPGMYVRIEIENVPCEFVQNFDPHYPIILGGLGNSEGNVGYVQMRLKKHRWYKKILKSRDPIIFSVGWRRFQTIPLYYIEDHNGRQRLLKYTPQHMHCGAAFWGPITPQGTGFLAIQSVSGIMPDFRIAATGVVLDLDKSIKIVKKLKLTGFPYKIFKNTSFIKGMFNSALEVAKFEGAVIRTVSGIRGQIKKALRAPEGAFRASFEDKLLMSDIVFMRTWYPVSIPAFYNPVTSLLKPVGEKDTWSGMRTTGQLRLAHGIRLKANKDSLYKPILRQKKHFNSLHIPKALQKALPFKNKPKTQAKAGKVPKDRRRPAVIREPHERKILALLDALSTVHSQKMKKAKEQRHLHNKEHFRAKQKEEEEKLKRQKDLRKKLFRIQGQKERRNQKSSLKGAEGQLQ

SEQ ID NO: 1175 - DNA, 3740 bp, Homo sapiens
aggaagcctcaagacgcggagcagcggcaggaaggagcccccggcagcccggaggagcatgggcaccttgcgggatttacagtacgcgctccaggagaagatcgaggagctgaggcagcgggatgctctcatcgacgagctggagctggagttggatcagaaggacgaactgatccagaagctgcagaacgagctggacaagtaccgctcggtgatccgaccagccacccagcaggcgcagaagcagagcgcgagcaccttgcagggcgagccgcgcaccaagcggcaggcgatctccgccgagcccaccgccttcgacatccaggatctcagccatgtgaccctgcccttctaccccaagagcccacagtccaaggatcttataaaggaagctatccttgacaatgactttatgaagaacttggagctgtcgcagatccaggagattgtggattgtatgtacccggtggagtatggcaaggacagttgcatcatcaaagaaggagacgtggggtcactggtgtatgtcatggaagatggtaaggttgaagttacaaaagaaggtgtgaagttgtgtaccatgggtccaggaaaagtgtttggggaattggctattctttacaactgtacccggacagcgaccgtcaagactcttgtaaatgtaaaactctgggccattgatcgacaatgttttcaaacaataatgatgaggacaggactcatcaagcataccgagtatatggaatttttaaaaagcgttccaacattccagagccttcctgaagagatcctcagcaagcttgctgatgtccttgaagagacccactatgaaaatggagaatatattatcaggcaaggtgcaagaggggacaccttctttatcatcagcaaaggaacggtaaatgtcactcgtgaagactcaccgagtgaagacccagtctttcttagaactttaggaaaaggagactggtttggagagaaagccttgcagggggaagatgtgagaacagcaaacgtaattgctgcagaagctgtaacctgccttgtgattgacagagactcttttaaacatttgattggagggctggatgatgtttctaataaagcatatgaagatgcagaagctaaagcaaaatatgaagctgaagcggctttcttcgccaacctgaagctgtctgatttcaacatcattgatacccttggagttggaggtttcggacgagtagaactggtccagttgaaaagtgaagaatccaaaacgtttgcaatgaagattctcaagaaacgtcacattgtggacacaagacagcaggagcacatccgctcagagaagcagatcatgcagggggctcattccgatttcatagtgagactgtacagaacatttaaggacagcaaatatttgtatatgttgatggaagcttgtctaggtggagagctctggaccattctcagggatagaggttcgtttgaagattctacaaccagattttacacagcatgtgtggtagaagcttttgcctatctgcattccaaaggaatcatttacagggacctcaagccagaaaatctcatcctagatcaccgaggttatgccaaactggttgattttggctttgcaaagaaaataggatttggaaagaaaacatggactttttgtgggactccagagtatgtagccccagagatcatcctgaacaaaggccatgacatttcagccgactactggtcactgggaatcctaatgtatgaactcctgactggcagcccacctttctcaggcccagatcctatgaaaacctataacatcatattgagggggattgacatgatagaatttccaaagaagattgccaaaaatgctgctaatttaattaaaaaactatgcagggacaatccatcagaaagattagggaatttgaaaaatggagtaaaagacattcaaaagcacaaatggtttgagggctttaactgggaaggcttaagaaaaggtaccttgacacctcctataataccaagtgttgcatcacccacagacacaagtaattttgacagtttccctgaggacaacgatgaaccaccacctgatgacaactcaggatgggatatagacttctaatgtatttctcttacctgcttctgccttgctgaagacagctttttctgagacacagctgccagcaaacctgagggaaagagagaagattagtgctcggggtcaccatgatgcctttgatcgatgctgctccagtaactacagtggcattaggacttatcgcttagatgacaatagtgctctttacatgttttctgtttgaacctaaaatagcagttgacatggtggtcctgaagcaaagcctttcaccagtaaagagatgttttctattgttgcaatgaccttgctttgctctgattataatttgaaagactgtaggaaacacttcaatgtagtataagagtctgtaccttgctggaatattcaagaagatgaaagaataatatattgggtacaatagattactatggtacagaaactgggctattccctttcttcaagtgaaggctgtgggatctattacagctgcaggccggtgtatataccatacaaaagaggaccacacatctgttggtcacagagttcatgtcacaccagtgctagaagtttcatgattttatttcccagcagtgctgatgacaagactgaatgttaccttttctttctgacagattttaaaaattgatatgataaaagcacaactgctatagattctgctgagacctctcatagtaggtatatatgagttttcacagaagactgaaaaataatgcatgatatttgtttgttttttttgataaattggcatgacagagtggggaaaaaaagcaattcacaaaaccatttcatattttttaaaatattgtgcttaaagatggtcctggaagtaaatgactagcagccaattggttttacttaacataccctcaaactgaggcttaaagtattcccttttataaaaataaatgcttggggtagggtggagtggggagggattaaaacccatccaaaaaataaataaaaactatataggtgctatgtatatctttcatctgtaaatgtcagtgtctgaacagcaacacaaattcaaatcattatacgtgtagccagaaactcaagcattttcactaaagttattaaaccaaactcctgtccaatttgacttatacaacatagtcagtctagagttgagagacaaaggtaattataaacctatttgaactagcttcttgtcttaggcctgaaccaaaaaacaacaaacaaacaaaaaacaagaatgaaaaacagaaataaaagaagtagaaaagacaaagaaagaaagcccaaagtcaaagttgttaatatttacaggtttaccagatctggaacattacttatttgaggtcagagaacaaaacaagaacctggccaggtgttgattaccttttagtgaataagctgagtccatatacttgtctaactaagaaagcagtacagaggaaaacaggaacctgatttttttaaaataaattttaaataaaatagaattactacaattctgcaatttcatactacctaaaaaagactagatttgaaaatgtcaagctgatttactttattcacatggagaaaagaatccacaaattaaactgagtccttcactggcatgccagttgactattattagctgtcataagtaaccccg

SEQ ID NO: 1176 - protein, 686 aa, Homo sapiens
MGTLRDLQYALQEKIEELRQRDALIDELELELDQKDELIQKLQNELDKYRSVIRPATQQAQKQSASTLQGEPRTKRQAISAEPTAFDIQDLSHVTLPFYPKSPQSKDLIKEAILDNDFMKNLELSQIQEIVDCMYPVEYGKDSCIIKEGDVGSLVYVMEDGKVEVTKEGVKLCTMGPGKVFGELAILYNCTRTATVKTLVNVKLWAIDRQCFQTIMMRTGLIKHTEYMEFLKSVPTFQSLPEEILSKLADVLEETHYENGEYIIRQGARGDTFFIISKGTVNVTREDSPSEDPVFLRTLGKGDWFGEKALQGEDVRTANVIAAEAVTCLVIDRDSFKHLIGGLDDVSNKAYEDAEAKAKYEAEAAFFANLKLSDFNIIDTLGVGGFGRVELVQLKSEESKTFAMKILKKRHIVDTRQQEHIRSEKQIMQGAHSDFIVRLYRTFKDSKYLYMLMEACLGGELWTILRDRGSFEDSTTRFYTACVVEAFAYLHSKGIIYRDLKPENLILDHRGYAKLVDFGFAKKIGFGKKTWTFCGTPEYVAPEIILNKGHDISADYWSLGILMYELLTGSPPFSGPDPMKTYNIILRGIDMIEFPKKIAKNAANLIKKLCRDNPSERLGNLKNGVKDIQKHKWFEGFNWEGLRKGTLTPPIIPSVASPTDTSNFDSFPEDNDEPPPDDNSGWDIDF

SEQ ID NO: 1177 - DNA, 11993 bp, Homo sapiens
cgccaggtcgcgcacagcgccccgagcccaggcgcctccccgcccccctcccgcgctccgcggcggcggcggcggcggcagcagtagcagcaatatggctgttgatgggtgtttggggtggcgctggcggcgggaggagctcccccgagcccctgcgccggctgcccgttgctagctatggcaaatggtggcggcggcggcggcggcagcagcggcggcggcggcggcggcggaggcagcagtcttagaatgagtagcaatatccacgcgaaccatctcagcctagacgcgtcctcctcctcctcctcctcctcttcctcttcttcttcttcctcctcctcttcctcctcgtcctcggtccacgagcccaagatggatgcgctcatcatcccggtgaccatggaggtgccgtgcgacagccggggccaacgcatgtggtgggctttcctggcctcctccatggtgactttcttcgggggcctcttcatcatcttgctctggcggacgctcaagtacctgtggaccgtgtgctgccactgcgggggcaagacgaaggaggcccagaagattaacaatggctcaagccaggcggatggcactctcaaaccagtggatgaaaaagaggaggcagtggccgccgaggtcggctggatgacctccgtgaaggactgggcgggggtgatgatatccgcccagacactgactggcagagtcctggttgtcttagtctttgctctcagcatcggtgcacttgtaatatacttcatagattcatcaaacccaatagaatcctgccagaatttctacaaagatttcacattacagatcgacatggctttcaacgtgttcttccttctctacttcggcttgcggtttattgcagccaacgataaattgtggttctggctggaagtgaactctgtagtggatttcttcacggtgccccccgtgtttgtgtctgtgtacttaaacagaagttggcttggtttgagatttttaagagctctgagactgatacagttttcagaaattttgcagtttctgaatattcttaaaacaagtaattccatcaagctggtgaatctgctctccatatttatcagcacgtggctgactgcagccgggttcatccatttggtggagaattcaggggacccatgggaaaatttccaaaacaaccaggctctcacctactgggaatgtgtctatttactcatggtcacaatgtccaccgttggttatggggatgtttatgcaaaaaccacacttgggcgcctcttcatggtcttcttcatcctcgggggactggccatgtttgccagctacgtccctgaaatcatagagttaataggaaaccgcaagaaatacgggggctcctatagtgcggttagtggaagaaagcacattgtggtctgcggacacatcactctggagagtgtttccaacttcctgaaggactttctgcacaaggaccgggatgacgtcaatgtggagatcgtttttcttcacaacatctcccccaacctggagcttgaagctctgttcaaacgacattttactcaggtggaattttatcagggttccgtcctcaatccacatgatcttgcaagagtcaagatagagtcagcagatgcatgcctgatccttgccaacaagtactgcgctgacccggatgcggaggatgcctcgaatatcatgagagtaatctccataaagaactaccatccgaagataagaatcatcactcaaatgctgcagtatcacaacaaggcccatctgctaaacatcccgagctggaattggaaagaaggtgatgacgcaatctgcctcgcagagttgaagttgggcttcatagcccagagctgcctggctcaaggcctctccaccatgcttgccaacctcttctccatgaggtcattcataaagattgaggaagacacatggcagaaatactacttggaaggagtctcaaatgaaatgtacacagaatatctctccagtgccttcgtgggtctgtccttccctactgtttgtgagctgtgttttgtgaagctcaagctcctaatgatagccattgagtacaagtctgccaaccgagagagccgaagccgaaagcgtatattaattaatcctggaaaccatcttaagatccaagaaggtactttaggatttttcatcgcaagtgatgccaaagaagttaaaagggcatttttttactgcaaggcctgtcatgatgacatcacagatcccaaaagaataaaaaaatgtggctgcaaacggcttgaagatgagcagccgtcaacactatcaccaaaaaaaaagcaacggaatggaggcatgcggaactcacccaacacctcgcctaagctgatgaggcatgaccccttgttaattcctggcaatgatcagattgacaacatggactccaatgtgaagaagtacgactctactgggatgtttcactggtgtgcacccaaggagatagagaaagtcatcctgactcgaagtgaagctgccatgaccgtcctgagtggccatgtcgtggtctgcatctttggcgacgtcagctcagccctgatcggcctccggaacctggtgatgccgctccgtgccagcaactttcattaccatgagctcaagcacattgtgtttgtgggctctattgagtacctcaagcgggaatgggagacgcttcataacttccccaaagtgtccatattgcctggtacgccattaagtcgggctgatttaagggctgtcaacatcaacctctgtgacatgtgcgttatcctgtcagccaatcagaataatattgatgatacttcgctgcaggacaaggaatgcatcttggcgtcactcaacatcaaatctatgcagtttgatgacagcatcggagtcttgcaggctaattcccaagggttcacacctccaggaatggatagatcctctccagataacagcccagtgcacgggatgttacgtcaaccatccatcacaactggggtcaacatccccatcatcactgaactagtgaacgatactaatgttcagtttttggaccaagacgatgatgatgaccctgatacagaactgtacctcacgcagccctttgcctgtgggacagcatttgccgtcagtgtcctggactcactcatgagcgcgacgtacttcaatgacaatatcctcaccctgatacggaccctggtgaccggaggagccacgccggagctggaggctctgattgctgaggaaaacgcccttagaggtggctacagcaccccgcagacactggccaatagggaccgctgccgcgtggcccagttagctctgctcgatgggccatttgcggacttaggggatggtggttgttatggtgatctgttctgcaaagctctgaaaacatataatatgctttgttttggaatttaccggctgagagatgctcacctcagcacccccagtcagtgcacaaagaggtatgtcatcaccaacccgccctatgagtttgagctcgtgccgacggacctgatcttctgcttaatgcagtttgaccacaatgccggccagtcccgggccagcctgtcccattcctcccactcgtcgcagtcctccagcaagaagagctcctctgttcactccatcccatccacagcaaaccgacagaaccggcccaagtccagggagtcccgggacaaacagaacagaaaagaaatggtttacagatgaaccggataatgcctatcccagaaacattcaaatcaagcccatgagtacccacatggctaaccagatcaaccaatataaatccacaagcagcttgattccaccaatcagagaagttgaagatgaatgttgactcccaggagaccagaactatttttttaaagcctgacaaacttcataaatggtgatgtgacttttcttcttacatgctgaatcactggtggaaacgttaggataagcaagaattgccagaaaataaagtagacagatctttctctttgtctgccttgaatattgcttccatgtattttggaaaagaaaatgatttcatttataaatgaacatactaaaatagtcatgtatagcctctagcattttaaattatttttatttattagaaagaaaatatattttttcttttcattgtcaaatatcttccctatatctaaacaatgcaaaatctaaatgaataagtggtcagactccttaatgtgtttttctcttctttctctctttttctttgaggagaatgatggtcaccaccacaattaattgtaattaagggaaatgaattattaaaacaattttaaaatggccaatgatgtatacatgtattttagtaaatccagaaaagaagactaaggggacaggtgaatacctgctcctcgcctggatgggtgtgtattttgatctgcattgacaccagctcttaataaatggaaacttatttattttcacagttgaaagtcatatttttgtagttctagttttcattctgtagttctcacccctttgttcatatttttaaagggaagaccttctgctgcttttctacaattggcagatcaggtttgtctggccaactaaggacaccaggagggttgtgggcacacctgggatgtggaagctgaggaccagatgcacacaaggcattgctctgtttgctgttctagtggtggagactcctacgtgctgttatgcttctcattttatatttccaaaccacctgagcgagtaatgtcaacttcgggagggtctggtggactttctccccactccccaagtctcagagcttttagcctggaagtttgtaaaactgattagtagttttactttaccataggatgtgagagggcagtcattcttctcactgagtttttgtttaaaaaccaggaaatttctacaatcatggagacagattttaatttgcatgctctcctttatttagttgctggggccaaacacatgaacttgttacaacaatttaaaaataataataacaaaaggaaagcaacgaatgcacttcatatagactgttagaaaaggcctttgaaaattaccagcagtgaaatcaaataaattagccactttaaactgcggtcaaaagatttttctagccatcagatgcaattacgatgtctcagagctctgctatcgcttgcatgctcggtgtacagtctcccggcaactgttttgttccaatcaacttagcaagtctttcaactttaaaattatcaatctttgatatgatcatcaaggtctctggagaagcatggatgtaatagtgatttctattttcttaaaaaatgtaaactgtggacacttaatggaaccaagctaaccaaagtatctccccgaagtttcatgatatctagtccattaactctttgggccatgacctgtggtacctagttatggtagtgcaaatcagatcagagcaaagcaatgagatcatcatgaagacatatgtccactaagtactccaattaccagcgtaggcaaaatgagcttccacctctgtccactccctgcagagccaatatagtcgtgcttccacctcgtaggcattgtcctgcagtgatttgtcggactgtggttactctgtcgtcacattttgtagaattagttctataaaagtattgtgaatacaatgtatgtccaattggattgtttaaaaactacttataattaatcactagcctactcagcagactaaaatgatgtcaacagtctatattcaggcttataaacatttcttggtttccaacagaagtcaaatgtgtttgtggggagaacgttttgctaggattttgacaactttcctgaaagctaggccttttttacataatgattttgcattggggtcaccttagtatattcacgtcaatccacgctcttctttccttcgtgaaccatagtgggctcttcactcctgctcgtaataaccacctccaaatttgttagagtgatttggtctcctctggcaggctgtggtggccacataaaggatcttccattagagggacacaggacacaaagctccattcccatgaccctctcttccctgtgtctcccctaacaaggcaatctggaagcagaaatgcaaactccagccccaccacacatccaccgatgcatttgtggctagaaattttaatctaaactttttttaaaaaaaatcataatagttaggatagtttcctatagcaaagggctccttgattcataagcacctcccccccaaaaaaaccaaattggtaaaaattcattttcttttaaatagagcaataagttcatactgtgttgccgttgtaataatgaattgttctggactagaaaacaaaatgaggcattttgttaagggggtaggaaaatgactgattgttgggccctttggcaaaagctggtgcctggtaagtagaaacgaaatggaaacagaaataacatttgtgaaatcactggagggctcaagcaaatgccagagcttctccctggcttgttcctacttgttgagctctttggccctgagtcccatccatctccactgcaacagtctgtctttctgcctacatccgcctgagaccaaggagggtctttggtacagtccacattatgaggctctgatttcctatcccagtttagggctccagaaaagccattctcccaaactaatgattcttgggtgctgtgggtcaccaacaggctgtttacaaagcagaaaatatcatcaccatcataacctttctccttgagaaaacttttatttttgtctaagcaattttatattttagaatatcatcttgaaccattataaaacaccttaaataaaagtgattgtgactaaggcacgttggagaacattccaatctttcctcccaagggttctggcaccttatgatgtactttgtaaaaaaattgattgaagattttaaataaacaggaaattagaagtgttagggttagataaaggaaaagtgaaaaagcataagaaatttgggactttttcatgttgaaaggagaaaaagcacaagttccctagttaccatttaatatgagggtgcaagagccacatttacaaacaacaaacttgatctttaaaaatgtttttaaaactctctgagtctcagtgacttcatttgtaaatgagagtgattcatctagatgactctaaggtctctttcaggtcccaggggacgtgatctaagttaggagtgggaacatgggagtggctgcttctccttggctaagcccatgcagactattgtgtccaggactggaataaaggtcctttttgctgcatcacccaggcaacactcccagccttactcaggagtggtgaacattttctgctctggacatagaataggtaggttcattcctggtcttttcactttagattctctttaggttcaagatgcagatttctcaatttggacacacctgcatcacgttggtcaaattttgctgcctgtttctagggttttcttctcagtttcatccctgccttcccttttttgttgttttttttttggttcaaggcccagcttcagttaatcccttcatctctatgccatgtctccaattcctagtatgtaactagaggttcaagagaccccaaattcctgccattttccccatttatgtttccccatgtgaatcttcaggaagtaaccagtcttccttctcacttcatttcctgtcctctgtttatttggttattttctttcattaataaactaaccatctcttagctacttacattcacaaatgtaattttaatctattgtgtttcattgtgaaagagaatctcattgaaggaaggaaggaagaaattgaggaataaaggtaggaagggagagaaacaaagactatccaaccaattgactgagatgtgagccggcttgactcctaggagactaagtagatccattcagcttgaacactgagttccagggcagaatctgtccattttctgttttgttcttacttgctgcttttggaatggtggtaaagccaccagtcaccatgagccttgaaaggaccttcactaatgaggacttgactcaccctctttaaaaagcaaaagaaacagaatttacttacaatcttctggtaaattacctttctgatcctctccttattcccaaaaggcaatttttttaatccagcagagatgatttagcatataaatcccaggtcatttgaggaggtgatgacgctatttggatttatttatgagacagtagtaattataaatgattcctaggcagtttgtactagtttggtcatattggttgtttaagtggagtctcttctgattgtttgtttccaataaagtatcagttgttaataatttcaagatttccataaaaataagaaaacttggaaaacatttttaattttatttcttaagagaccacagagcctaattttcaatttttatggtaagcttgcttaaaacatgtataaaaagaagcctacatgctcaaaggcagaggcacctttagccctacaacagttggaagctccatgatatcacagccccacatggatagattggagaaagaattctgacttagaccacctgtagcagaccttcctcttttggcatatttttttaatcacaaaaaggacctgagactccctatctgaagataagccaaacttggggtatacattaagaatctgggaagaaagaaaaaaaagaaaaagatataataagcagtattttaaaataccatgagttatgggcatgcatatggtacaaagagtagttctttgggttgaaagaaagaagagtttgcattgaactgcgtaggctggcaagaatgcagaggtatacaatgtttgatgggctttggaggcatttcaatagtaaatgggtgacaggactggaaagatgtggaatatgagggttttccagggagatgggacttaatgggccatgatgtatttgtaggaatgtgatttcaatagattgactattttgtctactgtgataagtttgtgtaggggaactgaggaaaactgagatgagacttcatggaaggggctacaaagtacagtctaaaggcctagataaagtttgaaacttgatttagaaagtcatgaaaagccactcagagttttaagcaaagagtgatggggcagcaatggctgtgcatttttcaggttgaaagtagtgagatgtcagttcttcctggaagatatcatgagaatgcacacaaaactgaacattttctcagcagcaaggagtgctaaagggtgcacactccaagtcaacaactcaccgtgtgcagcaccttcctcacacattttgctttgctttctgtcacaggaccatcagacgtagaacgtcctgactctcctgaattactagaatgtcagcaacaaactcacaaagtagattagagggtaggaatagatacataaatttttaaaaacctgccaatcatactgttttctagacagtaatataataagaacatgaggcaggacatccacaaatagtagagaataattaatagtccagaactgccaaataggaattccccttatgaaaacacccttgcagctaatcaggtagcccttgtttagaaaccaattagcactcataaaatatttgtacaaggagtgagtgggggagaaatgagcacaatatgggttctgccatcaatcagcttataatacaactaaagaaagaaaacatgctcaaagcaccattagagaaagggtgagccctaatgacatagtttcacattcaatatggtaggagttgaaacaagggagaaatgctgtggtttgaagtggttcaacaaggtaggatttctagagaaaggggggtttaggagttagataagtagaggatcagcattctaggtatgaaggcaggattatctggcatgtggcagggtgaatgatgttaatcagtaactgctaattgatatttactgagcagctgctgtgtcctcacgatggtaagactattagaggaagacagcccacctgcctaactgggaacacaaggcacacatatattggaaagatcatgttgcacaaaacaggtgttcaataaataatttttgaataaatgtgaacactgaatagcaaataaatgttatagatcgtaatagttgtagaagattggttgggattgtagggactggatgtggggcaatggctgtgggtctagagtatattcattgtgcagtggacacacacctaatctgtcctcaaggacagaaccatgtggaggaataggaaaacaagagaagcaggcaagaagcggaggcagtgagtacagcagctaagaaatgttacattgggttcatccagagcaagaaaagctgagagctgtccgtgagggaaggccacacaggcaagaggagtgggacaggggagtaaaggagtgggctacaacaggccctgcagatgtggaagccagacccacagaggcacttagaaagtgaggatcctggatgaattattttagggagaaagtgtaggtttagatcagctggcagatgtgtttgtgggctacagccaagtttttcaggactaagaaggagcaaaataagtagaacttcttgggacaggagatctagggtactccagaaccagggaaatgagaaacaagaggggaattttaagaaagagagggaagatcatctatgaggttggagatgaaaggtgttggagatggtgaggcacaagtcaaaagactcactcgaagggcaggaactctgcttatttgtccatattcccagagtttgtcatgaggtctggcccacgtgggcagtcactcggccactatgtatcactgtggctgccatggtggatggaggctggacagaacctgtggtgatcggcagtctttctggaggactcaccagggaggggtctcagggtgggcatctcctttcaccttcctgtgcatgtcactgcactgttcttcttccctccctgaacagcacacacactgcatccttagtttcaggggtctgaaaacaaatgctacgaccaccttgctttggtggcttttctgaacaggcattgtgagaagagatgttctggccaggtgaaagtggactttatttttaggtaggtttttcagtttagaaaggtttcctttgcttatcccttgaggacttctgtgctgctgcttctcctccatcttgctagttaacagaacaggggcagaagtgacaccaatgctctcggccatgcctgccttgggaagcactaccgggccccactgtttagaatcttagatggaaatgtacacaaggcattgacacacgcctgcgggagtgacccagtgcttccctcccatgggactcagggtcagcgtgggaaggcagctggcagggacaggagccccgcccgcaaggtggactgagcctcacttccacacaaaaccagagtcccatctgccccagagcgctcgctctcctccccttccttccgctcaatgcagcctgacacgcctttgaccagaactgcaacatttcaaacacaaacccagatctgttgggaaatcctaattaaaaacgttgcattcccaggtggcacaatcacatcctgcctaaaacttctggcccacatcccaccacccagatgttgaaaagaaacctttctctgcttaacaccaaaacctgcacttcaaggtttctttaggggacaaagaaaaaaaaagtacacacatgcagagttcagcctacatgttcattgaggaaaaagagcgtggcttattcatctttcaatcttttgattgttggcattatgattatgattatgattaattactctgacctgacaggaattgaagaagagactatatgctggtgctctgaaatgatctacccaactctgtcatctgtaacaaccagtgataactctcttgtcttgtaaaaagggtttgtacataacttgtacatggtttcattttgtatttttcgcagattaaaaatttatgtatttgtgttctaaaa

SEQ ID NO: 1178 - protein, 1182 aa, Homo sapiens
MANGGGGGGGSSGGGGGGGGSSLRMSSNIHANHLSLDASSSSSSSSSSSSSSSSSSSSSSVHEPKMDALIIPVTMEVPCDSRGQRMWWAFLASSMVTFFGGLFIILLWRTLKYLWTVCCHCGGKTKEAQKINNGSSQADGTLKPVDEKEEAVAAEVGWMTSVKDWAGVMISAQTLTGRVLVVLVFALSIGALVIYFIDSSNPIESCQNFYKDFTLQIDMAFNVFFLLYFGLRFIAANDKLWFWLEVNSVVDFFTVPPVFVSVYLNRSWLGLRFLRALRLIQFSEILQFLNILKTSNSIKLVNLLSIFISTWLTAAGFIHLVENSGDPWENFQNNQALTYWECVYLLMVTMSTVGYGDVYAKTTLGRLFMVFFILGGLAMFASYVPEIIELIGNRKKYGGSYSAVSGRKHIVVCGHITLESVSNFLKDFLHKDRDDVNVEIVFLHNISPNLELEALFKRHFTQVEFYQGSVLNPHDLARVKIESADACLILANKYCADPDAEDASNIMRVISIKNYHPKIRIITQMLQYHNKAHLLNIPSWNWKEGDDAICLAELKLGFIAQSCLAQGLSTMLANLFSMRSFIKIEEDTWQKYYLEGVSNEMYTEYLSSAFVGLSFPTVCELCFVKLKLLMIAIEYKSANRESRSRKRILINPGNHLKIQEGTLGFFIASDAKEVKRAFFYCKACHDDITDPKRIKKCGCKRLEDEQPSTLSPKKKQRNGGMRNSPNTSPKLMRHDPLLIPGNDQIDNMDSNVKKYDSTGMFHWCAPKEIEKVILTRSEAAMTVLSGHVVVCIFGDVSSALIGLRNLVMPLRASNFHYHELKHIVFVGSIEYLKREWETLHNFPKVSILPGTPLSRADLRAVNINLCDMCVILSANQNNIDDTSLQDKECILASLNIKSMQFDDSIGVLQANSQGFTPPGMDRSSPDNSPVHGMLRQPSITTGVNIPIITELVNDTNVQFLDQDDDDDPDTELYLTQPFACGTAFAVSVLDSLMSATYFNDNILTLIRTLVTGGATPELEALIAEENALRGGYSTPQTLANRDRCRVAQLALLDGPFADLGDGGCYGDLFCKALKTYNMLCFGIYRLRDAHLSTPSQCTKRYVITNPPYEFELVPTDLIFCLMQFDHNAGQSRASLSHSSHSSQSSSKKSSSVHSIPSTANRQNRPKSRESRDKQNRKEMVYR

SEQ ID NO: 1179 - DNA, 6103 bp, Homo sapiens
cgccaggtcgcgcacagcgccccgagcccaggcgcctccccgcccccctcccgcgctccgcggcggcggcggcggcggcagcagtagcagcaatatggctgttgatgggtgtttggggtggcgctggcggcgggaggagctcccccgagcccctgcgccggctgcccgttgctagctatggcaaatggtggcggcggcggcggcggcagcagcggcggcggcggcggcggcggaggcagcagtcttagaatgagtagcaatatccacgcgaaccatctcagcctagacgcgtcctcctcctcctcctcctcctcttcctcttcttcttcttcctcctcctcttcctcctcgtcctcggtccacgagcccaagatggatgcgctcatcatcccggtgaccatggaggtgccgtgcgacagccggggccaacgcatgtggtgggctttcctggcctcctccatggtgactttcttcgggggcctcttcatcatcttgctctggcggacgctcaagtacctgtggaccgtgtgctgccactgcgggggcaagacgaaggaggcccagaagattaacaatggctcaagccaggcggatggcactctcaaaccagtggatgaaaaagaggaggcagtggccgccgaggtcggctggatgacctccgtgaaggactgggcgggggtgatgatatccgcccagacactgactggcagagtcctggttgtcttagtctttgctctcagcatcggtgcacttgtaatatacttcatagattcatcaaacccaatagaatcctgccagaatttctacaaagatttcacattacagatcgacatggctttcaacgtgttcttccttctctacttcggcttgcggtttattgcagccaacgataaattgtggttctggctggaagtgaactctgtagtggatttcttcacggtgccccccgtgtttgtgtctgtgtacttaaacagaagttggcttggtttgagatttttaagagctctgagactgatacagttttcagaaattttgcagtttctgaatattcttaaaacaagtaattccatcaagctggtgaatctgctctccatatttatcagcacgtggctgactgcagccgggttcatccatttggtggagaattcaggggacccatgggaaaatttccaaaacaaccaggctctcacctactgggaatgtgtctatttactcatggtcacaatgtccaccgttggttatggggatgtttatgcaaaaaccacacttgggcgcctcttcatggtcttcttcatcctcgggggactggccatgtttgccagctacgtccctgaaatcatagagttaataggaaaccgcaagaaatacgggggctcctatagtgcggttagtggaagaaagcacattgtggtctgcggacacatcactctggagagtgtttccaacttcctgaaggactttctgcacaaggaccgggatgacgtcaatgtggagatcgtttttcttcacaacatctcccccaacctggagcttgaagctctgttcaaacgacattttactcaggtggaattttatcagggttccgtcctcaatccacatgatcttgcaagagtcaagatagagtcagcagatgcatgcctgatccttgccaacaagtactgcgctgacccggatgcggaggatgcctcgaatatcatgagagtaatctccataaagaactaccatccgaagataagaatcatcactcaaatgctgcagtatcacaacaaggcccatctgctaaacatcccgagctggaattggaaagaaggtgatgacgcaatctgcctcgcagagttgaagttgggcttcatagcccagagctgcctggctcaaggcctctccaccatgcttgccaacctcttctccatgaggtcattcataaagattgaggaagacacatggcagaaatactacttggaaggagtctcaaatgaaatgtacacagaatatctctccagtgccttcgtgggtctgtccttccctactgtttgtgagctgtgttttgtgaagctcaagctcctaatgatagccattgagtacaagtctgccaaccgagagagccgtatattaattaatcctggaaaccatcttaagatccaagaaggtactttaggatttttcatcgcaagtgatgccaaagaagttaaaagggcatttttttactgcaaggcctgtcatgatgacatcacagatcccaaaagaataaaaaaatgtggctgcaaacggcttgaagatgagcagccgtcaacactatcaccaaaaaaaaagcaacggaatggaggcatgcggaactcacccaacacctcgcctaagctgatgaggcatgaccccttgttaattcctggcaatgatcagattgacaacatggactccaatgtgaagaagtacgactctactgggatgtttcactggtgtgcacccaaggagatagagaaagtcatcctgactcgaagtgaagctgccatgaccgtcctgagtggccatgtcgtggtctgcatctttggcgacgtcagctcagccctgatcggcctccggaacctggtgatgccgctccgtgccagcaactttcattaccatgagctcaagcacattgtgtttgtgggctctattgagtacctcaagcgggaatgggagacgcttcataacttccccaaagtgtccatattgcctggtacgccattaagtcgggctgatttaagggctgtcaacatcaacctctgtgacatgtgcgttatcctgtcagccaatcagaataatattgatgatacttcgctgcaggacaaggaatgcatcttggcgtcactcaacatcaaatctatgcagtttgatgacagcatcggagtcttgcaggctaattcccaagggttcacacctccaggaatggatagatcctctccagataacagcccagtgcacgggatgttacgtcaaccatccatcacaactggggtcaacatccccatcatcactgaactagtgaacgatactaatgttcagtttttggaccaagacgatgatgatgaccctgatacagaactgtacctcacgcagccctttgcctgtgggacagcatttgccgtcagtgtcctggactcactcatgagcgcgacgtacttcaatgacaatatcctcaccctgatacggaccctggtgaccggaggagccacgccggagctggaggctctgattgctgaggaaaacgcccttagaggtggctacagcaccccgcagacactggccaatagggaccgctgccgcgtggcccagttagctctgctcgatgggccatttgcggacttaggggatggtggttgttatggtgatctgttctgcaaagctctgaaaacatataatatgctttgttttggaatttaccggctgagagatgctcacctcagcacccccagtcagtgcacaaagaggtatgtcatcaccaacccgccctatgagtttgagctcgtgccgacggacctgatcttctgcttaatgcagtttgaccacaatgccggccagtcccgggccagcctgtcccattcctcccactcgtcgcagtcctccagcaagaagagctcctctgttcactccatcccatccacagcaaaccgacagaaccggcccaagtccagggagtcccgggacaaacagaagtacgtgcaggaagagcggctttgatatgtgtatccaccgccactgtgtgaaactgtatctgccactcatttccccagttggtgtttccaacaaagtaactttccctgttttcccctgtagtccccccctttttttttacacatatttgcatatgtatgatagtgtgcatgtggttgtcatttttatttcaccaccataaaacccttgagcacaacagcaaataagcagacggaccaaaagttatttatgattctgggggaaaaataacccaaaggcatgctccagacataaatagctcactgcaggaacgagttcacagattagaagggagcacttgtgatcaacgtcagttaggcagagcaagtttatttaatgtaaaagaaaagttgattctgatttatcaggattatcagggtgctttgggttttgattttgttgttgttgttgttttcctttctttctttttttatacacacaataagttagcacatgtttatttgaaacaagcaaccaaacagcaatgaaaacatattgattgtttccagtctctgggccgaagtattgcgaagcatttgaaaagctttcacgatttgtgtagatgattatgaaggacctgcttgttgcaagagaacatcagtgatttttttagttactcaccaaggccttttgtcccagagccagttccctctgggagttcttatgaacatttctcaccttaatatggaggagagaatagtattccaatcatggatgtatcaaattctagtcatttagtttaagtgaaaagaggtttgattgcatattaaattgttattctgtctccttatgttgccatatgaatagctattttttttctttcacttttgacatttgggatgaaaagccatatgtatcataaatatcagatgtaagtcattaaaaactgccttcctgggacttttacatcttttaaaaggtgaattacttaccttatgtacagaataaataatgctcaggaaagagcaagtatttttccatgcattctcaggggatctttttactcccctttgtttgattagttagggccccaatgccaggtaggaggaagggctggggcaatggtagagtgagaggaagacaaacccagctgcagatcatgcttttctaggagccgacatgctaaataaattagaatgtaggaggatcagccacagttgactcaacaaagacaaaagccagccaccaccttcaactgttggcacagctgtgcggtgctggctgtcccaatgcagaaagctggtgggaaggaattcctcatcatcactttctttaatgtagccaatttaggcagggtaatgacggcaatagagagctgctccttgtcattatgagacgtgggataagaagagtgcaacagtgagccaaacacattttggtatagttatttttttcttcttttgttttctttcttttttaacacttagtaagcatgagaggagaggtagaaaaatacccttttttcaacatatagttgtcagatgctttgtgcatgcaaatcatgctttaggcagtgcggtatttcttaaaaactggccaattcaccataaccaatttcccttatggatggactaggctggtatatacatatttgaaaagttttacttcaaagaattccatcgaatagaataggggtaaaagggaggaggaaaacatgtcacagctgtaccatctctaaaaaggtgtttttatggtgaatgttttggatttagattttggatcccccgtcccctcaagcatgatagttttggatatttgcttgctgtgtgaattgacaagcacttttactgacaaatggtgaggctcagtcagaacctccaccctcccccacaccaaagacaggggcagcgtagtattcaaaccagtattgtggtggggaataattgtatacatgtaaattatcaagccctatgagtggaagaattttttcaaattatttttgtccctctatatattgatttatattatgtataactatctctttatataaactatatataattatatatatataactatataattatatatatataactatatatataactatatatatgtatcccctagtattggatcatgaagagctcttcatgcattctttgcaaaggaggttataaagttacgccctcagaacatttataactataagaatgtgccagttaaagtgctcaacaggaaatatgacagtttaaaagcattgtaaaactcacatagcttacttctctctctaaagtgcaacaaggatgaatagaatgggccaaggtatgacaattaatggttctgcatgacctagccactgctgggggttttcttctataacgttgtccttgtgaaaacttttgtgaaattaaaaaaaaaggagttacaaatttta

SEQ ID NO: 1180 - protein, 1178 aa, Homo sapiens
MANGGGGGGGSSGGGGGGGGSSLRMSSNIHANHLSLDASSSSSSSSSSSSSSSSSSSSSSVHEPKMDALIIPVTMEVPCDSRGQRMWWAFLASSMVTFFGGLFIILLWRTLKYLWTVCCHCGGKTKEAQKINNGSSQADGTLKPVDEKEEAVAAEVGWMTSVKDWAGVMISAQTLTGRVLVVLVFALSIGALVIYFIDSSNPIESCQNFYKDFTLQIDMAFNVFFLLYFGLRFIAANDKLWFWLEVNSVVDFFTVPPVFVSVYLNRSWLGLRFLRALRLIQFSEILQFLNILKTSNSIKLVNLLSIFISTWLTAAGFIHLVENSGDPWENFQNNQALTYWECVYLLMVTMSTVGYGDVYAKTTLGRLFMVFFILGGLAMFASYVPEIIELIGNRKKYGGSYSAVSGRKHIVVCGHITLESVSNFLKDFLHKDRDDVNVEIVFLHNISPNLELEALFKRHFTQVEFYQGSVLNPHDLARVKIESADACLILANKYCADPDAEDASNIMRVISIKNYHPKIRIITQMLQYHNKAHLLNIPSWNWKEGDDAICLAELKLGFIAQSCLAQGLSTMLANLFSMRSFIKIEEDTWQKYYLEGVSNEMYTEYLSSAFVGLSFPTVCELCFVKLKLLMIAIEYKSANRESRILINPGNHLKIQEGTLGFFIASDAKEVKRAFFYCKACHDDITDPKRIKKCGCKRLEDEQPSTLSPKKKQRNGGMRNSPNTSPKLMRHDPLLIPGNDQIDNMDSNVKKYDSTGMFHWCAPKEIEKVILTRSEAAMTVLSGHVVVCIFGDVSSALIGLRNLVMPLRASNFHYHELKHIVFVGSIEYLKREWETLHNFPKVSILPGTPLSRADLRAVNINLCDMCVILSANQNNIDDTSLQDKECILASLNIKSMQFDDSIGVLQANSQGFTPPGMDRSSPDNSPVHGMLRQPSITTGVNIPIITELVNDTNVQFLDQDDDDDPDTELYLTQPFACGTAFAVSVLDSLMSATYFNDNILTLIRTLVTGGATPELEALIAEENALRGGYSTPQTLANRDRCRVAQLALLDGPFADLGDGGCYGDLFCKALKTYNMLCFGIYRLRDAHLSTPSQCTKRYVITNPPYEFELVPTDLIFCLMQFDHNAGQSRASLSHSSHSSQSSSKKSSSVHSIPSTANRQNRPKSRESRDKQKYVQEERL

SEQ ID NO: 1181 - DNA, 7041 bp, Homo sapiens
ggtggtttgcagatcactgaggctggacaacgttcatggctctcgggtagaacctagtgaaacggccagaatgaattctatggacaggcacatccagcagaccaatgaccgactgcagtgcatcaagcagcacttacagaatcctgccaacttccacaatgccgccacggagctgctggactggtgcggagacccacgggccttccagcggcccttcgagcagagcctgatgggctgtttgacggtggtcagtcgggtggcagcccagcaaggctttgacctggacctcggctacagactgctggctgtgtgtgctgcaaaccgagacaagttcaccccgaagtctgccgccttgttgtcctcctggtgcgaagagctcggccgcctgctgctgctccgacatcagaagagccgccagagcgatccccctgggaaactccccatgcagccccctctcagctccatgagctccatgaaacccactctgtcgcacagtgatgggtcgttcccctatgactctgtcccttggcagcagaacaccaaccagcctcccggctccctttccgtggtcaccacggtttggggagtaaccaacacatcccagagccaggtccttgggaaccctatggccaatgccaacaaccccatgaatccaggcggcaaccccatggcgtcgggcatgaccaccagcaacccaggcctcaactccccacagtttgcggggcagcagcagcagttctcagccaaggctggccccgctcagccctacatccagcagagcatgtatggccggcccaactaccccggcagcgggggctttggggccagttaccctgggggtcctaacgcccccgcaggcatgggcatccctccgcacaccaggccgcctgctgacttcactcagcccgcggcagccgctgcagcagcggcagtggcagcagcagcagccacagctacagccacagccacggccactgtggcagccctgcaggagacacagaacaaggatataaaccagtatggaccgatgggtcccacccaggcgtataacagccaattcatgaaccagcccgggccgcgggggcctgcctccatggggggcagcatgaaccccgcgagcatggcggctggcatgacgccctcggggatgagcggccctcccatgggcatgaaccagccccggccgcccggcatcagcccctttggcacacacgggcagcggatgccccagcagacctacccgggcccccggccccagtcccttcctattcagaacataaagaggccataccctggagagcccaactatggaaaccagcaatatggaccaaacagccagttccccacccagccaggccagtacccagcccccaaccccccgaggccactcacctcccccaactacccaggacagaggatgcccagccagccgagctccgggcagtacccgccccccacggtcaacatggggcagtattacaagccagaacagtttaatggacaaaataacacgttctcgggaagcagctacagtaactacagccaagggaatgtcaacaggcctcccaggccggttcctgtggcaaattacccccactcacctgttccagggaaccccacaccccccatgacccctgggagcagcatccctccatacctgtcccccagccaagacgtcaaaccacccttcccgcctgacatcaagccaaatatgagcgctctgccaccacccccagccaaccacaatgacgagctgcggctcacattccctgtgcgggatggcgtggtgctggagcccttccgcctggagcacaacctggcggtcagcaaccatgtgttccacctgcggcccacggtccaccagacgctgatgtggaggtctgacctggagctgcagttcaagtgctaccaccacgaggaccggcagatgaacaccaactggcccgcctcggtgcaggtcagcgtgaacgccacgcccctcaccattgagcgcggcgacaacaagacctcccacaagcccctgcacctgaagcacgtgtgccagccgggccgcaacaccatccagatcaccgtcacggcctgctgctgctcccacctcttcgtgctgcagctggtacaccggccctccgtccgctctgtgctgcaaggactcctcaagaagcgcctcctgcccgcagagcactgtatcacgaaaatcaagcggaatttcagcagcgtggctgcctcctcgggcaacacgaccctcaacggggaggatggggtggagcagacggccatcaaggtgtctctgaagtgccccatcacattccggcgcatccagctgcctgctcgaggacacgattgcaagcatgtgcagtgctttgatctggagtcatacctgcagctgaattgcgagagagggacctggaggtgtcctgtgtgcaataaaaccgctctgctggagggcctggaggtggatcagtacatgtggggaatcctgaatgccatccaacactccgagtttgaagaggtcaccatcgatcccacgtgcagctggcggccggtgcccatcaagtcggacttacacatcaaggacgaccctgatggcatcccctccaagcggttcaagaccatgagtcccagccagatgatcatgcccaatgtcatggagatgatcgcagccctgggccccggcccgtccccctatcccctcccgcctcccccagggggcaccaactccaacgactacagcagccaaggcaacaactaccaaggccatggcaactttgacttcccccacgggaaccctggagggacatccatgaatgacttcatgcacgggcccccccagctctcccaccccccggacatgcccaacaacatggccgccctcgagaaacccctcagccaccccatgcaggaaactatgccacacgctggcagctctgaccagccccacccctccatacaacaaggtttgcacgtaccacaccccagcagccagtcagggcctccattacatcacagtggggctcctcctcctcctccttcccagcctccccggcagccgccacaggccgctcccagcagccatccacacagcgacctgacctttaacccctcctcagccttagagggtcaggccggagcgcagggagcgtccgacatgccggagccttcgctggatctccttcccgaactcacaaatcctgacgagctcctgtcttatctggacccccccgacctgccgagcaatagtaacgatgacctcctgtctctatttgagaacaactgagggccacccggtcggggccatccctccacactctgcatcctaccccacctacccaacacacttttccacctgggagcctgtgccctcagaccgccccgcaccagagccacgggctgtggggcggggagccctcccccgctgcagccctctcagaacagaggggtagggagggtgcaccagtgcaccaggaaggctgtgtgggtctggagcccacgtcccacctccacacccttggcttgggcccatgcccagcgcaggcctgaagaccaccctcccgagaggaaccagcccggtaagagggcacacgctgatgcggcttcccggtccctccgcgtgtgccgattccagatgaccttccagtgtccccaaggttcttccatcttctagactgtaaccctgcctccctgcttcctggtccagagcctccctccagtgactgtggagcctgagaaggcccccgggccccagcatgggccccgagccttggaggagcactggcagttggtggcagtgagaccagcccacccaccaccacccaccacagaaaagcacaaacctctgggaaagacaacgtctctcgggggccaggggtcatcggtttgacccctgacctataagccaagataccccataaacacactcagaaagcagagaaaaaggacaagagtctgtgtttgagagggggtctgccattcctgcttggggactggtggggaagagggccaggacatcttctgagccaggacgtccctgaggctccacctccaagctcagacagggcccaggcttggggaacagagagagcaggtgtacacccaaccaaagtgattgtgcccttggttggggggcgcgggcatataacctgtcagaagcaaacaggagcggcaacttctaactttgctccaagccactctctttttaaacagcaacaatttaaagctatgaagtcacctggagaaaaggaacgttgctcttggacagcaagcaaaccatttctctccgtctgttctgtttttctcctagtccctctcctgccacctctccaagacttccgtgggacacccacttccctctgtcctagttctctttgtccaatcagatggcaagggcagtgcgtggaaaggccggggaggtgcagaaaccagagcccagggcaatggtgtctgtccagcccctccctctgtccctgtgctccaagctgcccccggctgcagcccaggccatggacatgtgcaccagtatgtacctgcaggcatgggggggaggggggcgtgtttctgggcctgccccagacactgcccttggctgccagcctaccctgcctgcactcctccaccatcacaatctcacccaaactcctgctcactcaagcaaaagcagcctctggccttccctccaccgctttgctccatctggcttaccactctccagggcctcctggggagcctgtcctgtgttcactttgtttcaggctggtctgtgccccgtgagccacatggcctagggtgatgccaggttgtcccgtcactggggtcccatctgtaaattctttgcgcccttcccggctgctgcctggggccctttcctgctctcccgtccgctgtgggtggtccccagctctcctctgtgggttttaccggaaaggtggccccagctgttgacttccagtcactgtcccagacggcacaaggttttctgtaggaaagctgccattgccccggccccttttcttcctttgtcccgttgtcgaggttttttcaaatagcgtgttgttcagtatgcaaatcaattattttaagaatcgcttttgtaaatatctttgtgaatattttagtatcgtctttgataatattcaacattttcatgacctggttatagcctttgctggtgtttttaaaatacctggactcaatgacaaagaccgagtcttctttttttttaaacaaaaacaaaaaaagcaaccagggctatttgtacagttgaaggggtgaacagaatgggcggctgtgctgggagttggaagaccgggcagcccgctatttagagccatccctcagtcagctggcagggacaagccaacgccaggtagcatgtggccacccttgcccagtgtctgtggcctggcaagtggccacgccctgtgtcagaccatctgggaattaagctccagacagacttacagatgccttccttaggagttcttgcttcttgcgttgatactttgccccagaaaggcctgggattcattctggttcttatcagggtgtgtccacactctgctcacaggtggatccacggctttccagtgcggagagtcgagatgctccctgcagcccaggccccgggcacctcctgcaaccatctctgggctcagcacctgaggcgggtttcctgggtcccctctccagcaagcctccaccagcaagctcggcccagagcttcccttccggctggctctgaaccgtgcgtggtgcctacagcctgcagtctggagacaagctcttccggagtgctctgggagccaggccagggtgtgagggaggtgcagaggcatccggggcgggagcaagccccaggttgtgacaggtgcaggtagacaacgcccataaacagagatggtcctgaactctggagagatccttccctgatcctttcggacgactacttggagccataagtaacctcagcaaaaacgaggcctctgcaagccacttttccatgccaagcatccacccggcccacaggcatgtttctgccgccactccgcaagatggacagggagccagcaggcaggcgggaagggccaagtacaggcaatcacccccatcttcttggtttgaagctttatccatgtatcatgttccgtgtagccattttattttttaagaaactgctaatactttctccctaatggaagccctgatcccccagagagctacaggtctgctcccgacgggcctcgggcctgacccgtccacacagggccgtgtcaacagcagcgactcaagggacgtgtgtacatatgtaaatgagaaatagagacgtgtcaacagatgcattcatttctcttggaatgtgtattgtttttattttgcgaaacaaaacaaaacaaaaaaaaaagcttggaactccatcacgtggaaaaactagatcctgttggttatagcatttgtgagttctccacgtctgtctctctcgctcatgtaatatactctgaccctgagtggaaaggggtttttgttctgtttttattttacctacatgtactatttagcttcagtgtactagtcctgccacctgtgtatttttagggtgctatggaaataatgaaaagaaacggggatttcagaagaaaattgtaaccaaattcatactttgtataatttttgatatcatgatcacaggtgattcacacgtacacacataaacacacccaccagtgcagcctgaagtaactcccacagaaaccatcatcgtctttgtacatcgtatgtacaatgcaatcatttcatactttaaactggtcaaaaaactaattgtgatttctagtcttgcaaagctgtatgtagttagatgatgtgacaacctctaatatttatctaataaatatgtattcagatgaaacctgtatattaggtgttcatgtggttattttgtatttaaagatcaaattatttgactattgctagacatttctatactctgttgtaacactgaggtatctcatttgcccatgttaatttttttctaaataaattgacaaaaac

SEQ ID NO: 1182 - protein, 1067 aa, Homo sapiens
MNSMDRHIQQTNDRLQCIKQHLQNPANFHNAATELLDWCGDPRAFQRPFEQSLMGCLTVVSRVAAQQGFDLDLGYRLLAVCAANRDKFTPKSAALLSSWCEELGRLLLLRHQKSRQSDPPGKLPMQPPLSSMSSMKPTLSHSDGSFPYDSVPWQQNTNQPPGSLSVVTTVWGVTNTSQSQVLGNPMANANNPMNPGGNPMASGMTTSNPGLNSPQFAGQQQQFSAKAGPAQPYIQQSMYGRPNYPGSGGFGASYPGGPNAPAGMGIPPHTRPPADFTQPAAAAAAAAVAAAAATATATATATVAALQETQNKDINQYGPMGPTQAYNSQFMNQPGPRGPASMGGSMNPASMAAGMTPSGMSGPPMGMNQPRPPGISPFGTHGQRMPQQTYPGPRPQSLPIQNIKRPYPGEPNYGNQQYGPNSQFPTQPGQYPAPNPPRPLTSPNYPGQRMPSQPSSGQYPPPTVNMGQYYKPEQFNGQNNTFSGSSYSNYSQGNVNRPPRPVPVANYPHSPVPGNPTPPMTPGSSIPPYLSPSQDVKPPFPPDIKPNMSALPPPPANHNDELRLTFPVRDGVVLEPFRLEHNLAVSNHVFHLRPTVHQTLMWRSDLELQFKCYHHEDRQMNTNWPASVQVSVNATPLTIERGDNKTSHKPLHLKHVCQPGRNTIQITVTACCCSHLFVLQLVHRPSVRSVLQGLLKKRLLPAEHCITKIKRNFSSVAASSGNTTLNGEDGVEQTAIKVSLKCPITFRRIQLPARGHDCKHVQCFDLESYLQLNCERGTWRCPVCNKTALLEGLEVDQYMWGILNAIQHSEFEEVTIDPTCSWRPVPIKSDLHIKDDPDGIPSKRFKTMSPSQMIMPNVMEMIAALGPGPSPYPLPPPPGGTNSNDYSSQGNNYQGHGNFDFPHGNPGGTSMNDFMHGPPQLSHPPDMPNNMAALEKPLSHPMQETMPHAGSSDQPHPSIQQGLHVPHPSSQSGPPLHHSGAPPPPPSQPPRQPPQAAPSSHPHSDLTFNPSSALEGQAGAQGASDMPEPSLDLLPELTNPDELLSYLDPPDLPSNSNDDLLSLFENN

SEQ ID NO: 1183 - DNA, 2213 bp, Homo sapiens
gcgggactcggccttctgggcgcgcgcgacgtcagtttgagttctgtgttctccccgcccgtgtcccgcccgacccgcgcccgcgatgctggcgctgcgctgcggctcccgctggctcggcctgctctccgtcccgcgctccgtgccgctgcgcctccccgcggcccgcgcctgcagcaagggctccggcgacccgtcctcttcctcctcctccgggaacccgctcgtgtacctggacgtggacgccaacgggaagccgctcggccgcgtggtgctggagctgaaggcagatgtcgtcccaaagacagctgagaacttcagagccctgtgcactggtgagaagggcttcggctacaaaggctccaccttccacagggtgatcccttccttcatgtgccaggcgggcgacttcaccaaccacaatggcacaggcgggaagtccatctacggaagccgctttcctgacgagaactttacactgaagcacgtggggccaggtgtcctgtccatggctaatgctggtcctaacaccaacggctcccagttcttcatctgcaccataaagacagactggttggatggcaagcatgttgtgttcggtcacgtcaaagagggcatggacgtcgtgaagaaaatagaatctttcggctctaagagtgggaggacatccaagaagattgtcatcacagactgtggccagttgagctaatctgtggccagggtgctggcatggtggcagctgcaaatgtccatgcacccaggtggccgcgttgggctgtcagccaaggtgcctgaaacgatacgtgtgcccactccactgtcacagtgtgcctgaggaaggctgctagggatgttagacctcggccaggacccaccacattgcttcctaatacccacccttcctcacgacctcatttctgggcatctttgtggacatgatgtcacccaccccttgtcaagcattgcctgtgattgcccagcccagattcatctgtgccttggacatggtgatggtgatgggttgccatccaagtgaaagtcttttccttgaccaagggggacagtcagttttgcaaaaggactctaatacctgtttaatattgtcttcctaattgggataatttaattaacaagattgactagaagtgaaactgcaacactaacttccccgtgctgtggtgtgacctgagttggtgacacaggccacagaccccagagcttggcttttgaaacacaactcagggcttttgtgaaggttcccccgctgagatctttcctcctggttactgtgaagcctgttggtttgctgctgtcgtttttgaggagggcccatgggggtaggagcagttgaacctgggaacaaacctcacttgagctgtgcctagacaatgtgaattcctgtgttgctaacagaagtggcctgtaagctcctgtgctccggagggaagcatttcctggtaggctttgatttttctgtgtgttaaagaaattcaatctactcatgatgtgttatgcataaaacatttctggaacatggatttgtgttcaccttaaatgtgaaaataaatcctattttctatggaagactggtacctggtttctggaagaggggtctgtgacttggagctgatctttactgagctcgccgtggcagatgccatgctcaggacgttcatgtggatggtttcatgtcatcgtgctggcaacttgtcctccctgccttagagatgaggctcagacaaacgaccttagcacccatagcctatgccatgagcactggctccaccctgaatcccagctcctccccttagtgaccccaagtctgtttccctcagctgcataaggaggcgatatagtttgaatatttgtccccagccaaatctcatgttgaactgtaatccccagtgctggaggtggggcctgctacgaggtgtttggatcatggggacgggtatttcatggcttggtgctgttttcttgatggtgaattattgcaagatacggtcatttaaaattgtgtggcacctccccctgcccccttcttgctcctgctttcaccatgtgacatgcctgatcccccttcaccttttgccatggtcataagcttcctgaggcctccctggaagctgagcagatgccagcaccatgcttcctgtacatcctgcagaaccataagccaattaaacctttttaataataaaaaaaaaaaaaaa

SEQ ID NO: 1184 - protein, 207 aa, Homo sapiens
MLALRCGSRWLGLLSVPRSVPLRLPAARACSKGSGDPSSSSSSGNPLVYLDVDANGKPLGRVVLELKADVVPKTAENFRALCTGEKGFGYKGSTFHRVIPSFMCQAGDFTNHNGTGGKSIYGSRFPDENFTLKHVGPGVLSMANAGPNTNGSQFFICTIKTDWLDGKHVVFGHVKEGMDVVKKIESFGSKSGRTSKKIVITDCGQLS

SEQ ID NO: 1185 - DNA, 4947 bp, Homo sapiens
agcggagtaggggggaggcggcggcagcggcagcggctgcgggcagcgcgcggggcgcagggcgcggggcgatcaccgtcggggctcgggaggcgggcagtgggcacaggctccccggtgcccgcccctccgctgcggaggggggccgcgagcgggcggccggggaggggccggcaccgccgccacaaaatgagcctgctgtcggccatcgacacgagcgccgcctcggtgtaccagcccgcccagctgctcaactgggtctacctgtcgctgcaggacacgcaccaggctagcgccttcgatgccttccggcccgtgccgaccgccggcgccgcacccccggagctggccttcggcaagggccgccccgagcagctgggctcgcccctgcactccagctatctcaacagcttcttccagctgcagcgcggagaggcgctgagcaacagtgtgtacaagggcgcctcaccctatggctccctcaacaacatcgccgatggcctcagctccctcaccgagcacttctcagacctgaccctcacctccgaggctcgcaagcccagcaagcggcccccacccaactacctgtgccacctgtgcttcaacaaaggacactacatcaaggactgcccccaggcacgccccaaaggcgagggcctgactccataccagggcaaaaagcgctgcttcggcgagtacaagtgtcccaagtgcaagagaaaatggatgagcgggaactcctgggccaacatggggcaggagtgcatcaagtgccacatcaacgtgtatccacacaagcagagacccctggagaagcccgacggcctggacgtgtccgaccagagcaaggagcacccgcagcacctctgcgagaagtgcaaggtcctgggctactactgccgtcgcgtgcagtgacgggctgcccgcccgcacccagagccaccccccgccagcccgaggagacgctgcttccctgtgctactccgaggggctgcgtgtcgccctgtgcatggggtgccctcgcaggcctgcggggctgggccgggggctcttagcgtccttgtcttgtgtgtgttgacaaacagtgttactgacattgctgccccccacaggccagggaaagcagggagtctggggctttttgcaggcgggcctggggtctcagtggaggggacaaaggcaagcaaaagcccatgtccaggagccctgggtgtccccacaggctcgcctctgagagcctctttggggtgagcagccttgtattggccacaggtgcactaaattgactgtgaatcccaaacctccccagaccagccaggccgcctgcccccacccagaaccttccggtttgccctgtatggaaagccactctcggaaatccctctttcctgagtcagcaatcgtggcaaggggacatgtgttccaacagcggctggggagtggacctctctgtcccttgcccaccttaagccccaaatccggaccccctctgacatcactggcattgcacctgggtgtgcccccctccccacgctatggacccagataggaggggttaggcatgggggaggcacagaatgctggagagatgcgtcctggtgaacgtggggcagcccctcccacgacccccaccagactgccttaggttttgtcagccccactccctttccttcccctctgcctcccacccactctgggggtccacatcaagatagctgggcccagtgtggaagcccagcgtgtctgttctagcagaaaggacacaagcctggtgttctggagacctcggctcaagtctttgccctgctgccgacgcattgtgtcaccttgggcaaggacttcgcatctccaggcctcagtttccccattagttaaatgacagcataacactagagagcagagggcccatttcagctctgttgttctgggattcaggctggccggtgctgtgtcctggagctttatttggggagtttcacccagaatggtgggagaaacctcccaggtgccaggtaccccgcatcgtgacccttcacttggtgtcttaggaagtcaagctgagggatgctgagtcctcccctgctggcccctgcagccccagccctgcttttcatcccccacccctgcaaacatggaggagccccctccttctcacctcggtctcctagcccctgacatggagaagcctgagacaagccacagaacccctcttttctaaaatggagacaataatttcctacctcccaagggagcagagaggcctcgtggcacgtccgtggccagggagcccactgtcctggctggcggcgggatcgtgcgctcctctgtctcccggatgagaagccccgtttccatggtcttgacccttcctttctcccggctgtcagaactgggtctcttgattttgcccctacattatgcctctgtgggaaaaaaaaaaaatcagaccaagaaatgagcctgaaattcagtgtttaccatggctcaaggatgcccatctggtgtccagttgccttttgtattcaaatgaaaatgctttgtacaactgaggagttacagtgaagtgttaaccaggggtccagggagcgagttgaaaagatggagtgagtgtatttgcagccagggagctgcagggtggatttgaggggccataccctctgagcacttaaaaaaggtatttgctccaggccaggcagcaggctgtggacacccttgccaccactggggactgccactgaggactccccgagcacgttgttccccgtcttctccaaggtgttgaggtgagctggggttggccccggcccaggcttctgtcccaaggagaagctgccactgacagtcatcctaccgcactgctaaagagaatgttcgcagtggtgggcagcgtgcctgtgccaacccttccagggacccggccatgggggaccttggcccaaggatgcctggggcctgccagctgtgctgcaaaggtggggggcccacaccctaaaactaacccaggccccagaccactggaggccagggcttccctgcacgggctaaggggagttgggatatcaccccaaagtgaccttgccagtgagctgttcagcaggtagccactgccctgccatctgtgcagagccagccaccttgggggctggggttcccgctttgaggcccaccttccatactccccttgactcggctctggctgaactggggaactctcttgtggtcagcaaagcccctgccatgcaggccaggtgccattgagaattaagtgctcagagggccaggagcccaggggatgggaaagtgtgtggttttagtacgttcaaaagggacaatcgcttgcagttggtagatctagcgatctagttgggagataatggtgtttaccccatatgaagtattcaatagttctacttgtgaatttgtatttattttgagttatacttgacacagaattccttttttaaaaaaatatgtgtgtattttggaaaaaaaattcatagatgttaaaatttctgcatggttaccagtttttctcacaacactgaatttggtagcttttcccgaaaaaatcttcacagtaattttttgtctgtatatatttgagggccttttttttaaaaaaaaaaaagaaaagaaaaatataattgtttgatttttgagattaaaacaaacaaaaagagaggcattttcaaaatttcagaactttcaggagggcaagagaatatcaaacaaagatttctggaagtattttgccaaccttctggttgagctgcaagaaaatatttatggtgagaacttttctgtttcccgttattgggtttttggttggtttttgtttgttttttactatgctttggtctgtaaaaatatgcaactgaactacattcagaaggaaatattgtctacatagaatattatatgaagttggtacataattctgatgaggaaaaaaaatctttgcaattctttaagccatattgttgtttttctgtgttgttttccctggatgaaaatatcagtattaagtagacagcatattattcaagtgtttagacttattaatatgttcttgtcctgtatttatacatatgtgtattttggaaagtattgccttttttaagggaagctataattcgatacatagtgaaaaagggaatggtgacccctttgtgcctcttccactgaggataacaaacagcattgtaatccattctcttgcaccttcttcttcttatcttgttattacggttttattaattttgtagagggacagggagtgggcaaggggaagaagcagcttatttgactaaccagcccctctgtggtccaccagcgtcttggcttggtgggagggctctcaatcagcagggccccaggagggaagaagaagtggggcaaagcctggcctcgccgctcgggagctttgccatctgagccacgcctcctccaggccatgctccttgaacttggaaatgtcaaccggagcccttacaccagccctccagcatctaatagacttgaatctactctaaacgaatatttaatccaacctcactacattgtagctcagtccaacgactaaccctgaaatgggggtgttccagccttcagcgagatggccaagcggtcccctgggggctgtggcagcgggcttatccttctctgttgccaaccttgccgtccgacctcctccgcccccatgcggtgaccccgtccgtgtctgtgtctgtccatacgtgtgagtccagctaaaaagacaaaacagaacccgtgggcccagctcggaaggtgcgtggagaaggctccgacgtctccgaagtgcagcccttgggatggcattccgttgtgtgccttattcctggagaatctgtatacggctcgcctatagaaatatagcctcttcatgctgtattaaaaggacttttaaaagcaaaaaaaaaaaaaaaa

SEQ ID NO: 1186 - protein, 241 aa, Homo sapiens
MSLLSAIDTSAASVYQPAQLLNWVYLSLQDTHQASAFDAFRPVPTAGAAPPELAFGKGRPEQLGSPLHSSYLNSFFQLQRGEALSNSVYKGASPYGSLNNIADGLSSLTEHFSDLTLTSEARKPSKRPPPNYLCHLCFNKGHYIKDCPQARPKGEGLTPYQGKKRCFGEYKCPKCKRKWMSGNSWANMGQECIKCHINVYPHKQRPLEKPDGLDVSDQSKEHPQHLCEKCKVLGYYCRRVQ

SEQ ID NO: 1187 - DNA, 3983 bp, Homo sapiens
actaacagatcactcgacacctaccagcccaggcagggctgggactgggcatttcctggctgagctggaggcttgggcccttcccattgtctcagaaccccaggtgatgccaagacatgggctctcctgggatgccgtgcttggtgacccaggagaaggactagattgctcctggtggttgctcccccttgcagagtcccacctgcccctttgggtcctgttgcctggcctcttttgctgtcctgggtagaggagatgagttcgtcgctggctgcaagctgaggccaactgacaatgctgcacagagaaggggcaccgagagtggccccggattgagcagtccgtagtgcagagcagcccctcgggcgttctgcctggccctgcttcccctgctggctgcccttctggtgcgtgcatcccaggtggcatcatgctgcagcagatcctgcacgacatgtacatcgaccccgagctccttgccgagctcagcgatgtgcagaagcacatcctcttctacaaaatgcgggaggagcagctgaggcgctggaaggagcgggagacttgggaggccctggcccaggacgagggtctcaggcctccaaagaccaagcgagcagcgagtgacaagcacatccaatggctcctaggggcagatggcgaggtctgggtctggatcatgggagaaggccctggtgacaagccctacgaagagatctctgaggagctgattgcagagagggcgcggctgcaggcacagagggaagctgaggagctctggagacagaaggaggcagagatcaccaagaagttccgggatgctctggccaatgagaaagcccggatcttggcggagaagtggaaagtggagatggaaggccgcaaggctgccaaagtcctggaggaacgcatccacgaggaattcaagaggaaagaggaagaggagaggaagcgaggagaagagcggattcgcctccaggaagagcagagggcgaaggagctctactggaccctgaagcaggctcagctgcattgccaagccagtgagaaagaggagcgagagtgggaagaacagttgcgccggtccaaggcggctgatgaggagaggagccgccgagcccagcgcgcccgggacgagtaccgacaccactcgctccgtgctatccagaagggcacggtcgctggcctcagctccatgttccgggagcttggccagagccatgagcaggaggcaagactctaccaccacctccccgacccgggtctgccgcagccccttgccctgccggtcaggacctgggagcgcccgctgcgcccagtctccagagatgtcatcgtccgctggtttaaggaggagcagctgcctcgccgagctggcttcgagaggaacaccaagttcatcgccccctggttccatggaggaaattatcactgtttcaggaggagagttacttcaggaaccctgcggacagagggacagcccaccagactaccatctgttgtttgaataatttttttccttatcaattggattcattttggtatcctgtttttgaactcagcttaagaacttctcatctcaaatcctatggccttctggaagatccaccactatccaaaggaaaaagtagattaatatgcctcaagggatatgacatctatggcatagggctactggtctcatcccagcgatcgggacagaaattgctaatagctcatgcaactctttcatgaagagcttagctatgaccttagaagacaaagcctgtttgtcatggctgccgtaaaccgagctcttacagtgcgtggaccatgttttaataatccaaaataattccagtgccgaaccctgaatttaacatatggtagacattcagtaaatgtttgttgaatgaatgcatgtcttctaaaagttttccaacacaaattagcagtggtttcttgtaaattatttcctactcgccactctataaaatcatggcaataatagaagattatgaaggatttctatggaggacataaatgctgcatctttcataatctccattatcaccctcattgatattatcattggaattatctaaggtgagccccagtttccagggcagctgattgacaccgtcctgccttccttatttaacctcttcttttgccactcgcctctatctttgaatcatattttggccttggttttgcaatggttttatgtcatcctacagatgtcttcaagacctggggtgagttatcaatgcaagaatggttcttagaaatctgatgaggcctctgctctctgggatgtggccctctctatgcaggttactccaatgattagctctgtcctcattgtccttttaattcccttgtcaacttaatctcagtatgttgcttatattaacaagaagactcacgcaataactcctcgataactctcagtgatggtatctgttggtgcatacttgtgttccacagttatggccatatacacagaggtagtatatgatgaagagaagattacagtctttacagtcaagaagacttgggttcatatcctaaccctggaacttactagcattataatgcttgcagcattgtgtttggtgagaggaaaagaatgaatggattctaggaatgttagggaacgatttactttacccgatggctgtatcaaacatctatgccccacttcttctcttgcctcacctattccttagattcttggtcacttctctaccacaagccaccagcactataaccagttttgcgtgggttctgctcttcctccctatgttgatcagtgtcatgtgagcataagccaatggtagcttgccacatgccccatctcccattgctgcagaggcataagacagaagagatgggaagtgaatgcccgatgtggtgaatctgggatgaatgggagtcataggctggtagatcgctttttcctccttcttcctcctggaggaactattctgagagtcatctgtttgtatggtcttgtagaagacagtcctgtaagatcgagcaaccagtcatgatgaaaccaagtggtggccggatcagtatgacaccctgctgcccccgtttttaattcttctctgccttgccctgctctctcctgttgctctgggattgcacttctgaatgaagtagcagctcataagcttttgccacaggctctgtcttttggggaatccaggataagaacccattatacagaagtgttcaataatatcaattttgcaactcactcagctccatggcttcccccggtctacctgtctcactacatgcataaagtgaaatgatggaaggaatctgctttctgaactctaatgtgccttcattgattatcattaaaattatcattaaaattgccttatttctatggactcagaggaatgatgttttagttttggctctctgatttaccaactatgtgactttgtccaagtcatttaacttcagtaaacctcggtatgactgaaaagggagttttctgtatggccgtcactaggtttttttgtgggttagttaaatgataaacatgaaagctctgtccaaatgaaaaaggtatttctaacaacaaccacaataacaataacaacttagtgcttagcccatgatgtatcaggggatatgatgtgatgattttcaaggtgttggaggcaacttctgttccaagaactcccagcagctttgaaagcagactgagatgagttgagaccctgaatccctgggctgttgttcctgtcacccctaattaatatgtgagagacaacagctgggttttccatccctaacacatttatttcattttatttggggcctgcaatttctgcatgtctcatatattttaggttttacctttttacctggctttaaaataaatcccttgtaagttgtcctgcaaatgaaattactgtctggaaaactgcaatttcatcttgagagttttattatgctaataaatgtcaggattctcatat

SEQ ID NO: 1188 - protein, 357 aa, Homo sapiens
MLQQILHDMYIDPELLAELSDVQKHILFYKMREEQLRRWKERETWEALAQDEGLRPPKTKRAASDKHIQWLLGADGEVWVWIMGEGPGDKPYEEISEELIAERARLQAQREAEELWRQKEAEITKKFRDALANEKARILAEKWKVEMEGRKAAKVLEERIHEEFKRKEEEERKRGEERIRLQEEQRAKELYWTLKQAQLHCQASEKEEREWEEQLRRSKAADEERSRRAQRARDEYRHHSLRAIQKGTVAGLSSMFRELGQSHEQEARLYHHLPDPGLPQPLALPVRTWERPLRPVSRDVIVRWFKEEQLPRRAGFERNTKFIAPWFHGGNYHCFRRRVTSGTLRTEGQPTRLPSVV

SEQ ID NO: 1189 - DNA, 411 bp, Homo sapiens
atgaatctgaatttaaatggcaaaggaagaagggaagacgcttccaggaagaagaaacaactggcatcagcaaagatctggagtcatgaaactacccccgaggatggctgggaaaagaagatccaggaactgctggtgtctgtactagttaccgccctgataggaaaggcagaagccatagctctcaccaaacctccagcatttaaactttgctgtggagtctacgtgaccccaccacgaggtgaccctcacctttccctccatacctggggagacagacatggcagtggtcactgaaccctgggatgacacgctacctcatcctttatgacaccctttgatatgttgcttttgatgcatttctttgtatcccatttggtttcatttttagcaataaactcattcttggta

SEQ ID NO: 1190 - protein, 98 aa, Homo sapiens
MNLNLNGKGRREDASRKKKQLASAKIWSHETTPEDGWEKKIQELLVSVLVTALIGKAEAIALTKPPAFKLCCGVYVTPPRGDPHLSLHTWGDRHGSGH

SEQ ID NO: 1191 - DNA, 1477 bp, Homo sapiens
gcggatcgctgctccctctcgccatggcgcaggtgctgatcgtgggcgccgggatgacaggaagcttgtgcgctgcgctgctgaggaggcagacgtccggtcccttgtaccttgctgtgtgggacaaggctgacgactcagggggaagaatgactacagcctgcagtcctcataatcctcagtgcacagctgacttgggtgctcagtacatcacctgcactcctcattatgccaaaaaacaccaacgtttttatgatgaactgttagcctatggcgttttgaggcctctaagctcgcctattgaaggaatggtgatgaaagaaggagactgtaactttgtggcacctcaaggaatttcttcaattattaagcattacttgaaagaatcaggtgcagaagtctacttcagacatcgtgtgacacagatcaacctaagagatgacaaatgggaagtatccaaacaaacaggctcccctgagcagtttgatcttattgttctcacaatgccagttcctgagattctgcagcttcaaggtgacatcaccaccttaattagtgaatgccaaaggcagcaactggaggctgtgagctactcctctcgatatgctctgggcctcttttatgaagctggtacgaagattgatgtcccttgggctgggcagtacatcaccagtaatccctgcatacgcttcgtctccattgataataagaagcgcaatatagagtcatcagaaattgggccttccctcgtgattcacaccactgtcccatttggagttacatacttggaacacagcattgaggatgtgcaagagttagtcttccagcagctggaaaacattttgccgggtttgcctcagccaattgctaccaaatgccaaaaatggagacattcacaggttacaaatgctgctgccaactgtcctggccaaatgactctgcatcacaaacctttccttgcatgtggaggggatggatttactcagtccaactttgatggctgcatcacttctgccctatgtgttctggaagctttaaagaattatatttagtgcctatatccttattctctatatgtgtattgggtttttattttcacaattttctgttattgattattttgttttctattttgctaagaaaaattactggaaaattgttcttcacttattatcatttttcatgtggagtataaaatcaattttgtaattttgatagttacaacccatgctagaatggaaattcctcacaccttgcaccttccctacttttctgaattgctatgactactccttgttggaggaaaagtggtacttaaaaaataacaaacgactctctcaaaaaaattacattaaatcacaataacagtttgtatgccaaaaacttgattatccttatgaaaatttcaattctgaataaagaataatcacattatcaaagccccatcaaaaaaaaaaaaaaaaaaaaaaaaaaaaaa

SEQ ID NO: 1192 - protein, 342 aa, Homo sapiens
MAQVLIVGAGMTGSLCAALLRRQTSGPLYLAVWDKADDSGGRMTTACSPHNPQCTADLGAQYITCTPHYAKKHQRFYDELLAYGVLRPLSSPIEGMVMKEGDCNFVAPQGISSIIKHYLKESGAEVYFRHRVTQINLRDDKWEVSKQTGSPEQFDLIVLTMPVPEILQLQGDITTLISECQRQQLEAVSYSSRYALGLFYEAGTKIDVPWAGQYITSNPCIRFVSIDNKKRNIESSEIGPSLVIHTTVPFGVTYLEHSIEDVQELVFQQLENILPGLPQPIATKCQKWRHSQVTNAAANCPGQMTLHHKPFLACGGDGFTQSNFDGCITSALCVLEALKNYI

SEQ ID NO: 1193 - DNA, 2107 bp, Homo sapiens
aaaagcccgggccgaacggccccgccgcagagactcagcgcggatcgctgctccctctcgccatggcgcaggtgctgatcgtgggcgccgggatgacaggaagcttgtgcgctgcgctgctgaggaggcagacgtccggtcccttgtaccttgctgtgtgggacaaggctgaggactcagggggaagaatgactacagcctgcagtcctcataatcctcagtgcacagctgacttgggtgctcagtacatcacctgcactcctcattatgccaaaaaacaccaacgtttttatgatgaactgttagcctatggcgttttgaggcctctaagctcgcctattgaaggaatggtgatgaaagaaggagactgtaactttgtggcacctcaaggaatttcttcaattattaagcattacttgaaagaatcaggtgcagaagtctacttcagacatcgtgtgacacagatcaacctaagagatgacaaatgggaagtatccaaacaaacaggctcccctgagcagtttgatcttattgttctcacaatgccagttcctgagattctgcagcttcaaggtgacatcaccaccttaattagtgaatgccaaaggcagcaactggaggctgtgagctactcctctcgatatgctctgggcctcttttatgaagctggtacgaagattgatgtcccttgggctgggcagtacatcaccagtaatccctgcatacgcttcgtctccattgataataagaagcgcaatatagagtcatcagaaattgggccttccctcgtgattcacaccactgtcccatttggagttacatacttggaacacagcattgaggatgtgcaagagttagtcttccagcagctggaaaacattttgccgggtttgcctcagccaattgctaccaaatgccaaaaatggagacattcacaggtaccaagtgctggtgtgattctaggatgtgcgaagagcccctggatgatggcgattggatttcccatctgacttcctggaaattggagcacacagtcaggttttatttgatttttttttttaaggataccacttcacagcctttaggatagctattatttagaagcaaaacagaagataaatgttggcaaggatgtggagatattggattcccttgtgcagtgccggtgggaatgtaaaatgatgtagctactatggaaaatgatacggcaatttctttagaaatgaaatatagaattgccgtatgatctgcagttccacatctggatatctatccaaaagaagtgaaagtagggacttgaacgaacatttgtacaccaatgttcacagcggctttattcacaacagccaaaaggtggaagcaacccagtgtccatggatagatgaatagataaataaaatgtggtataaacatacaatgggctattgtttagccttaaaagggaaggaaattctgacatgctgcaatatggatgaagcttaaagtcattatgcaaagtggaataagcctatcacaaaaaataatattacataattctacttatatgaggaatctagagcagtcagtttcacagagacagaaaatagaatggtggttgccaagggctgggagaagagggcaatggagagtgagtgtttagtgggtcagagttttagtttgggaaggtaaaaagttctggagatggatgatggttatgggtgctcaacagtgtgaatgtacttaatgccacagaactgcacatttaaatgtggttaaaatcatcacttttatgttatgtatatttaccacaataaataaagaagttgatatttcttatacttacaaagaggagaagggcatttgcaaatcaacaagaagtgtgaggcccctctctctagcagaaaaatagactaaatctatttctttatcttttaacatcctgtttaagggaaatgccaaaacaaatgggaaaaaatacacacacacaaatatatatgaacatgttttgcctcatgagtaatcaaaatgtgtacatatgtatgtttatgtatgtgtgtttatatttaaaatcgtgttctgccttatgagtaaacaaaaagtatacaaattaaaaactataatgaaacgt

SEQ ID NO: 1194 - protein, 315 aa, Homo sapiens
MAQVLIVGAGMTGSLCAALLRRQTSGPLYLAVWDKAEDSGGRMTTACSPHNPQCTADLGAQYITCTPHYAKKHQRFYDELLAYGVLRPLSSPIEGMVMKEGDCNFVAPQGISSIIKHYLKESGAEVYFRHRVTQINLRDDKWEVSKQTGSPEQFDLIVLTMPVPEILQLQGDITTLISECQRQQLEAVSYSSRYALGLFYEAGTKIDVPWAGQYITSNPCIRFVSIDNKKRNIESSEIGPSLVIHTTVPFGVTYLEHSIEDVQELVFQQLENILPGLPQPIATKCQKWRHSQVPSAGVILGCAKSPWMMAIGFPI

SEQ ID NO: 1195 - DNA, 6829 bp, Homo sapiens
cttctctcccagggcggtgcgacccggagctccagcgcccgagtctccacttcgtttgctgaaacttgctttctaccagctaagaaccatgctgcgagtgattgtggaatctgccagcaatatccctaaaacgaaatttggcaagccggatcctattgtttctgtcatttttaaggatgagaaaaagaaaacaaagaaagttgataatgaattgaaccctgtctggaatgagattttggagtttgacttgaggggtataccactggacttttcatcttcccttgggattattgtgaaagattttgagacaattggacaaaataaattaattggcacggcgactgtagccctgaaggacctgactggtgaccagagcagatccctgccgtacaagctgatctccctgctaaatgaaaaagggcaagatactggggccaccattgacttggtgatcggctatgatccgccttctgctccacatccaaatgacctgagcgggcccagcgtgccaggcatgggaggagatggggaagaagatgaaggtgatgaagacaggttggacaatgcagtcaggggccctgggcccaaggggccagttgggacggtgtcggaagctcagcttgctcggaggctcaccaaagtaaagaacagccggcggatgctgtcaaataagccacaggacttccagatccgcgtccgagtgattgagggccgacagttaagtggtaacaacataaggcctgtggtcaaagttcacgtctgtggccagacacaccgaacaagaatcaagagaggaaacaaccctttttttgatgagttgtttttctacaatgtcaacatgaccccttctgaattgatggatgagatcatcagcatccgggtttataattctcactctctgcgggcagattgtctgatgggggaatttaagattgatgttggatttgtttatgatgaacctggccatgctgtcatgagaaagtggcttcttctcaatgacccggaagataccagttcaggttctaaaggttatatgaaagtcagcatgtttgtcctgggaaccggagatgagcctcctcctgagagacgagatcgtgataatgacagtgatgatgtggagagtaatttgttactccctgctggcattgccctccggtgggtgaccttcttgctgaaaatctaccgagctgaggacatcccccagatggatgatgccttctcacagacagtaaaggaaatatttggaggcaatgcagataagaaaaatctcgtggatccttttgtagaagtttcctttgctggaaaaaaggtttgtacaaacataattgagaaaaatgcaaacccagagtggaatcaggtcgtcaatcttcagatcaagtttccttcagtgtgtgaaaaaataaaactaacaatatatgactgggaccgtcttactaaaaatgatgtagttggaacaacatatctacacctctctaaaattgctgcctctggtggggaagtggaagatttctcatcttcgggaactggggctgcatcatatacagtaaacacaggagaaacagaggtaggctttgttccaacgtttggaccttgttacctgaatctttatggaagccccagggagtacacgggattcccagacccctatgatgagctgaatactggaaagggggaaggagttgcctacagaggcaggatcttggttgaattagccacttttcttgagaagacaccaccagataaaaagcttgagcccatttcaaatgatgacctgctggttgttgagaaataccagcgaaggcggaagtacagcctgtctgccgtgtttcattcagccaccatgttgcaagatgttggtgaggccattcagtttgaagtcagcattgggaactatggcaacaagtttgacaccacctgtaagcctttggcatcaacaactcagtacagccgtgctgtatttgatggcaactactattattacttgccttgggcccacaccaagccagttgttaccctgacttcatactgggaggatattagtcatcgcctggatgcggtgaacactctcctagctatggcagaacggctgcaaacaaatatagaagctctaaaatcagggatacaaggtaaaattcctgcaaaccagctggctgaattgtggctgaagctgatagatgaagttatagaagacacgagatacacgttgcctctcacagaaggaaaagccaacgtcacagttctcgatactcagatccgaaagctgcggtccaggtctctctcccaaatacatgaggcggctgtgaggatgaggtcggaagccacagatgtgaagtccacactggcagaaattgaggactggcttgataaattaatgcagctgactgaagagccacagaacagcatgcctgacatcatcatctggatgatccggggagagaagagactggcctatgcacgaattcccgcacatcaggtcttgtactccaccagtggtgagaatgcatctggaaaatactgtgggaaaacccaaaccatctttctgaagtatccacaggagaaaaacaacgggccaaaggtgcctgtggagttgcgagtgaacatctggctaggcttaagtgctgtggagaagaagtttaacagcttcgcagaaggaactttcaccgtctttgctgaaatgtatgaaaatcaagctctcatgtttggaaaatggggtacttctggattagtaggacgtcataagttttctgatgtcacaggaaaaataaaactcaagagggaattttttctgcctccaaaaggctgggaatgggaaggagagtggatagttgatcctgaaagaagcttgctgactgaggcagatgcaggtcacacggagttcactgatgaagtctatcagaacgagagccgctaccccgggggcgactggaagccggccgaggacacctacacggatgcgaacggcgataaagcagcatcacccagcgagttgacttgtcctccaggttgggaatgggaagatgatgcatggtcttatgacataaatcgagcggtggatgagaaaggctgggaatatggaatcaccattcctcctgatcataagcccaaatcctgggttgcagcagagaaaatgtaccacactcatagacggcgaaggctggtccgaaaacgcaagaaagatttaacacagactgcttcaagcaccgcaagggccatggaggaattgcaagaccaagagggctgggaatatgcttctctaattggctggaaatttcactggaaacaacgtagttcagataccttccgccgcagacgctggaggagaaaaatggctccttcagaaacacatggtgcagctgccatctttaaacttgaaggtgcccttggggcagacactaccgaagatggggatgagaagagcctggagaaacagaagcacagtgccaccactgtgttcggagcaaacacccccattgtttcctgcaattttgacagagtctacatctaccatctgcgctgctatgtctatcaagccagaaacctcttggctttagataaggatagcttttcagatccatatgctcatatctgtttcctccatcggagcaaaaccactgagatcatccattcaaccctgaatcccacgtgggaccaaacaattatattcgatgaagttgaaatctatggggaaccccaaacagttctacagaatccacccaaagttatcatggaactttttgacaatgaccaagtgggcaaagatgaatttttaggacgaagcattttctctcctgtggtgaaactgaactcagaaatggacatcacacccaaacttctctggcacccagtaatgaatggagacaaagcctgcggggatgttcttgtaactgcagagctgattctgaggggcaaggatggctccaaccttcccattcttccccctcaaagggcgccaaatctatacatggtcccccaggggatcaggcctgtggtccagctcactgccattgagattctagcttggggcttaagaaatatgaaaaacttccagatggcttctatcacatcccccagtcttgttgtggagtgtggaggagaaagggtggaatcggtggtgatcaaaaaccttaagaagacacccaactttccaagttctgttctcttcatgaaagtgttcttgcccaaggaggaattgtacatgcccccactggtgatcaaggtcatcgaccacaggcagtttgggcggaagcctgtcgtcggccagtgcaccatcgagcgcctggaccgctttcgctgtgacccttatgcagggaaagaggacatcgtcccacagctcaaagcctcccttctgtctgccccaccatgccgggacatcgttatcgaaatggaagacaccaaaccattactggcttctaagctgacagaaaaggaggaagaaatcgtggactggtggagtaaattttatgcttcctcaggggaacatgaaaaatgcggacagtatattcagaaaggctattccaagctcaagatatataattgtgaactagaaaatgtagcagaatttgagggcctgacagacttctcagatacgttcaagttgtaccgaggcaagtcggatgaaaatgaagatccttctgtggttggagagtttaagggctcctttcggatctaccctctgccggatgaccccagcgtgccagcccctcccagacagtttcgggaattacctgacagcgtcccacaggaatgcacggttaggatttacattgttcgaggcttagagctccagccccaggacaacaatggcctgtgtgacccttacataaaaataacactgggcaaaaaagtcattgaagaccgagatcactacattcccaacactctcaacccagtctttggcaggatgtacgaactgagctgctacttacctcaagaaaaagacctgaaaatttctgtctatgattatgacacctttacccgggatgaaaaagtaggagaaacaattattgatctggaaaaccgattcctttcccgctttgggtcccactgcggcataccagaggagtactgtgtttctggagtcaatacctggcgagatcaactgagaccaacacagctgcttcaaaatgtcgccagattcaaaggcttcccacaacccatcctttccgaagatgggagtagaatcagatatggaggacgagactacagcttggatgaatttgaagccaacaaaatcctgcaccagcacctcggggcccctgaagagcggcttgctcttcacatcctcaggactcaggggctggtccctgagcacgtggaaacaaggactttgcacagcaccttccagcccaacatttcccagggaaaacttcagatgtgggtggatgttttccccaagagtttggggccaccaggccctcctttcaacatcacaccccggaaagccaagaaatactacctgcgtgtgatcatctggaacaccaaggacgttatcttggacgagaaaagcatcacaggagaggaaatgagtgacatctacgtcaaaggctggattcctggcaatgaagaaaacaaacagaaaacagatgtccattacagatctttggatggtgaagggaattttaactggcgatttgttttcccgtttgactaccttccagccgaacaactctgtatcgttgcgaaaaaagagcatttctggagtattgaccaaacggaatttcgaatcccacccaggctgatcattcagatatgggacaatgacaagttttctctggatgactacttgggtttcctagaacttgacttgcgtcacacgatcattcctgcaaaatcaccagagaaatgcaggttggacatgattccggacctcaaagccatgaacccccttaaagccaagacagcctccctctttgagcagaagtccatgaaaggatggtggccatgctacgcagagaaagatggcgcccgcgtaatggctgggaaagtggagatgacattggaaatcctcaacgagaaggaggccgacgagaggccagccgggaaggggcgggacgaacccaacatgaaccccaagctggacttaccaaatcgaccagaaacctccttcctctggttcaccaacccatgcaagaccatgaagttcatcgtgtggcgccgctttaagtgggtcatcatcggcttgctgttcctgcttatcctgctgctcttcgtggccgtgctcctctactctttgccgaactatttgtcaatgaagattgtaaagccaaatgtgtaacaaaggcaaaggcttcatttcaagagtcatccagcaatgagagaatcctgcctctgtagaccaacatccagtgtgattttgtgtctgagaccacaccccagtagcaggttacgccatgtcaccgagccccattgattcccagagggtcttagtcctggaaagtcaggccaacaagcaacgtttgcatcatgttatctcttaagtattaaaagttttattttctaaagtttaaatcatgtttttcaaaatatttttcaaggtggctggttccatttaaaaatcatctttttatatgtgtcttcggttctagacttcagcttttggaaattgctaaatagaattcaaaaatctctgcatcctgaggtgatatacttcatatttgtaatcaactgaaagagctgtgcattataaaatcagttagaatagttagaacaattcttatttatgcccacaaccattgctatattttgtatggatgtcataaaagtctatttaacctctgtaatgaaactaaataaaaatgtttcacctttaaaaaaaaaaaaaaaaaaaaaa

SEQ ID NO: 1196 - protein, 2061 aa, Homo sapiens
MLRVIVESASNIPKTKFGKPDPIVSVIFKDEKKKTKKVDNELNPVWNEILEFDLRGIPLDFSSSLGIIVKDFETIGQNKLIGTATVALKDLTGDQSRSLPYKLISLLNEKGQDTGATIDLVIGYDPPSAPHPNDLSGPSVPGMGGDGEEDEGDEDRLDNAVRGPGPKGPVGTVSEAQLARRLTKVKNSRRMLSNKPQDFQIRVRVIEGRQLSGNNIRPVVKVHVCGQTHRTRIKRGNNPFFDELFFYNVNMTPSELMDEIISIRVYNSHSLRADCLMGEFKIDVGFVYDEPGHAVMRKWLLLNDPEDTSSGSKGYMKVSMFVLGTGDEPPPERRDRDNDSDDVESNLLLPAGIALRWVTFLLKIYRAEDIPQMDDAFSQTVKEIFGGNADKKNLVDPFVEVSFAGKKVCTNIIEKNANPEWNQVVNLQIKFPSVCEKIKLTIYDWDRLTKNDVVGTTYLHLSKIAASGGEVEDFSSSGTGAASYTVNTGETEVGFVPTFGPCYLNLYGSPREYTGFPDPYDELNTGKGEGVAYRGRILVELATFLEKTPPDKKLEPISNDDLLVVEKYQRRRKYSLSAVFHSATMLQDVGEAIQFEVSIGNYGNKFDTTCKPLASTTQYSRAVFDGNYYYYLPWAHTKPVVTLTSYWEDISHRLDAVNTLLAMAERLQTNIEALKSGIQGKIPANQLAELWLKLIDEVIEDTRYTLPLTEGKANVTVLDTQIRKLRSRSLSQIHEAAVRMRSEATDVKSTLAEIEDWLDKLMQLTEEPQNSMPDIIIWMIRGEKRLAYARIPAHQVLYSTSGENASGKYCGKTQTIFLKYPQEKNNGPKVPVELRVNIWLGLSAVEKKFNSFAEGTFTVFAEMYENQALMFGKWGTSGLVGRHKFSDVTGKIKLKREFFLPPKGWEWEGEWIVDPERSLLTEADAGHTEFTDEVYQNESRYPGGDWKPAEDTYTDANGDKAASPSELTCPPGWEWEDDAWSYDINRAVDEKGWEYGITIPPDHKPKSWVAAEKMYHTHRRRRLVRKRKKDLTQTASSTARAMEELQDQEGWEYASLIGWKFHWKQRSSDTFRRRRWRRKMAPSETHGAAAIFKLEGALGADTTEDGDEKSLEKQKHSATTVFGANTPIVSCNFDRVYIYHLRCYVYQARNLLALDKDSFSDPYAHICFLHRSKTTEIIHSTLNPTWDQTIIFDEVEIYGEPQTVLQNPPKVIMELFDNDQVGKDEFLGRSIFSPVVKLNSEMDITPKLLWHPVMNGDKACGDVLVTAELILRGKDGSNLPILPPQRAPNLYMVPQGIRPVVQLTAIEILAWGLRNMKNFQMASITSPSLVVECGGERVESVVIKNLKKTPNFPSSVLFMKVFLPKEELYMPPLVIKVIDHRQFGRKPVVGQCTIERLDRFRCDPYAGKEDIVPQLKASLLSAPPCRDIVIEMEDTKPLLASKLTEKEEEIVDWWSKFYASSGEHEKCGQYIQKGYSKLKIYNCELENVAEFEGLTDFSDTFKLYRGKSDENEDPSVVGEFKGSFRIYPLPDDPSVPAPPRQFRELPDSVPQECTVRIYIVRGLELQPQDNNGLCDPYIKITLGKKVIEDRDHYIPNTLNPVFGRMYELSCYLPQEKDLKISVYDYDTFTRDEKVGETIIDLENRFLSRFGSHCGIPEEYCVSGVNTWRDQLRPTQLLQNVARFKGFPQPILSEDGSRIRYGGRDYSLDEFEANKILHQHLGAPEERLALHILRTQGLVPEHVETRTLHSTFQPNISQGKLQMWVDVFPKSLGPPGPPFNITPRKAKKYYLRVIIWNTKDVILDEKSITGEEMSDIYVKGWIPGNEENKQKTDVHYRSLDGEGNFNWRFVFPFDYLPAEQLCIVAKKEHFWSIDQTEFRIPPRLIIQIWDNDKFSLDDYLGFLELDLRHTIIPAKSPEKCRLDMIPDLKAMNPLKAKTASLFEQKSMKGWWPCYAEKDGARVMAGKVEMTLEILNEKEADERPAGKGRDEPNMNPKLDLPNRPETSFLWFTNPCKTMKFIVWRRFKWVIIGLLFLLILLLFVAVLLYSLPNYLSMKIVKPNV

SEQ ID NO: 1197 - DNA, 6790 bp, Homo sapiens
cttctctcccagggcggtgcgacccggagctccagcgcccgagtctccacttcgtttgctgaaacttgctttctaccagctaagaaccatgctgcgagtgattgtggaatctgccagcaatatccctaaaacgaaatttggcaagccggatcctattgtttctgtcatttttaaggatgagaaaaagaaaacaaagaaagttgataatgaattgaaccctgtctggaatgagattttggagtttgacttgaggggtataccactggacttttcatcttcccttgggattattgtgaaagattttgagacaattggacaaaataaattaattggcacggcgactgtagccctgaaggacctgactggtgaccagagcagatccctgccgtacaagctgatctccctgctaaatgaaaaagggcaagatactggggccaccattgacttggtgatcggctatgatccgccttctgctccacatccaaatgacctgagcgggcccagcgtgccaggcatgggaggagatggggaagaagatgaaggtgatgaagacaggttggacaatgcagtcaggggccctgggcccaaggggccagttgggacggtgtcggaagctcagcttgctcggaggctcaccaaagtaaagaacagccggcggatgctgtcaaataagccacaggacttccagatccgcgtccgagtgattgagggccgacagttaagtggtaacaacataaggcctgtggtcaaagttcacgtctgtggccagacacaccgaacaagaatcaagagaggaaacaaccctttttttgatgagttgtttttctacaatgtcaacatgaccccttctgaattgatggatgagatcatcagcatccgggtttataattctcactctctgcgggcagattgtctgatgggggaatttaagattgatgttggatttgtttatgatgaacctggccatgctgtcatgagaaagtggcttcttctcaatgacccggaagataccagttcaggttctaaaggttatatgaaagtcagcatgtttgtcctgggaaccggagatgagcctcctcctgagagacgagatcgtgataatgacagtgatgatgtggagagtaatttgttactccctgctggcattgccctccggtgggtgaccttcttgctgaaaatctaccgagctgaggacatcccccagatggatgatgccttctcacagacagtaaaggaaatatttggaggcaatgcagataagaaaaatctcgtggatccttttgtagaagtttcctttgctggaaaaaaggtttgtacaaacataattgagaaaaatgcaaacccagagtggaatcaggtcgtcaatcttcagatcaagtttccttcagtgtgtgaaaaaataaaactaacaatatatgactgggaccgtcttactaaaaatgatgtagttggaacaacatatctacacctctctaaaattgctgcctctggtggggaagtggaagtaaacacaggagaaacagaggtaggctttgttccaacgtttggaccttgttacctgaatctttatggaagccccagggagtacacgggattcccagacccctatgatgagctgaatactggaaagggggaaggagttgcctacagaggcaggatcttggttgaattagccacttttcttgagaagacaccaccagataaaaagcttgagcccatttcaaatgatgacctgctggttgttgagaaataccagcgaaggcggaagtacagcctgtctgccgtgtttcattcagccaccatgttgcaagatgttggtgaggccattcagtttgaagtcagcattgggaactatggcaacaagtttgacaccacctgtaagcctttggcatcaacaactcagtacagccgtgctgtatttgatggcaactactattattacttgccttgggcccacaccaagccagttgttaccctgacttcatactgggaggatattagtcatcgcctggatgcggtgaacactctcctagctatggcagaacggctgcaaacaaatatagaagctctaaaatcagggatacaaggtaaaattcctgcaaaccagctggctgaattgtggctgaagctgatagatgaagttatagaagacacgagatacacgttgcctctcacagaaggaaaagccaacgtcacagttctcgatactcagatccgaaagctgcggtccaggtctctctcccaaatacatgaggcggctgtgaggatgaggtcggaagccacagatgtgaagtccacactggcagaaattgaggactggcttgataaattaatgcagctgactgaagagccacagaacagcatgcctgacatcatcatctggatgatccggggagagaagagactggcctatgcacgaattcccgcacatcaggtcttgtactccaccagtggtgagaatgcatctggaaaatactgtgggaaaacccaaaccatctttctgaagtatccacaggagaaaaacaacgggccaaaggtgcctgtggagttgcgagtgaacatctggctaggcttaagtgctgtggagaagaagtttaacagcttcgcagaaggaactttcaccgtctttgctgaaatgtatgaaaatcaagctctcatgtttggaaaatggggtacttctggattagtaggacgtcataagttttctgatgtcacaggaaaaataaaactcaagagggaattttttctgcctccaaaaggctgggaatgggaaggagagtggatagttgatcctgaaagaagcttgctgactgaggcagatgcaggtcacacggagttcactgatgaagtctatcagaacgagagccgctaccccgggggcgactggaagccggccgaggacacctacacggatgcgaacggcgataaagcagcatcacccagcgagttgacttgtcctccaggttgggaatgggaagatgatgcatggtcttatgacataaatcgagcggtggatgagaaaggctgggaatatggaatcaccattcctcctgatcataagcccaaatcctgggttgcagcagagaaaatgtaccacactcatagacggcgaaggctggtccgaaaacgcaagaaagatttaacacagactgcttcaagcaccgcaagggccatggaggaattgcaagaccaagagggctgggaatatgcttctctaattggctggaaatttcactggaaacaacgtagttcagataccttccgccgcagacgctggaggagaaaaatggctccttcagaaacacatggtgcagctgccatctttaaacttgaaggtgcccttggggcagacactaccgaagatggggatgagaagagcctggagaaacagaagcacagtgccaccactgtgttcggagcaaacacccccattgtttcctgcaattttgacagagtctacatctaccatctgcgctgctatgtctatcaagccagaaacctcttggctttagataaggatagcttttcagatccatatgctcatatctgtttcctccatcggagcaaaaccactgagatcatccattcaaccctgaatcccacgtgggaccaaacaattatattcgatgaagttgaaatctatggggaaccccaaacagttctacagaatccacccaaagttatcatggaactttttgacaatgaccaagtgggcaaagatgaatttttaggacgaagcattttctctcctgtggtgaaactgaactcagaaatggacatcacacccaaacttctctggcacccagtaatgaatggagacaaagcctgcggggatgttcttgtaactgcagagctgattctgaggggcaaggatggctccaaccttcccattcttccccctcaaagggcgccaaatctatacatggtcccccaggggatcaggcctgtggtccagctcactgccattgagattctagcttggggcttaagaaatatgaaaaacttccagatggcttctatcacatcccccagtcttgttgtggagtgtggaggagaaagggtggaatcggtggtgatcaaaaaccttaagaagacacccaactttccaagttctgttctcttcatgaaagtgttcttgcccaaggaggaattgtacatgcccccactggtgatcaaggtcatcgaccacaggcagtttgggcggaagcctgtcgtcggccagtgcaccatcgagcgcctggaccgctttcgctgtgacccttatgcagggaaagaggacatcgtcccacagctcaaagcctcccttctgtctgccccaccatgccgggacatcgttatcgaaatggaagacaccaaaccattactggcttctaagctgacagaaaaggaggaagaaatcgtggactggtggagtaaattttatgcttcctcaggggaacatgaaaaatgcggacagtatattcagaaaggctattccaagctcaagatatataattgtgaactagaaaatgtagcagaatttgagggcctgacagacttctcagatacgttcaagttgtaccgaggcaagtcggatgaaaatgaagatccttctgtggttggagagtttaagggctcctttcggatctaccctctgccggatgaccccagcgtgccagcccctcccagacagtttcgggaattacctgacagcgtcccacaggaatgcacggttaggatttacattgttcgaggcttagagctccagccccaggacaacaatggcctgtgtgacccttacataaaaataacactgggcaaaaaagtcattgaagaccgagatcactacattcccaacactctcaacccagtctttggcaggatgtacgaactgagctgctacttacctcaagaaaaagacctgaaaatttctgtctatgattatgacacctttacccgggatgaaaaagtaggagaaacaattattgatctggaaaaccgattcctttcccgctttgggtcccactgcggcataccagaggagtactgtgtttctggagtcaatacctggcgagatcaactgagaccaacacagctgcttcaaaatgtcgccagattcaaaggcttcccacaacccatcctttccgaagatgggagtagaatcagatatggaggacgagactacagcttggatgaatttgaagccaacaaaatcctgcaccagcacctcggggcccctgaagagcggcttgctcttcacatcctcaggactcaggggctggtccctgagcacgtggaaacaaggactttgcacagcaccttccagcccaacatttcccagggaaaacttcagatgtgggtggatgttttccccaagagtttggggccaccaggccctcctttcaacatcacaccccggaaagccaagaaatactacctgcgtgtgatcatctggaacaccaaggacgttatcttggacgagaaaagcatcacaggagaggaaatgagtgacatctacgtcaaaggctggattcctggcaatgaagaaaacaaacagaaaacagatgtccattacagatctttggatggtgaagggaattttaactggcgatttgttttcccgtttgactaccttccagccgaacaactctgtatcgttgcgaaaaaagagcatttctggagtattgaccaaacggaatttcgaatcccacccaggctgatcattcagatatgggacaatgacaagttttctctggatgactacttgggtttcctagaacttgacttgcgtcacacgatcattcctgcaaaatcaccagagaaatgcaggttggacatgattccggacctcaaagccatgaacccccttaaagccaagacagcctccctctttgagcagaagtccatgaaaggatggtggccatgctacgcagagaaagatggcgcccgcgtaatggctgggaaagtggagatgacattggaaatcctcaacgagaaggaggccgacgagaggccagccgggaaggggcgggacgaacccaacatgaaccccaagctggacttaccaaatcgaccagaaacctccttcctctggttcaccaacccatgcaagaccatgaagttcatcgtgtggcgccgctttaagtgggtcatcatcggcttgctgttcctgcttatcctgctgctcttcgtggccgtgctcctctactctttgccgaactatttgtcaatgaagattgtaaagccaaatgtgtaacaaaggcaaaggcttcatttcaagagtcatccagcaatgagagaatcctgcctctgtagaccaacatccagtgtgattttgtgtctgagaccacaccccagtagcaggttacgccatgtcaccgagccccattgattcccagagggtcttagtcctggaaagtcaggccaacaagcaacgtttgcatcatgttatctcttaagtattaaaagttttattttctaaagtttaaatcatgtttttcaaaatatttttcaaggtggctggttccatttaaaaatcatctttttatatgtgtcttcggttctagacttcagcttttggaaattgctaaatagaattcaaaaatctctgcatcctgaggtgatatacttcatatttgtaatcaactgaaagagctgtgcattataaaatcagttagaatagttagaacaattcttatttatgcccacaaccattgctatattttgtatggatgtcataaaagtctatttaacctctgtaatgaaactaaataaaaatgtttcacctttaaaaaaaaaaaaaaaaaaaaaa

SEQ ID NO: 1198 - protein, 2048 aa, Homo sapiens
MLRVIVESASNIPKTKFGKPDPIVSVIFKDEKKKTKKVDNELNPVWNEILEFDLRGIPLDFSSSLGIIVKDFETIGQNKLIGTATVALKDLTGDQSRSLPYKLISLLNEKGQDTGATIDLVIGYDPPSAPHPNDLSGPSVPGMGGDGEEDEGDEDRLDNAVRGPGPKGPVGTVSEAQLARRLTKVKNSRRMLSNKPQDFQIRVRVIEGRQLSGNNIRPVVKVHVCGQTHRTRIKRGNNPFFDELFFYNVNMTPSELMDEIISIRVYNSHSLRADCLMGEFKIDVGFVYDEPGHAVMRKWLLLNDPEDTSSGSKGYMKVSMFVLGTGDEPPPERRDRDNDSDDVESNLLLPAGIALRWVTFLLKIYRAEDIPQMDDAFSQTVKEIFGGNADKKNLVDPFVEVSFAGKKVCTNIIEKNANPEWNQVVNLQIKFPSVCEKIKLTIYDWDRLTKNDVVGTTYLHLSKIAASGGEVEVNTGETEVGFVPTFGPCYLNLYGSPREYTGFPDPYDELNTGKGEGVAYRGRILVELATFLEKTPPDKKLEPISNDDLLVVEKYQRRRKYSLSAVFHSATMLQDVGEAIQFEVSIGNYGNKFDTTCKPLASTTQYSRAVFDGNYYYYLPWAHTKPVVTLTSYWEDISHRLDAVNTLLAMAERLQTNIEALKSGIQGKIPANQLAELWLKLIDEVIEDTRYTLPLTEGKANVTVLDTQIRKLRSRSLSQIHEAAVRMRSEATDVKSTLAEIEDWLDKLMQLTEEPQNSMPDIIIWMIRGEKRLAYARIPAHQVLYSTSGENASGKYCGKTQTIFLKYPQEKNNGPKVPVELRVNIWLGLSAVEKKFNSFAEGTFTVFAEMYENQALMFGKWGTSGLVGRHKFSDVTGKIKLKREFFLPPKGWEWEGEWIVDPERSLLTEADAGHTEFTDEVYQNESRYPGGDWKPAEDTYTDANGDKAASPSELTCPPGWEWEDDAWSYDINRAVDEKGWEYGITIPPDHKPKSWVAAEKMYHTHRRRRLVRKRKKDLTQTASSTARAMEELQDQEGWEYASLIGWKFHWKQRSSDTFRRRRWRRKMAPSETHGAAAIFKLEGALGADTTEDGDEKSLEKQKHSATTVFGANTPIVSCNFDRVYIYHLRCYVYQARNLLALDKDSFSDPYAHICFLHRSKTTEIIHSTLNPTWDQTIIFDEVEIYGEPQTVLQNPPKVIMELFDNDQVGKDEFLGRSIFSPVVKLNSEMDITPKLLWHPVMNGDKACGDVLVTAELILRGKDGSNLPILPPQRAPNLYMVPQGIRPVVQLTAIEILAWGLRNMKNFQMASITSPSLVVECGGERVESVVIKNLKKTPNFPSSVLFMKVFLPKEELYMPPLVIKVIDHRQFGRKPVVGQCTIERLDRFRCDPYAGKEDIVPQLKASLLSAPPCRDIVIEMEDTKPLLASKLTEKEEEIVDWWSKFYASSGEHEKCGQYIQKGYSKLKIYNCELENVAEFEGLTDFSDTFKLYRGKSDENEDPSVVGEFKGSFRIYPLPDDPSVPAPPRQFRELPDSVPQECTVRIYIVRGLELQPQDNNGLCDPYIKITLGKKVIEDRDHYIPNTLNPVFGRMYELSCYLPQEKDLKISVYDYDTFTRDEKVGETIIDLENRFLSRFGSHCGIPEEYCVSGVNTWRDQLRPTQLLQNVARFKGFPQPILSEDGSRIRYGGRDYSLDEFEANKILHQHLGAPEERLALHILRTQGLVPEHVETRTLHSTFQPNISQGKLQMWVDVFPKSLGPPGPPFNITPRKAKKYYLRVIIWNTKDVILDEKSITGEEMSDIYVKGWIPGNEENKQKTDVHYRSLDGEGNFNWRFVFPFDYLPAEQLCIVAKKEHFWSIDQTEFRIPPRLIIQIWDNDKFSLDDYLGFLELDLRHTIIPAKSPEKCRLDMIPDLKAMNPLKAKTASLFEQKSMKGWWPCYAEKDGARVMAGKVEMTLEILNEKEADERPAGKGRDEPNMNPKLDLPNRPETSFLWFTNPCKTMKFIVWRRFKWVIIGLLFLLILLLFVAVLLYSLPNYLSMKIVKPNV

SEQ ID NO: 1199 - DNA, 2635 bp, Homo sapiens
ggccgacgcgagcgccgcgcttcgcttcagctgctagctggcccaagggaggcgaccgcggagggtggcgaggggcggccaggacccgcagccccggggccgggccggtccggaccgccagggagggcaggtcagtgggcagatcgcgtccgcgggattcaatctctgcccgctctgataacagtccttttccctggcgctcacttcgtgcctggcacccggctgggcgcctcaagaccgttgtctcttcgatcgcttctttggacttggcgaccatttcagagatgtcttccagaagtaccaaagatttaattaaaagtaagtggggatcgaagcctagtaactccaaatccgaaactacattagaaaaattaaagggagaaattgcacacttaaagacatcagtggatgaaatcacaagtgggaaaggaaagctgactgataaagagagacacagacttttggagaaaattcgagtccttgaggctgagaaggagaagaatgcttatcaactcacagagaaggacaaagaaatacagcgactgagagaccaactgaaggccagatatagtactaccgcattgcttgaacagctggaagagacaacgagagaaggagaaaggagggagcaggtgttgaaagccttatctgaagagaaagacgtattgaaacaacagttgtctgctgcaacctcacgaattgctgaacttgaaagcaaaaccaatacactccgtttatcacagactgtggctccaaactgcttcaactcatcaataaataatattcatgaaatggaaatacagctgaaagatgctctggagaaaaatcagcagtggctcgtgtatgatcagcagcgggaagtctatgtaaaaggacttttagcaaagatctttgagttggaaaagaaaacggaaacagctgctcattcactcccacagcagacaaaaaagcctgaatcagaaggttatcttcaagaagagaagcagaaatgttacaacgatctcttggcaagtgcaaaaaaagatcttgaggttgaacgacaaaccataactcagctgagttttgaactgagtgaatttcgaagaaaatatgaagaaacccaaaaagaagttcacaatttaaatcagctgttgtattcacaaagaagggcagatgtgcaacatctggaagatgataggcataaaacagagaagatacaaaaactcagggaagagaatgatattgctaggggaaaacttgaagaagagaagaagagatccgaagagctcttatctcaggtccagtttctttacacatctctgctaaagcagcaagaagaacaaacaagggtagctctgttggaacaacagatgcaggcatgtactttagactttgaaaatgaaaaactcgaccgtcaacatgtgcagcatcaattgcttgtaattcttaaggagctccgaaaagcaagaaatcaaataacacagttggaatccttgaaacagcttcatgagtttgccatcacagagccattagtcactttccaaggagagactgaaaacagagaaaaagttgccgcctcaccaaaaagtcccactgctgcactcaatgaaagcctggtggaatgtcccaagtgcaatatacagtatccagccactgagcatcgcgatctgcttgtccatgtggaatactgttcaaagtagcaaaataagtatttgttttgatattaaaagattcaatactgtattttctgttagcttgtgggcattttgaattatatatttcacattttgcataaaactgcctatctacctttgacactccagcatgctagtgaatcatgtatcttttaggctgctgtgcatttctcttggcagtgatacctccctgacatggttcatcatcaggctgcaatgacagaatgtggtgagcagcgtctactgagactactaacattttgcactgtcaaaatacttggtgaggaaaagatagctcaggttattgctaatgggttaatgcaccagcaagcaaaatattttatgttttgggggtttgaaaaatcaaagataattaaccaaggatcttaactgtgttcgcattttttatccaagcacttagaaaacctacaatcctaattttgatgtccattgttaagaggtggtgatagatactattttttttttcatattgtatagcggttattagaaaagttggggattttcttgatctttattgctgcttaccattgaaacttaacccagctgtgttccccaactctgttctgcgcacgaaacagtatctgtttgaggcataatcttaagtggccacacacaatgttttctcttatgttatctggcagtaactgtaacttgaattacattagcacattctgcttagctaaaattgttaaaataaactttaataaacccatgtagccctctcatttgattgacagtattttagttatttttggcattcttaaagctgggcaatgtaatgatcagatctttgtttgtctgaacaggtatttttatacatgctttttgtaaaccaaaaacttttaaatttcttcaggttttctaacatgcttaccactgggctactgtaaatgagaaaagaataaaattatttaatgttttaaaaaaaaaaaaaaaaaaaa

SEQ ID NO: 1200 - protein, 464 aa, Homo sapiens
MSSRSTKDLIKSKWGSKPSNSKSETTLEKLKGEIAHLKTSVDEITSGKGKLTDKERHRLLEKIRVLEAEKEKNAYQLTEKDKEIQRLRDQLKARYSTTALLEQLEETTREGERREQVLKALSEEKDVLKQQLSAATSRIAELESKTNTLRLSQTVAPNCFNSSINNIHEMEIQLKDALEKNQQWLVYDQQREVYVKGLLAKIFELEKKTETAAHSLPQQTKKPESEGYLQEEKQKCYNDLLASAKKDLEVERQTITQLSFELSEFRRKYEETQKEVHNLNQLLYSQRRADVQHLEDDRHKTEKIQKLREENDIARGKLEEEKKRSEELLSQVQFLYTSLLKQQEEQTRVALLEQQMQACTLDFENEKLDRQHVQHQLLVILKELRKARNQITQLESLKQLHEFAITEPLVTFQGETENREKVAASPKSPTAALNESLVECPKCNIQYPATEHRDLLVHVEYCSK

SEQ ID NO: 1201 - DNA, 982 bp, Homo sapiens
atggtgtttgccatttccacaaaacatgcaggagagtgggtgaagctgacaaggaagatggccccactagaatatcgtgcaagggcgggtgacctcatcgccccgacggcagccgggccggggctgggggttggcggggggtgcggggcggccccggtgcaggcaaaagttcaggggccgaggcgcggccgtgcagctgtcgtccgaacccggccgggtccggggcgcccgccgcaggcggtgaaacgcaagattcaggccctgccgcagcaggcggacaaggcgaagactgcgcgcagggcctgcagcggcagctggactgggggcgcgagcggggggcgcgagcgagcggcgcgagaaagctgaaggcgatgtggctgtcctcgactgacggtacatgtgcatccagctctttaaggaggagttggacggggctcgggaacgactggtcacggccctgcagaagctagaggaggggggaaaaggctgcagatgagcgtgagagagaatgaaggtgatagaaaaccgggctatgagggatgaggagaagatggattcgggagatgcagctcaaagaggccaagcacactgcggccggaggctgaccgcaaataagaggaggtagctcggaaactggccatcacagagggcgaactggccagagcagaggagcgtgcagaggtgtctgaactaaaatgtggtgacctggcagaagaactcaagaatgtcactaacaatctgaaaccgccggaggctgcattggaaagtattctgacaaggaggacaaatacgaagaaaaaattaaacttctgtctgacaactgaaggaggctgagatccgtgctgaatttgtagagataatggttgcaaaactggaaaagacaactgatgacctggaagagaaatttgcccaggccaaagaagagagcgcgggcttatatcagacactggatcaggcactaaatgaacttgactgtatataa

SEQ ID NO: 1202 - DNA, 3115 bp, Homo sapiens
cgctcccaggaggaacgagaatgaatatgactcaagcccgggttctggtggctgcagtggtggggttggtggctgtcctgctctacgcctccatccacaagattgaggagggccatctggctgtgtactacaggggaggagctttactaactagccccagtggaccaggctatcatatcatgttgcctttcattactacgttcagatctgtgcagacaacactacaaactgatgaagttaaaaatgtgccttgtggaacaagtggtggggtcatgatctatattgaccgaatagaagtggttaatatgttggctccttatgcagtgtttgatatcgtgaggaactatactgcagattatgacaagaccttaatcttcaataaaatccaccatgagctgaaccagttctgcagtgcccacacacttcaggaagtttacattgaattgtttgatcaaatagatgaaaacctgaagcaagctctgcagaaagacttaaacctcatggccccaggtctcactatacaggctgtgcgtgttacaaaacccaaaatcccagaagccataagaagaaattttgagttaatggaggctgagaagacaaaactccttatagctgcacagaaacaaaaggttgtggaaaaagaagctgagacagagaggaaaaaggcagttatagaagcagagaagattgcacaagtggcaaaaattcggtttcagcagaaagtgatggaaaaagaaactgaaaagcgcatttctgaaatcgaagatgctgcattcctggcccgagagaaagcgaaagcagatgctgaatattatgctgcacacaaatatgccacctcaaacaagcacaagttgaccccggaatatctggagctcaaaaagtaccaggccattgcttctaacagtaagatctattttggcagcaacatccctaacatgttcgtggactcctcatgtgctttgaaatattcagatattaggactggaagagaaagctcactcccctctaaggaggctcttgaaccctctggagagaacgtcatccaaaacaaagagagcacaggttgatgcaagaggtggaaatgttctccatatcaagatgtggcccaaggggttaagtgggaacaatcattatacggactcttcagatttacagagaacttacacttcatctgttccacctctcctgcgatagtcctgggtgctccactgattggaggatagagccagctgtctgacacacaaatggtcttttcagccacagtcttatcaagtatcctatatgtattcctttctaaactgctactcatgaatgaggaaagtcttgctaagatactgcctgcactggaatgttaaacactaaatatataacaagctgtgttttcctaagctgagatctgttgaataatgtttacattcgtcccccggggaaatgtatgctcagccaccattcaagagatgactgagaaggagatggtaagttcaagaagactgattgcacctgggacccaggccctttctttgggatccagtcccagccttcatccatgtgattaagatccaggccgctgaagttccccaggaaatgatcttccacttgagcaaccttttacttgatacgatttgcacctttctgttttcctgcagtcagggtggtggcctgcagggacctgagctttgctacccaaccagattcctcatagagattcctaatcactagtttcttgtattcataaactcagagatacagagggcttggtttgaagttggggtgagatgaaacctttgctctgagccaaagctctggggccctgcattccctgcattgggttgatgactgtcagcatcactgccgcaggccatgcttgactaaggtacctggttttagccacagccacctccttgtatgttacctttcagctctggccaagagtgggacagggttttaaccacaaataggagcagcatgcaattcctagtgacttgctgcacagtattgtatcataattacaggaagtttttatttttaaaactggatctggggtatattcatttgccccatcacctctgtctaaaggcccaagtcctagggctgccatggtcacaagcacactgatgctccttaagattgtttatctggagcccacatagtgtggaacaaaaagtcacctagaaagcatccttggtcatcattgtctccttcccacctggcccagagatgcttaaatccaagttgtttctccagctgtcacctcccccaggagatcaggattccactgacgtcctgggcagccagtgaatttaattttccatgagaaacaacagagttaacctgtggcattaggagacctacttcatgtggaccctttttttccttcagtttaacttttctggagcagtgtgctgcgtagttcggcctgagtttgtgcagcttgttaagacaactcttgtgtacgctatgttgaagctcaacaaaaaagtcatgggaccacttctagaaatctttcagctgtcaggcctgtcagtctcatgacagtttgttggttgtgccaaacactttatttgggaaaggaaagcccagatttgaatgggtctttcccctgggccttatcctatagaggcatttgtaatatggagaaaataatttttcatttttgctcatttaattctataaattctctttataaatgaattttgtgttctttagttctccttaaaagaacttttgaattataaaaataaaatctttacctgtcgaattgttgctgcagatgattgttgtggaaaatctggatcattgacctctgtgctttcattcctagagatgttttatagttacatgagcaaaagctgttgccccaaagtgatggccctggaggcggggctgaggaacagggaaatgccgctgtgaagtcttaaagcacttctgcttaaactccatgtgtgaggagtgtgcctccctgtgccctctcagctctgaggctggccgtctttcggggtgttccttttggcaaatatacactgtaatcttgagtctaaatttatatgttgaaatgctaccttttttaaaataagaaactaaataaaattattttactatcaaaaaaaaaaaaaaa

SEQ ID NO: 1203 - protein, 346 aa, Homo sapiens
MTQARVLVAAVVGLVAVLLYASIHKIEEGHLAVYYRGGALLTSPSGPGYHIMLPFITTFRSVQTTLQTDEVKNVPCGTSGGVMIYIDRIEVVNMLAPYAVFDIVRNYTADYDKTLIFNKIHHELNQFCSAHTLQEVYIELFDQIDENLKQALQKDLNLMAPGLTIQAVRVTKPKIPEAIRRNFELMEAEKTKLLIAAQKQKVVEKEAETERKKAVIEAEKIAQVAKIRFQQKVMEKETEKRISEIEDAAFLAREKAKADAEYYAAHKYATSNKHKLTPEYLELKKYQAIASNSKIYFGSNIPNMFVDSSCALKYSDIRTGRESSLPSKEALEPSGENVIQNKESTG

SEQ ID NO: 1204 - DNA, 3539 bp, Homo sapiens
ccggaaccggccttggaacaactgtggaacctgaggccgcttgccctcccgccccatggagcggcccccggggctgcggccgggcgcgggcgggccctgggagatgcgggagcggctgggcaccggcggcttcgggaacgtctgtctgtaccagcatcgggaacttgatctcaaaatagcaattaagtcttgtcgcctagagctaagtaccaaaaacagagaacgatggtgccatgaaatccagattatgaagaagttgaaccatgccaatgttgtaaaggcctgtgatgttcctgaagaattgaatattttgattcatgatgtgcctcttctagcaatggaatactgttctggaggagatctccgaaagctgctcaacaaaccagaaaattgttgtggacttaaagaaagccagatactttctttactaagtgatatagggtctgggattcgatatttgcatgaaaacaaaattatacatcgagatctaaaacctgaaaacatagttcttcaggatgttggtggaaagataatacataaaataattgatctgggatatgccaaagatgttgatcaaggaagtctgtgtacatcttttgtgggaacactgcagtatctggccccagagctctttgagaataagccttacacagccactgttgattattggagctttgggaccatggtatttgaatgtattgctggatataggccttttttgcatcatctgcagccatttacctggcatgagaagattaagaagaaggatccaaagtgtatatttgcatgtgaagagatgtcaggagaagttcggtttagtagccatttacctcaaccaaatagcctttgtagtttagtagtagaacccatggaaaactggctacagttgatgttgaattgggaccctcagcagagaggaggacctgttgaccttactttgaagcagccaagatgttttgtattaatggatcacattttgaatttgaagatagtacacatcctaaatatgacttctgcaaagataatttcttttctgttaccacctgatgaaagtcttcattcactacagtctcgtattgagcgtgaaactggaataaatactggttctcaagaacttctttcagagacaggaatttctctggatcctcggaaaccagcctctcaatgtgttctagatggagttagaggctgtgatagctatatggtttatttgtttgataaaagtaaaactgtatatgaagggccatttgcttccagaagtttatctgattgtgtaaattatattgtacaggacagcaaaatacagcttccaattatacagctgcgtaaagtgtgggctgaagcagtgcactatgtgtctggactaaaagaagactatagcaggctctttcagggacaaagggcagcaatgttaagtcttcttagatataatgctaacttaacaaaaatgaagaacactttgatctcagcatcacaacaactgaaagctaaattggagttttttcacaaaagcattcagcttgacttggagagatacagcgagcagatgacgtatgggatatcttcagaaaaaatgctaaaagcatggaaagaaatggaagaaaaggccatccactatgctgaggttggtgtcattggatacctggaggatcagattatgtctttgcatgctgaaatcatggagctacagaagagcccctatggaagacgtcagggagacttgatggaatctctggaacagcgtgccattgatctatataagcagttaaaacacagaccttcagatcactcctacagtgacagcacagagatggtgaaaatcattgtgcacactgtgcagagtcaggaccgtgtgctcaaggagctgtttggtcatttgagcaagttgttgggctgtaagcagaagattattgatctactccctaaggtggaagtggccctcagtaatatcaaagaagctgacaatactgtcatgttcatgcagggaaaaaggcagaaagaaatatggcatctccttaaaattgcctgtacacagagttctgcccggtcccttgtaggatccagtctagaaggtgcagtaacccctcagacatcagcatggctgcccccgacttcagcagaacatgatcattctctgtcatgtgtggtaactcctcaagatggggagacttcagcacaaatgatagaagaaaatttgaactgccttggccatttaagcactattattcatgaggcaaatgaggaacagggcaatagtatgatgaatcttgattggagttggttaacagaatgagttgtcacttgttcactgtccccaaacctatggaagttgttgctatacatgttggaaatgtgtttttcccccatgaaaccattcttcagacatcagtcaatggaagaaatggctatgaacagaaactacatttctactatgatcagaagaacatgattttacaagtataacagttttgagtaattcaagcctctaaacagacaggaatttagaaaaagtcaatgtacttgtttgaatatttgttttaataccacagctatttagaagcatcatcacgacacatttgccttcagtcttggtaaaacattacttatttaactgattaaaaataccttctatgtattagtgtcaacttttaacttttgggcgtaagaccaaatgtagttttgtatacagagaagaaaacctcaagtaataggcattttaagtaaaagtctacctgtgtttttttctaaaaaggctgctcacaagttctatttcttgaagaataaattctacctccttgtgttgcactgaacaggttctcttcctggcatcataaggagttggtgtaatcattttaaattccactgaaaatttaacagtatccccttctcatcgaagggattgtgtatctgtgcttctaatattagttggctttcataaatcatgttgttgtgtgtatatgtatttaagatgtacatttaataatatcaaagagaagatgcctgttaatttataatgtatttgaaaattacatgttttttcatttgtaaaaatgagtcatttgtttaaacaatctttcatgtcttgtcatacaaatttataaaggtctgcactcctttatctgtaattgtaattccaaaatccaaaaagctctgaaaacaaggtttccataagcttggtgacaaaattcatttgcttgcaatctaatctgaactgaccttgaatctttttatcccatttagtgtgaatattcctttattttgctgcttgatgatgagagggagggctgctgccacagactgtggtgagggctggttaatgtagtatggtatatgcacaaaactacttttctaaaatctaaaatttcataattctgaaacaacttgccccaagggtttcagagaaaggactgtggacctctatcatctgctaagtaatttagaagatattatttgtcttaaaaaatgtgaaatgcttttatattctaatagtttttcactttgtgtattaaatggtttttaaattaaaaaaaaaaaaaaaa

SEQ ID NO: 1205 - protein, 745 aa, Homo sapiens
MERPPGLRPGAGGPWEMRERLGTGGFGNVCLYQHRELDLKIAIKSCRLELSTKNRERWCHEIQIMKKLNHANVVKACDVPEELNILIHDVPLLAMEYCSGGDLRKLLNKPENCCGLKESQILSLLSDIGSGIRYLHENKIIHRDLKPENIVLQDVGGKIIHKIIDLGYAKDVDQGSLCTSFVGTLQYLAPELFENKPYTATVDYWSFGTMVFECIAGYRPFLHHLQPFTWHEKIKKKDPKCIFACEEMSGEVRFSSHLPQPNSLCSLVVEPMENWLQLMLNWDPQQRGGPVDLTLKQPRCFVLMDHILNLKIVHILNMTSAKIISFLLPPDESLHSLQSRIERETGINTGSQELLSETGISLDPRKPASQCVLDGVRGCDSYMVYLFDKSKTVYEGPFASRSLSDCVNYIVQDSKIQLPIIQLRKVWAEAVHYVSGLKEDYSRLFQGQRAAMLSLLRYNANLTKMKNTLISASQQLKAKLEFFHKSIQLDLERYSEQMTYGISSEKMLKAWKEMEEKAIHYAEVGVIGYLEDQIMSLHAEIMELQKSPYGRRQGDLMESLEQRAIDLYKQLKHRPSDHSYSDSTEMVKIIVHTVQSQDRVLKELFGHLSKLLGCKQKIIDLLPKVEVALSNIKEADNTVMFMQGKRQKEIWHLLKIACTQSSARSLVGSSLEGAVTPQTSAWLPPTSAEHDHSLSCVVTPQDGETSAQMIEENLNCLGHLSTIIHEANEEQGNSMMNLDWSWLTE

SEQ ID NO: 1206 - DNA, 2633 bp, Homo sapiens
gattgttgcgcggtcgcatttttccggggagcgcggattcgcattcccaattttaggtggcagtcgcaacccatactattcggacagatggcacagaaaccgctgcgcctcttggcttgtggagatgttgaaggaaagtttgatattttattcaatagagttcaagcaattcagaagaaaagtggaaactttgatctgctgttgtgtgtaggaaatttctttggctccacccaagatgctgaatgggaggagtataagactggcatcaagaaagctcctattcagacatatgtgcttggtgctaataaccaggaaacagtaaaatatttccaggatgctgatggatgtgaattagctgaaaacattacttatctgggtcgtaaaggtatcttcactggaagctcggggctgcagattgtgtacctcagtgggacagaatccttaaatgagccagtaccaggttatagttttagtcccaaggatgtgtcttctctgagaatgatgctgtgtacaacctcccagtttaagggtgttgatatcttgctcacatccccatggcccaagtgtgtggggaactttgggaattcttctggagaagtggataccaaaaaatgtggttctgctttggtttccagtcttgccacgggcttgaaaccaagataccattttgctgctttggaaaagacctattatgagaggcttccatatcgaaaccatatcattctacaggaaaatgcacagcatgccacccggtttatagctctggcaaatgttggaaatccagaaaagaaaaagtatctttacgcgttcagtattgttcccatgaagctaatggatgcagcagaactggtaaaacagcctccggatgtcactgaaaacccttacagaaaatctgggcaggaagcatccataggaaagcaaattcttgcccctgtggaagaatcagcctgtcagtttttctttgatttaaatgaaaagcagggaaggaagcgttcatccacaggtagagatagcaaatcttctcctcatccaaagcagcctcgcaaacctcctcagcctccaggaccctgctggttttgccttgctagccctgaagtggaaaaacatttggtggtcaacatcggcacacattgctaccttgccctggccaaaggaggcttatctgatgaccatgtcctcatcctgcctattggacactaccagtcagtggtggagctttcagcagaggtggtagaagaggtggagaagtataaggccactctgagacggttctttaagagtcgagggaaatggtgtgttgtatttgagagaaattataagagccatcacctccagctacaggtcattcctgtcccaatcagctgctctactactgatgacattaaagatgccttcattacccaggcacaggagcagcagatagagctgttggaaatcccagagcactctgacatcaagcagattgcacagccaggagcagcatatttttatgttgaacttgacacaggagaaaagcttttccacagaattaaaaagaattttcctttgcagtttggaagggaggtcctggccagtgaagccatccttaatgttcctgataagtctgactggaggcagtgtcagatcagcaaggaagacgaggagaccctggctcgccgcttccggaaagactttgagccctatgactttactctggatgactaaaacaaagggaagaactttttatgaactccacaggaagtagtaaagcttttttttttttttaattaaaagaattttttttgagacaaagtctcgctctgtcacccaagcaggattgcagtggcataactgtggctcactgtagcctcaacctcctgggctctagagttcctcccacctcagcctcatgagtagctgggaccacaggcgcatgctaccatgcctggcaaacttttttgattttttatagagacaggagggtctccctgtgttgcccaggctggtctgtaatgcctaggctcaagggatcctctgccttggcttcttaacctgctgggattacaagcatgagacaccattcctggcctagaagcctatttttaaagaaactacaatctcccatggggactgtttccctgcctcttttgtgcagtcccatggaacttgcctacagcaagaggcctaagattgaatctttttggggaaaagtcattctaggatgaaaatcctatgttaaggccgggcgcagtggctcacgcctgtaatcccagtactttgggaagccgaggcaggtggatcacctgaggtgaggagtttgagaccagcctggccaacatggtgaaaccccgtctttactaaagctacaaaaattagctgggcgtggtgccaggcacttgtaatcccagctactcaggaggctgaggcaggagaattgcttgagcctgggaggtggaggttgcagtgagccaagatcgctccattgcactccagcctgggtgacagtgaaactccatctcaaaaataaaagaataaaagtatgtctgtcatccagctcctatgtctgttatccagctccaagtacagcttgtgtatatcaacattttcaaaaacctttaaactaccaaatgaaatccagatgtttttccatggtt

SEQ ID NO: 1207 - protein, 538 aa, Homo sapiens
MAQKPLRLLACGDVEGKFDILFNRVQAIQKKSGNFDLLLCVGNFFGSTQDAEWEEYKTGIKKAPIQTYVLGANNQETVKYFQDADGCELAENITYLGRKGIFTGSSGLQIVYLSGTESLNEPVPGYSFSPKDVSSLRMMLCTTSQFKGVDILLTSPWPKCVGNFGNSSGEVDTKKCGSALVSSLATGLKPRYHFAALEKTYYERLPYRNHIILQENAQHATRFIALANVGNPEKKKYLYAFSIVPMKLMDAAELVKQPPDVTENPYRKSGQEASIGKQILAPVEESACQFFFDLNEKQGRKRSSTGRDSKSSPHPKQPRKPPQPPGPCWFCLASPEVEKHLVVNIGTHCYLALAKGGLSDDHVLILPIGHYQSVVELSAEVVEEVEKYKATLRRFFKSRGKWCVVFERNYKSHHLQLQVIPVPISCSTTDDIKDAFITQAQEQQIELLEIPEHSDIKQIAQPGAAYFYVELDTGEKLFHRIKKNFPLQFGREVLASEAILNVPDKSDWRQCQISKEDEETLARRFRKDFEPYDFTLDD

SEQ ID NO: 1208 - DNA, 147 bp, Homo sapiens
agttgtggtggttttctttttggcacatttgttaagttttcaaatgggcctaactctgccacatatataatatcggagatggcaaaggcttgtgacggagatatctctcttaagcctttcctgcatcagagaatggctcccacatgt

SEQ ID NO: 1209 - DNA, 2024 bp, Homo sapiens
agtgaaggacttgaaattatggcagatggagaatggagccgacttgatggaatgaaggcaagtggagggatgtcggaacaggctgctttggctggattagcaccgggtgtaggcgggacacttagtcattctcccttggcccagacgatgccgccgtggagacagctgaggaagcaaaggagcctgctgaagctgacatcactgagctctgccgggacatgttctccaaaatggccacttacctgactggggaactgacggccaccagtgaagactataagctcctggaaaatatgaataaactcaccagcttgaagtatcttgaaatgaaagatattgctataaacattagtaggaacttaaaggacttaaaccagaaatatgctggactgcagccttatctggatcagatcaatgtcattgaagagcaggtagcagctcttgagcaggcagcttacaagttggatgcatattcaaaaaaactggaagccaagtacaagaagctggagaagcgatgagaaacttatttctatgggacagagtcttttttttttaatgtggaagaatgtcttataaaacctgaatcctgaggctgatgaattgtgaaaattcctcaaaaggaaattatgctggtcatcacaggaacatctcaacgttcgagtaaactggaggactgtggctattcctgaaccttctttgagacagaatccctcagaatctcacacttataacttcctaccttttacttgaatgctttgccatattcaggacagagactctcacaaagttcagaaaacagctggacttaccagtaaaatcaaatgagaggacctattttctctggtagtggttgattactacattattttcttaagtggctggttttttagttactatgtaaatggtcgtttttctgttaatgatgctaatgtgttgtaaacaagattctaaatttaaaaaggaaaacaaaacaaacttgttctttgcagcttatcaccttgtgaatgtcggtaacttacttttccataatattgcaaataacataaaatcttaaaataattccaagctgagtcttctagattgagcagaaatggtgaaaggagtattgataacttggcgtatgtgatgggcccctcttgtttattttctatgtgagtcacattgacatgcgatcagtttgggaaatgtgatgaaaacaaagactagatgggtatgtgtgtttatgtgttgggtagggaggtgacgattgccactcataaaataaaggattttataaaataccttcctactgtgtatgtaggatttggggggatcttagggacctaatcgacttctttgcacactaaaaacatcagacaatgggacatactgactgaccagtctaggttgaaagataggcagccttacccagaacacaacattagcagctgggaaggtgtctgaggtccccaattacatatcccaaagagtttcttacttctgtttctgtcatttcccctctgttccagacagtcatcatttatcctctgttcttcctggactgttgctgtggtctcttctcatcttaactgtcccttccaaccaccctccacactgctgccagagcaatcttaaaaatgtaaactggccctattactcctgcttagaaccctgtagtgacttatcatggcctctgaaaaatctagactttcattatgcatacaagtcccttgtgtttttttgtttgtttatagacagggtctctattgtcacccaggctggagtgtggtggtgtgataatagctcaccttgacctcctaggctcaactgatcttcccacctcagcctcctgaatagctgggactaccagcacgctccaccatgccttgctaattattttttatacagatggagtctcactatgttgtccaggctggtcttgaactggcctcaagtgattctcttaccacagcctgccagagtgctgagattgtaggcatgaaccaccgtgcctaacataaggcccctatttaaacatttttctt

SEQ ID NO: 1210 - protein, 99 aa, Homo sapiens
MFSKMATYLTGELTATSEDYKLLENMNKLTSLKYLEMKDIAINISRNLKDLNQKYAGLQPYLDQINVIEEQVAALEQAAYKLDAYSKKLEAKYKKLEKR

SEQ ID NO: 1211 - DNA, 1958 bp, Homo sapiens
ccggaaacagcgcggggtccgctatggcggcggcagccgagggcgtactggcgacccggagtgatgagcccgcccgagacgatgccgccgtggagacagctgaggaagcaaaggagcctgctgaagctgacatcactgagctctgccgggacatgttctccaaaatggccacttacctgactggggaactgacggccaccagtgaagactataagctcctggaaaatatgaataaactcaccagcttgaagtatcttgaaatgaaagatattgctataaacattagtaggaacttaaaggacttaaaccagaaatatgctggactgcagccttatctggatcagatcaatgtcattgaagagcaggtagcagctcttgagcaggcagcttacaagttggatgcatattcaaaaaaactggaagccaagtacaagaagctggagaagcgatgagaaacttatttctatgggacagagtcttttttttttaatgtggaagaatgtcttataaaacctgaatcctgaggctgatgaattgtgaaaattcctcaaaaggaaattatgctggtcatcacaggaacatctcaacgttcgagtaaactggaggactgtggctattcctgaaccttctttgagacagaatccctcagaatctcacacttataacttcctaccttttacttgaatgctttgccatattcaggacagagactctcacaaagttcagaaaacagctggacttaccagtaaaatcaaatgagaggacctattttctctggtagtggttgattactacattattttcttaagtggctggttttttagttactatgtaaatggtcgtttttctgttaatgatgctaatgtgttgtaaacaagattctaaatttaaaaaggaaaacaaaacaaacttgttctttgcagcttatcaccttgtgaatgtcggtaacttacttttccataatattgcaaataacataaaatcttaaaataattccaagctgagtcttctagattgagcagaaatggtgaaaggagtattgataacttggcgtatgtgatgggcccctcttgtttattttctatgtgagtcacattgacatgcgatcagtttgggaaatgtgatgaaaacaaagactagatgggtatgtgtgtttatgtgttgggtagggaggtgacgattgccactcataaaataaaggattttataaaataccttcctactgtgtatgtaggatttggggggatcttagggacctaatcgacttctttgcacactaaaaacatcagacaatgggacatactgactgaccagtctaggttgaaagataggcagccttacccagaacacaacattagcagctgggaaggtgtctgaggtccccaattacatatcccaaagagtttcttacttctgtttctgtcatttcccctctgttccagacagtcatcatttatcctctgttcttcctggactgttgctgtggtctcttctcatcttaactgtcccttccaaccaccctccacactgctgccagagcaatcttaaaaatgtaaactggccctattactcctgcttagaaccctgtagtgacttatcatggcctctgaaaaatctagactttcattatgcatacaagtcccttgtgtttttttgtttgtttatagacagggtctctattgtcacccaggctggagtgtggtggtgtgataatagctcaccttgacctcctaggctcaactgatcttcccacctcagcctcctgaatagctgggactaccagcacgctccaccatgccttgctaattattttttatacagatggagtctcactatgttgtccaggctggtcttgaactggcctcaagtgattctcttaccacagcctgccagagtgctgagattgtaggcatgaaccaccgtgcctaacataaggcccctatttaaacatttttctt

SEQ ID NO: 1212 - protein, 142 aa, Homo sapiens
MAAAAEGVLATRSDEPARDDAAVETAEEAKEPAEADITELCRDMFSKMATYLTGELTATSEDYKLLENMNKLTSLKYLEMKDIAINISRNLKDLNQKYAGLQPYLDQINVIEEQVAALEQAAYKLDAYSKKLEAKYKKLEKR

SEQ ID NO: 1213 - DNA, 3060 bp, Homo sapiens
cagcatcgccttttcctcccgtttctccttccactcccagctccacatcctcctcctattctcccctctcccctcttcaaacccccaccttccagttccctcacctcccctttcggctggtcccctggggcttgcagcaagagggagagagagctcctgacaggattgatggtccttccccaccctgtcctctcatccgctccctccccagcaggcacagacatccccctacaaaaggcaggagcccaggctgtgtggaaacagctgctctcagacgcctttccatttgctctctgctggctaggctgggctgtgcctctgctccctcttcctctagctgagagtgggcacctggggtaccgggcccccccacctcattccccatgaatgctgtgggaagtcctgaggggcaggagctgcaaaagctggggagtggagcctgggacaaccccgcctacagtggtcccccttccccacacgggacgctgagagtctgcaccatctccagcacggggcctctccagccccaacccaagaagcctgaagatgaaccccaggagacggcatacaggacccaggtgtccagctgctgcctccatatctgtcaaggcatcagaggactttggggaacaaccctgactgagaacacagctgagaaccgggaactttatatcaagaccaccctgagggagctgttggtatatattgtgttcctggtggacatctgtctactgacctatggaatgacaagctccagtgcttattactacaccaaagtgatgtctgagctcttcttacatactccatcagacactggagtctcctttcaggccatcagcagcatggcggacttctgggattttgcccagggcccactactggacagtttgtattggaccaaatggtacaacaaccagagcctgggccatggctcccactccttcatctactatgagaacatgctgctgggggttccgaggctgcggcagctaaaggtccgcaatgactcctgtgtggtgcatgaagacttccgggaggacattctgagctgctatgatgtctactctccagacaaagaagaacaactcccctttgggcccttcaatggcacagcgtggacataccactcgcaggatgagttggggggcttctcccactggggcaggctcacaagctacagcggaggtggctactacctggaccttccaggatcccgacagggtagtgcagaggctctccgggcccttcaggaggggctgtggctggacaggggcactcgagtggtgttcatcgacttctcagtctacaatgccaatatcaatcttttctgtgtcctgaggctggtggtggagtttccagctacaggaggtgccatcccatcctggcaaatccgcacagtcaagctgatccgctatgtcagcaactgggacttctttatcgttggctgtgaggtcatcttctgcgtcttcatcttctactatgtggtggaagagatcctggagctccacattcaccggcttcgctacctcagcagcatctggaacatactggacctggtggtcatcttgctctccattgtggctgtgggcttccacatattccgaaccctcgaggtgaatcggctcatggggaagctcctgcagcagccaaacacgtatgcagactttgagttcctcgccttctggcagacacagtacaacaacatgaatgctgtcaacctcttcttcgcctggatcaagatattcaagtacatcagcttcaacaaaaccatgacccagctctcctccacgctggcccgctgtgccaaggacatcctgggcttcgccgtcatgttcttcattgttttcttcgcctatgcccaactcggctacctgcttttcgggacccaagtggaaaactttagcactttcatcaagtgcattttcactcagttccggataatcctcggggactttgactacaatgctatcgacaatgccaaccgcatcctgggccctgcctactttgtcacctatgtcttcttcgtcttcttcgtgctcctgaacatgttcctggccatcatcaatgacacatattcagaggtcaaggaggagctggctggacagaaggatgagctgcaactttctgacctcctgaaacagggctacaacaagaccctactaagactgcgtctgaggaaggagagggtttcggatgtgcagaaggtcctgcagggtggggagcaggagatccagtttgaggatttcaccaacaccttaagggaactgggacacgcagagcatgaaatcactgagctcacggccaccttcaccaagtttgacagagatgggaatcgtattctggatgagaaggaacaggaaaaaatgcgacaggacctggaggaagagagggtggccctcaacactgagattgagaaactaggccgatctattgtgagcagcccacaaggcaaatcgggtccagaggctgccagagcaggaggctgggtttcaggagaagaattctacatgctcacaaggagagttctgcagctggagactgtcctggaaggagtagtgtcccagattgatgctgtaggctcaaagctgaaaatgctggagaggaaggggtggctggctccctccccaggcgtgaaggaacaagctatttggaagcacccgcagccagccccagctgtgaccccagacccctggggagtccagggtgggcaggagagtgaggttccctataaaagagaagaggaagccttagaggagaggagactctcccgtggtgagattccaacgttgcagaggagttaagtgtgaggcactcccggagcaaagtctatgaaggatcttctgcaagaggctgcctcctggtccactgaacctggaaactgagtgggctttaaccaggagataaaaatggagcctgaagggaatcaggcaaggaaatgaactcaggattcagagatctttgaattaatatgtggtgggttctgacattattcttccataagaccatgtgggtttccatggtggctatcaataaaactccttaggaaaacttaaaaaaaaa

SEQ ID NO: 1214 - protein, 805 aa, Homo sapiens
MNAVGSPEGQELQKLGSGAWDNPAYSGPPSPHGTLRVCTISSTGPLQPQPKKPEDEPQETAYRTQVSSCCLHICQGIRGLWGTTLTENTAENRELYIKTTLRELLVYIVFLVDICLLTYGMTSSSAYYYTKVMSELFLHTPSDTGVSFQAISSMADFWDFAQGPLLDSLYWTKWYNNQSLGHGSHSFIYYENMLLGVPRLRQLKVRNDSCVVHEDFREDILSCYDVYSPDKEEQLPFGPFNGTAWTYHSQDELGGFSHWGRLTSYSGGGYYLDLPGSRQGSAEALRALQEGLWLDRGTRVVFIDFSVYNANINLFCVLRLVVEFPATGGAIPSWQIRTVKLIRYVSNWDFFIVGCEVIFCVFIFYYVVEEILELHIHRLRYLSSIWNILDLVVILLSIVAVGFHIFRTLEVNRLMGKLLQQPNTYADFEFLAFWQTQYNNMNAVNLFFAWIKIFKYISFNKTMTQLSSTLARCAKDILGFAVMFFIVFFAYAQLGYLLFGTQVENFSTFIKCIFTQFRIILGDFDYNAIDNANRILGPAYFVTYVFFVFFVLLNMFLAIINDTYSEVKEELAGQKDELQLSDLLKQGYNKTLLRLRLRKERVSDVQKVLQGGEQEIQFEDFTNTLRELGHAEHEITELTATFTKFDRDGNRILDEKEQEKMRQDLEEERVALNTEIEKLGRSIVSSPQGKSGPEAARAGGWVSGEEFYMLTRRVLQLETVLEGVVSQIDAVGSKLKMLERKGWLAPSPGVKEQAIWKHPQPAPAVTPDPWGVQGGQESEVPYKREEEALEERRLSRGEIPTLQRS

SEQ ID NO: 1215 - DNA, 5473 bp, Homo sapiens
ggcaggacgaggtggcaccaaattcccttcggccaatgacgagccggagtttacagaagcctcattagcatttccccagaggcaggggcaggggcagaggccgggtggtgtggtgtcggtgtcggcagcatccccggcgccctgctgcggtcgccgcgagcctcggcctctgtctcctccccctcccgcccttacctccacgcgggaccgcccgcgccagtcaactcctcgcactttgcccctgcttggcagcggataaaagggggctgaggaaataccggacacggtcacccgttgccagctctagcctttaaattcccggctcggggacctccacgcaccgcggctagcgccgacaaccagctagcgtgcaaggcgccgcggctcagcgcgtaccggcgggcttcgaaaccgcagtcctccggcgaccccgaactccgctccggagcctcagccccctggaaagtgatcccggcatccgagagccaagatgccggcccacttgctgcaggacgatatctctagctcctataccaccaccaccaccattacagcgcctccctccagggtcctgcagaatggaggagataagttggagacgatgcccctctacttggaagacgacattcgccctgatataaaagatgatatatatgaccccacctacaaggataaggaaggcccaagccccaaggttgaatatgtctggagaaacatcatccttatgtctctgctacacttgggagccctgtatgggatcactttgattcctacctgcaagttctacacctggctttggggggtattctactattttgtcagtgccctgggcataacagcaggagctcatcgtctgtggagccaccgctcttacaaagctcggctgcccctacggctctttctgatcattgccaacacaatggcattccagaatgatgtctatgaatgggctcgtgaccaccgtgcccaccacaagttttcagaaacacatgctgatcctcataattcccgacgtggctttttcttctctcacgtgggttggctgcttgtgcgcaaacacccagctgtcaaagagaaggggagtacgctagacttgtctgacctagaagctgagaaactggtgatgttccagaggaggtactacaaacctggcttgctgatgatgtgcttcatcctgcccacgcttgtgccctggtatttctggggtgaaacttttcaaaacagtgtgttcgttgccactttcttgcgatatgctgtggtgcttaatgccacctggctggtgaacagtgctgcccacctcttcggatatcgtccttatgacaagaacattagcccccgggagaatatcctggtttcacttggagctgtgggtgagggcttccacaactaccaccactcctttccctatgactactctgccagtgagtaccgctggcacatcaacttcaccacattcttcattgattgcatggccgccctcggtctggcctatgaccggaagaaagtctccaaggccgccatcttggccaggattaaaagaaccggagatggaaactacaagagtggctgagtttggggtccctcaggttcctttttcaaaaaccagccaggcagaggttttaatgtctgtttattaactactgaataatgctaccaggatgctaaagatgatgatgttaacccattccagtacagtattcttttaaaattcaaaagtattgaaagccaacaactctgcctttatgatgctaagctgatattatttcttctcttatcctctctctcttctaggcccattgtcctccttttcactttattgctatcgccctcctttcccttattgcctcccaggcaagcagctggtcagtctttgctcagtgtccagcttccaaagcctagacaacctttctgtagcctaaaacgaatggtctttgctccagataactctctttccttgagctgttgtgagctttgaagtaggtggcttgagctagagataaaacagaatcttctgggtagtcccctgttgattatcttcagcccaggcttttgctagatggaatggaaaagcaacttcatttgacacaaagcttctaaagcaggtaaattgtcgggggagagagttagcatgtatgaatgtaaggatgagggaagcgaagcaagaggaacctctcgccatgatcagacatacagctgcctacctaatgaggacttcaagccccaccacatagcatgcttcctttctctcctggctcggggtaaaaagtggctgcggtgtttggcaatgctaattcaatgccgcaacatatagttgaggccgaggataaagaaaagacattttaagtttgtagtaaaagtggtctctgctggggaagggttttcttttctttttttctttaataacaaggagatttcttagttcatatatcaagaagtcttgaagttgggtgtttccagaattggtaaaaacagcagctcatagaattttgagtattccatgagctgctcattacagttctttcctctttctgctctgccatcttcaggatattggttcttcccctcatagtaataagatggctgtggcatttccaaacatccaaaaaaagggaaggatttaaggaggtgaagtcgggtcaaaaataaaatatatatacatatatacattgcttagaacgttaaactattagagtatttcccttccaaagagggatgtttggaaaaaactctgaaggagaggaggaattagttgggatgccaatttcctctccactgctggacatgagatggagaggctgagggacaggatctataggcagcttctaagagcgaacttcacataggaagggatctgagaacacgttgccaggggcttgagaaggttactgagtgagttattgggagtcttaataaaataaactagatattaggtccattcattaattagttccagtttctccttgaaatgagtaaaaactagaaggcttctctccacagtgttgtgccccttcactcatttttttttgaggagaagggggtctctgttaacatctagcctaaagtatacaactgcctggggggcagggttaggaatctcttcactaccctgattcttgattcctggctctaccctgtctgtcccttttctttgaccagatctttctcttccctgaacgttttcttctttccctggacaggcagcctcctttgtgtgtattcagaggcagtgatgacttgctgtccaggcagctccctcctgcacacagaatgctcagggtcactgaaccactgcttctcttttgaaagtagagctagctgccactttcacgtggcctccgcagtgtctccacctacacccctgtgctcccctgccacactgatggctcaagacaaggctggcaaaccctcccagaaacatctctggcccagaaagcctctctctccctccctctctcatgaggcacagccaagccaagcgctcatgttgagccagtgggccagccacagagcaaaagagggtttattttcagtcccctctctctgggtcagaaccagagggcatgctgaatgccccctgcttacttggtgagggtgccccgcctgagtcagtgctctcagctggcagtgcaatgcttgtagaagtaggaggaaacagttctcactgggaagaagcaagggcaagaacccaagtgcctcacctcgaaaggaggccctgttccctggagtcagggtgaactgcaaagctttggctgagacctgggatttgagataccacaaaccctgctgaacacagtgtctgttcagcaaactaaccagcattccctacagcctagggcagacaatagtatagaagtctggaaaaaaacaaaaacagaatttgagaaccttggaccactcctgtccctgtagctcagtcatcaaagcagaagtctggctttgctctattaagattggaaatgtacactaccaaacactcagtccactgttgagccccagtgctggaagggaggaaggcctttcttctgtgttaattgcgtagaggctacaggggttagcctggactaaaggcatccttgtcttttgagctattcacctcagtagaaaaggatctaagggaagatcactgtagtttagttctgttgacctgtgcacctaccccttggaaatgtctgctggtatttctaattccacaggtcatcagatgcctgcttgataatatataaacaataaaaacaactttcacttcttcctattgtaatcgtgtgccatggatctgatctgtaccatgaccctacataaggctggatggcacctcaggctgagggccccaatgtatgtgtggctgtgggtgtgggtgggagtgtgtctgctgagtaaggaacacgattttcaagattctaaagctcaattcaagtgacacattaatgataaactcagatctgatcaagagtccggatttctaacagtccttgctttggggggtgtgctgacaacttagctcaggtgccttacatcttttctaatcacagtgttgcatatgagcctgccctcactccctctgcagaatccctttgcacctgagaccctactgaagtggctggtagaaaaaggggcctgagtggaggattatcagtatcacgatttgcaggattcccttctgggcttcattctggaaacttttgttagggctgcttttcttaagtgcccacatttgatggagggtggaaataatttgaatgtatttgatttataagttttttttttttttttgggttaaaagatggttgtagcatttaaaatggaaaattttctccttggtttgctagtatcttgggtgtattctctgtaagtgtagctcaaataggtcatcatgaaaggttaaaaaagcgaggtggccatgttatgctggtggttaaggccagggcctctccaaccactgtgccactgacttgctgtgtgaccctgggcaagtcacttaactataaggtgcctcagttttccttctgttaaaatggggataataatactgacctacctcaaagggcagttttgaggcatgactaatgctttttagaaagcattttgggatccttcagcacaggaattctcaagacctgagtattttttataataggaatgtccaccatgaacttgatacgtccgtgtgtcccagatgctgtcattagtctatatggttctccaagaaactgaatgaatccattggagaagcggtggataactagccagacaaaatttgagaatacataaacaacgcattgccacggaaacatacagaggatgccttttctgtgattgggtgggattttttccctttttatgtgggatatagtagttacttgtgacaagaataattttggaataatttctattaatatcaactctgaagctaattgtactaatctgagattgtgtttgttcataataaaagtgaagtgaatctgattgcaaaaaa

SEQ ID NO: 1216 - protein, 359 aa, Homo sapiens
MPAHLLQDDISSSYTTTTTITAPPSRVLQNGGDKLETMPLYLEDDIRPDIKDDIYDPTYKDKEGPSPKVEYVWRNIILMSLLHLGALYGITLIPTCKFYTWLWGVFYYFVSALGITAGAHRLWSHRSYKARLPLRLFLIIANTMAFQNDVYEWARDHRAHHKFSETHADPHNSRRGFFFSHVGWLLVRKHPAVKEKGSTLDLSDLEAEKLVMFQRRYYKPGLLMMCFILPTLVPWYFWGETFQNSVFVATFLRYAVVLNATWLVNSAAHLFGYRPYDKNISPRENILVSLGAVGEGFHNYHHSFPYDYSASEYRWHINFTTFFIDCMAALGLAYDRKKVSKAAILARIKRTGDGNYKSG

SEQ ID NO: 1217 - DNA, 4011 bp, Homo sapiens
ggcgggcacccgcgcgcgcacactcgcacaccgcacctcagctcctgcccggcctcgcccccacccgcgagcgccgaacctcctggggccggatgccatgggtaacaacttctccagtatcccctcgctgccccgaggaaacccgagccgcgcgccgcggggccacccccagaacctcaaagactctatcgggggccccttccccgtcacttctcaccgatgccaccacaagcagaagcactgtccggcagtgctgcccagcggggggctcccagccgcgccgctgctcttccacccgcacaccaagggctcccagatcctcatggacctcagccacaaggctgtcaagaggcaggccagcttctgcaacgccatcaccttcagcaaccgcccggtcctcatctacgagcaagtcaggctgaagatcaccaagaagcagtgctgctggagcggggccctgcggctgggcttcaccagcaaggacccgtcccgcatccaccctgactcgctgcccaagtacgcctgccccgacctggtgtcccagagtggcttctgggccaaggcgctgcctgaggagtttgccaatgagggcaacatcatcgcattctgggtggacaagaagggccgtgtcttccaccgcatcaacgactcggctgttatgctgttcttcagcggggtccgcacggccgacccgctctgggccctggtggacgtctacggcctcacgcggggcgtccagctgcttgatagcgagctggtgctcccggactgtctgcggccgcgctccttcaccgccctgcggcggccgtcgctgcggcgcgaggcggacgacgcgcgcctctcggtgagcctatgcgacctcaacgtgccgggcgcggacggcgacgaggccgcgccggccgccagctgccccatcccgcagaactcactcaactcgcagcacagccgcgcgctgccggcgcagctcgacggcgacctgcgtttccacgccctgcgcgccggcgcgcacgtccgcatcctcgacgagcagacggtggcgcgcgtggagcacgggcgcgacgagcgcgcgctcgtcttcaccagccggcccgtgcgcgtggccgagaccatcttcgtcaaggtcacgcgctcgggtggcgcgcggcccggcgcgctgtcgttcggcgtcaccacgtgcgaccccggcacgctgcggccggccgacctgcccttcagccctgaggccctggtggaccgcaaggaattctgggccgtgtgccgcgtgcccgggcccctgcacagcggcgacatcctgggcctggtggtcaacgccgacggcgagctgcacctcagccacaatggcgcggccgccggcatgcagctgtgcgtggacgcctcgcagccgctttggatgctcttcggcctgcacgggaccatcacgcagatccgcatcctcggctccactatcctggccgagcggggtatcccatcactcccctgctcccctgcctccacgccaacctcgcccagtgccctgggcagcggcctgtctgaccccttgctcagcacgtgcagctctggccctctgggtagctctgctggtgggacagcccccaattcgccagtgagcctgcccgagtcgccagtgaccccaggtctgggccagtggagcgatgagtgcaccatttgctatgaacacgcggtggacacggtcatctacacatgtggccacatgtgcctctgctacgcctgtggcctgcgcctcaagaaggctctgcacgcctgctgccccatctgccgccgccccatcaagggcatcatcaagacctaccgcagctcctagcccgttgcggtggcccatcccgcatacccatcttctcgggcttcagcccagtcccagctgaggaacaagccagtggggccccttctcttcctcattttggaaacttttcctcctctattaaacatgggaaactgaagcccttgaaggtttggggagaggggggtatcaggcagggagggggcagaggcaaatcaccgggcagagggaggggaggagaggaggccgcactctccctgtctctcccgtctctgcacccagctcctctctgcatgctgagggctaaattgggatctcagcctgccctaatctttccccatttgaggcaggtttctaggaggtgtctgtagtccatgtggcacctttgtgagaattagaaaacatgtaccttcctctgggcagctgcagccctgagccaggacatgtggcctggctagtgcagcatggagtggattttaggctcatttgccctctcagccaactgcccttgtgcagtgtacagcctgctcaacaaccgccctgggcaggccgctcctgagctgctgtctccctctctgacctatgcctaccttctctttcttcgttccctgcccactgggcatggcagctgggggtgagaggctggtggttgcctcccgtcctgggcaggctgcagcctcatgccatgtctctctcccactacctgatgggcacatggacaggctgcagagggctccaggttctgggcccctggctgagaaggggaggatcctgtcctggctgtagccttcctgccccaatcatctcgctggatgccattgcccaggggtagcccttcggtatgggctggggagaagggttggtcttctgccagggtccctaagaacaggtttgcagctaccctctctgaccttttccccatatcttgtgctgtccagggcctaggctgatagtcagagcctgtggcacacctgggatgggccagggccctgggtggggaggtgtgggttccctgggccaagaccagcctttttactcagtttaattaatttatttatttggtttgtggttttgggttttttttgtttgtttgtttgtaggtgagttcccatcctctgggcccctagaaatgctgcctttgtgtgtggggtacctgggaaagggtgtggctgaggcagtcataatgcagtatcttcccctgactccagccacaaagctcatacccagccctaccaatcatgaattggaactccataaggaggggccaaattgggaggccttttggcaaacagtgtctattttacagagaggcaaaccaagcctccttagtgccctggggctgatggtcacccagagccatagagcacccttcctcctgggccagagctgggttatcatggttggcttaggtacctcaggtggcccaggaggtcccccctccataaggacgtcaaacttctaggagggccagtgttcctagtgtgggccaggaacaggacagggagaccttgtgatggcggggcagggagcctgttcgtagggaagatgaggaggcaagggctgcctctaacacctccaggttctctaagttctggggagggagcgccccacctgctgaggtcggtcctctcagccctgcctgccctggcctgggctctcccagcctcccagccctctgccccctcagatggctttttgtttttgtttttttttgcatccatcagagactgcacctctgtgtggcaggcagggcatgggttttagtcctggccactgaccagctgtgtggccctggccgagtcgtagccccctggagcccagcttccatttctataaaatggttgtttcgggagagaggggcaggctttctgtgtgactcgggagttcttccgtgagggctgccagggggtggtgtgccaggacctcaggctgggcctttgtgctggccttgcagtgggtgtgtggggaagtcactgtcccactatgggtctccactacccagtcactgaccctgggagaccccttctgtgtgggagggagcgggggctggctagcgggccccccagccagggatcccagaggctgagggttggggggaggaagccatcatctcattacctctgtcagtgcaggggtggctgctgcttcccttgtgcacttgggtcgctgtgattgtgaataaaagtgatttcgtaccaaaaaaaaaaaaaaaa

SEQ ID NO: 1218 - protein, 574 aa, Homo sapiens
MGNNFSSIPSLPRGNPSRAPRGHPQNLKDSIGGPFPVTSHRCHHKQKHCPAVLPSGGLPAAPLLFHPHTKGSQILMDLSHKAVKRQASFCNAITFSNRPVLIYEQVRLKITKKQCCWSGALRLGFTSKDPSRIHPDSLPKYACPDLVSQSGFWAKALPEEFANEGNIIAFWVDKKGRVFHRINDSAVMLFFSGVRTADPLWALVDVYGLTRGVQLLDSELVLPDCLRPRSFTALRRPSLRREADDARLSVSLCDLNVPGADGDEAAPAASCPIPQNSLNSQHSRALPAQLDGDLRFHALRAGAHVRILDEQTVARVEHGRDERALVFTSRPVRVAETIFVKVTRSGGARPGALSFGVTTCDPGTLRPADLPFSPEALVDRKEFWAVCRVPGPLHSGDILGLVVNADGELHLSHNGAAAGMQLCVDASQPLWMLFGLHGTITQIRILGSTILAERGIPSLPCSPASTPTSPSALGSGLSDPLLSTCSSGPLGSSAGGTAPNSPVSLPESPVTPGLGQWSDECTICYEHAVDTVIYTCGHMCLCYACGLRLKKALHACCPICRRPIKGIIKTYRSS

SEQ ID NO: 1219 - DNA, 11264 bp, Homo sapiens
ccgggagtccgggcagcgttcggcgcgccgggccggggtggcgggcggccccgggaccccggcagctggagaaggagccggagcccggccgggatgagaaggtgacgccgccgggggcgccactcgctttgtgggggaagatgctcgcctactgcgtgcaggatgccaccgtggtggacgtggagaagcggaggaacccctccaagcactacgtatacataatcaatgtgacctggtctgactccacctcccagactatctaccggaggtacagcaagttctttgacctgcagatgcagcttttggataagtttcccattgaaggtggccagaaggaccccaagcaaaggatcatccccttcctcccaggcaagatcctcttccgcagaagccacatccgggacgtagctgtgaagagactgaagcccatcgatgaatactgccgggcacttgtccggctgcccccccacatctcacagtgtgacgaagtcttccggttcttcgaggctcgacccgaggatgtcaaccctccaaaagaggactatggcagttccaagaggaaatcagtgtggctgtccagctgggctgagtcgcccaagaaggacgtgacaggtgccgacgccaccgccgagcccatgatcctggaacagtacgtggtggtgtccaactataagaagcaggagaactcggagctgagcctccaggccggggaggtggtggatgtcatcgagaagaacgagagcggctggtggttcgtgagcacttctgaggagcagggctgggtccctgccacctacctggaggcccagaatggtactcgggatgactccgacatcaacacctctaagactggagaagaggagaagtatgtcaccgtgcagccttacaccagccaaagcaaggacgagattggctttgagaagggcgtcacagtggaggtgatccggaagaatctggaaggctggtggtatatcagatacctgggcaaagagggctgggcgccagcatcctacctgaagaaggccaaggatgacctgccaacccggaagaagaacctggccggcccagtggagatcattgggaacatcatggagatcagcaacctgctgaacaagaaggcgtctggggacaaggaaactccaccagccgaaggcgagggccatgaggcccccattgccaagaaggagatcagcctgcccatcctctgcaatgcctccaatggcagtgccgtgggcgttcctgacaggactgtctccaggctggcccagggctctccagctgtggccaggattgcccctcagcgggcccagatcagctccccgaacctacggacaagacctccaccacgcagagaatccagcctggggttccaactgccaaagccaccagagcccccttctgttgaggtggagtactacaccattgccgaattccagtcgtgcatttccgatggcatcagctttcggggtggacagaaggcagaggtcattgataagaactcaggtggctggtggtacgtgcagatcggtgagaaggagggctgggcccccgcatcatacatcgataagcgcaagaagcccaacctgagccgccgcacaagcacgctgacccggcccaaggtgcccccgccagcaccccccagcaagcccaaggaggccgaggagggccctacgggggccagtgagagccaggactccccgcggaagctcaagtatgaggagcctgagtatgacatccctgcattcggctttgactcagagcctgagctgagcgaggagcccgtggaggacagagcctcaggggagaggcggcctgcccagccccaccggccctcgccggcctcttctctgcagcgggcccgcttcaaggtgggtgagtcttcagaggatgtggccctggaagaggagaccatctatgagaatgagggcttccggccatatgcagaggacaccctgtcagccagaggctcctccggggacagcgactccccaggcagctcctcgctgtccctgaccaggaaaaactcccccaaatcaggctcccccaagtcatcatcactcctaaagctcaaggcagagaagaatgcccaggcagaaatggggaagaaccactcctcagcctccttttcctcatccatcaccatcaacaccacttgctgctcctcctcttcctcctcctcctcttccttgtccaaaaccagtggcgacctgaagccccgctctgcttcggacgcaggcatccgcggcactcccaaggtcagggcaaagaaggatgctgatgcgaacgctgggctgacctcctgtccccgggccaagccatcggtccggcccaagccattcctaaaccgagcagagtcgcagagccaagagaagatggacatcagcactttacggcgccagctgagacccacaggccagctccgtggagggctcaagggctccaagagtgaggattcggagctgcccccgcagacggcctccgaggctcccagtgaggggtctaggagaagctcatccgacctcatcaccctcccagccaccactcccccatgtcccaccaagaaggaatgggaagggccagccacctcgtacatgacatgcagcgcctaccagaaggtccaggactcggagatcagcttccccgcgggcgtggaggtgcaggtgctggagaagcaggagagcgggtggtggtatgtgaggtttggggagctggagggctgggccccttcccactatttggtgctggatgagaacgagcaacctgacccctctggcaaagagctggacacagtgcccgccaagggcaggcagaacgaaggcaaatcagacagcctggagaagatcgagaggcgcgtccaagcactgaacaccgtcaaccagagcaagaaggccacgccccccatcccctccaaacctcccgggggcttcggcaagacctcaggcactccagcggtgaagatgaggaacggagtgcggcaggtggcggtcaggccccagtcggtgtttgtgtccccgccacccaaggacaacaacctgtcctgcgccctgcggaggaatgagtcactcacggccactgatggcctccgaggcgtccgacggaactcctcctttagcactgctcgctccgctgccgccgaggccaagggccgcctggccgaacgggctgccagccagggttcagactcacccctactgcccgcccagcgcaacagcatacccgtgtcccctgtgcgccccaagcccatcgagaagtctcagttcatccacaataacctcaaagatgtgtacgtctctatcgcagactacgagggggatgaggagacagcaggcttccaggagggggtgtccatggaggttctggagaggaaccctaatggctggtggtactgccagatcctggatggtgtgaagcccttcaaaggctgggtgccttccaactaccttgagaaaaagaactagcagagggcctgggctcttccagcctcagtgtgcctctctggccgcccactggatgagcggtgagacgaacaaaagggaaaggaaaaaatgggggtggggggtggggggtggacaacattcaacactgcagaatgggtgacctcaaagatgccccctgtccaagccatcccacagctggaaggtaggggatgggggtgcccacactgagtgaggaagggaatggaccagggagtcccaggcctgggacccagagccaagaaagctgagatatcctgtgcaccatagggacttcaccaatggattacatgccatctgggacaggccatgtgggagaccccagttgtgcctttgctacagatctggaaaagacaaggtcatgggggcctccagtgtcctgcccctgcttggcccagttttgattgctggcatcttgccaccccaggtatccctggtattgtcctaagctgtatttgtgaattgtgctggtttcctgggcattgccacgcctaccacaggtgggtacattagaagccaccactggctttcaggcttgggggtgtcttctgagctcaagcctgcttctgggccaggccattgtcactgttagttgaagaaaaagcagttcccaggtgccagcaaagaccatctttcataactgtcactgtcttggccttgagaagagagcccgctctccgtggggcaccccatggaggacacagtaccagagtttacagagagggtgggcgaagccaccggtctcttcctaatctgcacagactattttgggtatttctgggcgggcagttcctttgcatgtttcgggagaggtttgttgatttggggcttatatgtcaggcctttggtttgcgtcttattttaggggttgtttgggggcctgggtggtcggcctcacatgggaaggggatgggtagtggatggggtttctgttgtatcttgtgggcgggtgattttgcttttgtttttgtttcacattcttccccctccacaagccaaagtcgtttcatttggtttccactgtgtggactgtgctggagcttggcgcctgccagaaaaatttggggctaggcaagccccaggttgcagacatggtgaagcagagaaactgttcttctggttcctgcacaacctcagaggggcaaaaaccctccccaggaaggaggagggtgttcaggagccagacttttggagagaaggcagctcccagcctgctgggtgaccgccattctgcgtgtgttccccagctgggcagggctggaagccttacgtatgaagcatggagaagcagccattgtccccactatgggcagaggggggacccggctggccccttgggtcagactggagccaacaccgccagccaccccctctggcctgctggcaatgccacaggtgcccaagaagatggaggatccctgtgccaggagccaacctggtcttcccgagggtcagtgccccagtgaagacagaagcgagagaataaagttccctgtaggtcctctgtcacctttgggttgtgtttttcaattgttgacatttcagaggggaccctccagaagcccagccggcttcccccaaggactcccccttcgctgggagtggatttccacacgtgcctttgatttcggacagattgggcctcacagccaccgattcagctgccagggtccctggactgggggttggtgttttctatagaggaggaaaggccctccctcaccctgctccccacccaggcagggcagcatgggacccagtgtctcagtgccttcaaaacccacccccacccctaccctaccccaccacaccccatcccagaggccttgcctgggcaaccctaagcccctgtccctcgccatacactgatgcctggcagctagagcaaatggctcgtgttctttgtcgaaggcctgtggtgagattgttttgtttccttttgttttgtgagtttgtttaaaattgaaattagttattttcttctgctggacagtattaaatagagcaggatgttgagttaatctgctagattgcagtactaatggtagtggtttagtgtcttcatgttaatattatttgtacttatttgaacaataatgataaagaagtggttcattattttttaattaatgcactttaaataaggtagaatggaaaaaacccagagagcaaagtgcattacttaaagatgcagtatatacttttctcatttttaaacagcacatatttattaagagaaaaaaagtaatttatgactatttaaaataaaatttaaaagtagagtgactgtcaggtaaagaaccttcaatgtagctatcttccagggggagggccctgcagcctcgctcctcagatgtctgcactgagccagttcagtcactagtgcgccagccaggccaggagggagtgcagagcatgtctgccaagcacagagcatctcagttggactggaccacagtgctcccgagagcctgcctttcctgcccttccccaccacctgcactgccccccacattctcccagccccccccaaggaccccctctccttgacccccagtgctgtaagtaatagagtcattaaaatgcaggactgaaagagacctcagaggtctctatcccatcccttcctgttactgcggcccaaggacaggaaacaacttttccaaaatcccacagctagttaatgacagatctccccactacattaatcccgtgctcctcctcactgccattatagtttattgtgtggtcatgtttacattgtgacatccagccccaaggatggctgggagttgctcaggcatccaggaaaagtggggaatgctgccatctggtgacagcatgtagatttgggcagtgaacagggattgccatgccccagtcttcgcacctcgccccctcaccccctaactcacagcacaaaccctgcaaacccaaagagaatattaatacttgaagcaagaagggtgcatgccagtccttctccgacatggccagggggtaccaggccttgtgcgcctggcctcctagccctagccagggcgagagggcctttcccttgagctactgagctgctttgtgatgctgaaggatactgccggcagcaggcagaggagggagggggcctagggctctgacccatctggaggaaaaccagatcggactaaaaaaggaaaaagaaaaacaaaatctccgcagtgtccaaacctagtttcccatgagttgcgactgaaaatgtgaaacgacactgtattgctgtatactgcaactttaaccataatgagcccttctgaggtcattattgaggttcatataatgcccgaagatgcagcatttggtgctttgttttcctttccgtttcaagacctttttcttttattgcaaggggaaaaaaatgtcatctccccccacctcatccctctttgtgacagcagacctggctgtgttgcccctctcctcctcactattctcaccaggccatgggactttgggggcagtgagagagagctggaaaggggcaaccctgagcagcaggtgtgccccatgccctgtgggtttcccctatgtccaatgactgtagacgggctgtcttgccaggcctcagccccgtctaccctaagcctggccccaaaggtttctctttcttcctccttgattttccatcttgacgaaggcattatatagaatcattttaatcactttcagatgttagagcagcgtattttacaggcatttatatccattgctttcctcagcaaggcatgttactacttttatcatctaaggaaaaaagacaagggaattccagtcaggcattattttcctattactagtgtttgcagaataggtgtaggactatttaagtttagaccttggtttggtagttcttgtttttaataaggggaaaaagataaaataacccctatttttcctgttattgtatttaactaatatattatttctttaaggttactcacttcccctacccctccaaataccttgcattctcaatcaaaaatggaaacaatctgagagacaggaaaagtgcaatattaccaagatggatgccagggctcattggggacaatggagggaataccagtggcgctcagagagcaagaggcagggagcggggtgctgaaggaatcctagctgtggaacaggtgggtgggttggtggagtttgatcttgtggcgttctcctctcccccttctttgggaagatgataggggtccctgccagatccacccagaagaaagggattcaggcatggggcccttgacctctaggccccagtccctggagcagaggcaggccctcgggagctgttccttgttttgatttctgttgtggtgcagccagctgctcagagagacctggcctaaaaatgactcccagcagccctctctcaccccagtgtcctgatatttgggctgtgatccttctggtgtatgtttgaatctttctaaaactgggtgccctcagttcagtttctaggcaggaagcctagaagtcaccagatctttttgggggatgtgagaaccttgagccgcgcacaccctggtgagacaccaattcccacaagcctgcagcagggcctggggctgagcctgggctgcccattcatctcagcgacttcagcctgagaagtgagccctgcctgggctccacacccagagagtccatacaaattctgctccgggaagagtcggggggtctattcaagtttctctgcagacaaaacttcccacaacaggtaccaatctggcctccttcctcagcaccggtagagaaagcaacagaatgggaagtttcctctgggttggagcctcagagctctgcccctcaaggtgacagggacgtccctgtggcttgttccctccacctccagtactgtatgcttgctacttcaaccccctatttggtgaatttctgcacagacacagatctctgtgcctggaatgggactgtgccctgtgcgggtctctcccttggcgtatatccatctagatatttagtctttgagaatctcaaagcagagctctctgggaagagaactgtccacattgctaaataattaagattccctcacttttttgagggccatgtgttgtgagagagagagagagagagagagtgtgtgtgtgtgtgtgtgtgtgtgtgtgtctgtgtatgcaagtgttggtaacttcccacttgaactaaataacatggggttagagaaaaaaaaataccaggcaagctgtctccattgaacaagtccttggcaatgggcaggtcccaagggactcacagcttctggcagcaagtgtgtcattcacacacatcattctggctggagagtgcaatgtgtcatttttttttctttttgtaattattttattaagtatttagttggaaatttcacactggcattaacaggtctagcataagtggcctaggcagtcatcccaggctccaaaatgaagatgtgcaaaagagatgccactgggaatagaaacactgagttggttcagttaggtcatcccctgcagacgtgtcatcgagcaggctgactcccacccctcagccatgccatgggtatgagaagccccttataatgaaagctgccagccctttcgtccttgtttcagagggtgggtcaggtggttggggtgagaacttgctcacggtgcacccaacaagacctgcaggtgcatataagtttagtcccaactgcagggccagaccaaacacttcctgggaagtgtgtggagggctgtgctagaccttcctgagtttctggctaaatcatcagccctgtttggtgcagtctcatgtctctgtggttcccaagctgcatgatcagagccagtgagaagacaggatcagtgacccacagctttggggaaaaacagccccactgttaacttccctcctgcaaacctgggtccccaggccataaggtgggcacactggtgcttacagactgggtggagagccctaccttccaaggtcttgatcccagcctgcctataaggttgggattagcatgcaatcccccttccccaatcctgtctttttaaaatctcaagtttgcacttaaccttgacaacagcaccctctcctactccagtcctagaactcagtggccttagagaatggggtcccctgcactgaaggtccccgccttgctcccagttccatcctggccaataggctgcgcctcaagaggtgaaagagaaaaaagggagggagggaggaagaattatttagaacaaaaggatggctcgagcacgttagaggcaagtgagaggcacgttggtgagaagagcatgtgcatgtttggggtagctggggcctactgtcccttcattagggaaggaggcttccagaagcggatgtcttctagaaagaaaaattgtgtgaaggctgaaaaggggcttggagttttgtctttgttgattagaaagaaggaagaagtcagctctgagtgtttcaggaagaagagagcaggtagaaagggaatttagtgatttaacacccaagggtccagccatagcaggttggaaaatcctccaaatttggccacagaaactggctaggaaaaaactgccactcattgggccacacgctgggtccccatcagttctcaatgaatggtcattgatttacttagcagagagaagtcaccagccacaaaccaatctttgagtttgcaggccctgattccagaatatatgcatccagctcccgggttctcagctggttttgcccacttccctttgactgtccaatccaaagccagtctctcaagttgtatggctcaaagagcagtgaccacaatgggtcatacagtagggacccacctccacaaattagaaccagagttcagactccattgggcacatctgggaggaaggcaacctcctttgtcgtcttgttggtaccagtcattctcaagtatctctgacacctgtggtggttcagtttgctgagcctgccacctggtatgaattagactgggtgtgatgaacattcatccatggatataccctaccattttgcgttgccttataaccaaggcacactccccataagagtttactgcagagaaagaacagcaaaacagccaccctccttgaatttacaactcattatctgcaacaggttttctttaaatccaagacacaggatgggaaatgggtttccccaccaggtactcagaggtctgcaggaagtgactcccgggcaaggcagacttcagtaatccctgaagcgtgagcatgtggactgcatggctgggtggggactggtggatgtctctggagctccagaaccttggagaattcctcatggaattcccctcccagctcttagtgggctctgtggggtcaggaggagcccttcctccaggttttccttctttcctcctcagcagagaaactggagaaaggacattaaactcagtgcagtcgatttgagtgctgaaatatttccagaatcaatggtggtgctaaactatctccatgtttctagcatttttaatagtggagttggtttgtttttaatctcatcacaaaaatgcagtgcccttggggaagggaccagccccttggcctgccactttccaggtgtcctttatcactttgacgggactctttggtctgcagaaaatgctctgtcttggcatgcttctagactgtaagatttgggttttgttttgtattttatgtttacatgcatcttatatttccctgaaaactaaataaagttttgggcctttttaaccgaaaaaaaaaaaaaaaaaaa

SEQ ID NO: 1220 - protein, 1105 aa, Homo sapiens
MLAYCVQDATVVDVEKRRNPSKHYVYIINVTWSDSTSQTIYRRYSKFFDLQMQLLDKFPIEGGQKDPKQRIIPFLPGKILFRRSHIRDVAVKRLKPIDEYCRALVRLPPHISQCDEVFRFFEARPEDVNPPKEDYGSSKRKSVWLSSWAESPKKDVTGADATAEPMILEQYVVVSNYKKQENSELSLQAGEVVDVIEKNESGWWFVSTSEEQGWVPATYLEAQNGTRDDSDINTSKTGEEEKYVTVQPYTSQSKDEIGFEKGVTVEVIRKNLEGWWYIRYLGKEGWAPASYLKKAKDDLPTRKKNLAGPVEIIGNIMEISNLLNKKASGDKETPPAEGEGHEAPIAKKEISLPILCNASNGSAVGVPDRTVSRLAQGSPAVARIAPQRAQISSPNLRTRPPPRRESSLGFQLPKPPEPPSVEVEYYTIAEFQSCISDGISFRGGQKAEVIDKNSGGWWYVQIGEKEGWAPASYIDKRKKPNLSRRTSTLTRPKVPPPAPPSKPKEAEEGPTGASESQDSPRKLKYEEPEYDIPAFGFDSEPELSEEPVEDRASGERRPAQPHRPSPASSLQRARFKVGESSEDVALEEETIYENEGFRPYAEDTLSARGSSGDSDSPGSSSLSLTRKNSPKSGSPKSSSLLKLKAEKNAQAEMGKNHSSASFSSSITINTTCCSSSSSSSSSLSKTSGDLKPRSASDAGIRGTPKVRAKKDADANAGLTSCPRAKPSVRPKPFLNRAESQSQEKMDISTLRRQLRPTGQLRGGLKGSKSEDSELPPQTASEAPSEGSRRSSSDLITLPATTPPCPTKKEWEGPATSYMTCSAYQKVQDSEISFPAGVEVQVLEKQESGWWYVRFGELEGWAPSHYLVLDENEQPDPSGKELDTVPAKGRQNEGKSDSLEKIERRVQALNTVNQSKKATPPIPSKPPGGFGKTSGTPAVKMRNGVRQVAVRPQSVFVSPPPKDNNLSCALRRNESLTATDGLRGVRRNSSFSTARSAAAEAKGRLAERAASQGSDSPLLPAQRNSIPVSPVRPKPIEKSQFIHNNLKDVYVSIADYEGDEETAGFQEGVSMEVLERNPNGWWYCQILDGVKPFKGWVPSNYLEKKN

SEQ ID NO: 1221 - DNA, 5629 bp, Homo sapiens
cttaagtgcaaggaactctgtgttgggaggaaaaatgtccttcttcaatttccgtaagatcttcaagttggggagcgagaagaagaagaagcagtacgaacacgtgaagagggacctgaaccccgaagacttttgggagattataggagaactgggcgacggagcctttgggaaagtgtacaaggcccagaataaagagaccagtgttttagctgctgcaaaagtgattgacactaaatctgaagaagaacttgaagattacatggtagagattgacatattagcatcttgtgatcacccaaatatagtcaagcttctagatgccttctattatgagaacaatctttggatcctcattgaattttgtgcaggtggagcagtagatgctgtgatgcttgaacttgagagaccattaactgagtcccaaatacaagtagtttgcaagcagactttagatgcattgaactacttacatgataataagatcatccacagagatctgaaggctggcaacattctctttaccttagatggagatatcaaattggcggattttggagtatcagctaaaaacacgaggacaattcaaagaagagattcctttattggtacaccatattggatggctcctgaagtagtcatgtgtgaaacatctaaggacagaccctatgactacaaagctgatgtttggtccctgggtatcactttaatagaaatggctgagatagaaccacctcatcatgaattaaatccaatgcgagtgctgctaaaaatagcaaaatctgagccacctacattagcacagccatccagatggtcttcaaattttaaggactttctaaagaaatgcttagaaaagaatgtggatgccaggtggactacatctcagctgctgcagcatccctttgttactgttgattccaacaaacccatccgagaattgattgcagaggcgaaggctgaagtaacagaagaagttgaagatggcaaagaggaagatgaagaggaggaaacagaaaattctctgccaatacctgcaagtaagcgtgcatcttctgaccttagtatcgccagctctgaagaagataaactttcacaaaatgcttgtattttggagtctgtctcagaaaaaacagaacgtagtaactctgaagataaactcaacagcaaaattcttaatgaaaaacccaccactgatgaacctgaaaaggctgtggaggatattaatgaacatattaccgatgctcagttagaagcaatgactgaactccatgacagaacagcagtaatcaaggagaatgaaagagagaagaggcccaagcttgaaaatctgcctgacacagaagaccaagaaactgtggacattaattcagtcagtgaaggaaaagagaataatataatgataaccttagaaacaaatattgaacataatctaaaatctgaggaagaaaaggatcaggaaaagcaacagatgtttgaaaataagcttataaaatctgaagaaattaaagatactattttgcaaacagtagatttagtttctcaagagactggagaaaaagaggcaaatattcaggcagttgatagtgaagttgggcttacaaaggaagacacccaagagaaattgggggaagacgacaaaactcaaaaagatgtgatcagcaatacaagtgatgtgataggaacatgtgaggcagcagatgtggctcagaaagtggatgaagacagtgctgaggatacgcagagtaatgatgggaaagaagtggtcgaagtaggccagaaattaattaataagcccatggtgggtcctgaggctggtggtactaaggaagttcctattaaagaaatagttgaaatgaatgaaatagaagaaggtaaaaataaggaacaagcaataaacagttcagagaacataatggacatcaatgaggaaccaggaacaactgaaggtgaagaaatcactgagtcaagtagcactgaagaaatggaggtcagaagtgtggtggctgatactgaccaaaaggctttaggaagtgaagttcaggatgcttctaaagtcactactcagatagataaagagaaaaaagaaattccagtgtcaattaaaaaagagcctgaagttactgtagtttcacagcccactgaacctcagcctgttctaatacccagtattaatatcaactctgacagtggagaaaataaagaagaaataggttctttatcaaaaactgaaactattctgccaccagaatctgagaatccaaaggaaaatgataatgattcaggcactggttccactgctgatactagcagtattgacttgaatttatccatctctagctttctaagtaaaactaaagacagtggatcgatatctttacaagaaacaagaagacaaaagaaaacattgaagaaaacacgcaaatttattgttgatggtgtagaagtgagtgtaacaacatcaaagatagttacagatagtgattccaaaactgaagaattgcggtttcttagacgtcaggaacttcgggaattaagatttcttcagaaagaagagcaaagagcccaacaacagctcaatagcaaactacagcaacaacgagaacaaattttccggcgctttgagcaggaaatgatgagtaaaaagcgacaatatgaccaggaaattgagaatctagaaaaacagcagaaacagactatcgaacgcctggaacaagagcacacaaatcgcttgcgagatgaagccaaacgcatcaaaggagaacaagagaaagagttgtccaaatttcagaatatgctgaagaaccgaaagaaggaggttataaatgaagtggagaaagcacccaaagagctgagaaaagagctcatgaaacgcaggaaagaggagcttgcacaaagccagcatgctcaggaacaagagtttgttcagaaacaacagcaagaattagatggctctctgaaaaagatcatccagcagcagaaggcagagttagctaatattgagagagagtgcctgaataacaagcaacagctcatgagagctcgagaagctgcaatttgggagctcgaagaacgacacttacaagaaaaacaccagctgctcaaacagcagcttaaagatcagtatttcatgcaaagacatcagctacttaagcgccacgagaaggaaacagagcaaatgcagcgttacaatcaaagacttattgaggaattgaaaaacagacagactcaagaaagagcaagactgcccaagattcagcgcagtgaagccaagactcgaatggccatgtttaagaagagtttgagaattaactcaacagccacaccagatcaggaccgtgataaaattaaacagtttgctgcacaagaagaaaagaggcagaaaaatgagagaatggctcagcatcagaaacatgagaatcaaatgcgagatcttcagttgcagtgtgaagccaatgtccgcgaactgcatcagctgcagaatgaaaaatgccacttgttggttgagcatgagactcagaaactgaaggagttagatgaggaacatagccaagaattaaaggagtggagagagaaattgagacctaggaaaaagacactggaagaagagtttgccaggaaactacaggaacaggaagtattctttaaaatgactggggagtctgaatgccttaacccatcaacacagagccggatttccaaattttatcctattcccagcttgcattccaccggatcataacaaagggaagcattctgtgcgtgggtttggctctttcagtatgtcattctgttctcatcttctgccacagtctctcagatagctcatgaagacaatcacctgcctcaccttctaggtgttttccttttttgttttttttgttttgttttgtttttaagcaaagatgaagggaaaacgaactaagacagacgctaggccatgttggcaaagtagcatcttggtgactaaggtgactttgtatattcatcttaaaaattatgttctttagacactgctacctgaaaactgttggagaaataatgtttaaagttatttaagaaaaactgttacatcactaagtattaataaattcttcttacctgacgtaacttctcaatgcctaaattctgtagttgaagctctgctgcagagagttgggataattttcttttggtggatcagctctcataaaaaagctatgatttgctcaaatatgctgttgactcagtaaatgaatatatttttttctttaaataggaacaacctcttttaaaagagaaaaattatttcagtgatttgtcaaaacgaattacctcttttggcatgagctaataattgagggtgctaattttcttaagatagtgcctaaaacactaaatttcagtcaagtcgtaagtaggattttctttttgatcaacagggacaaaaacatctttagaattaaaaacatggttgttttggaatttttgcttctcttaccgtttgatagaaattttcatcctaaaatacatgtacaaagtttggaaagatgaaaaaaagaggtagcttttagattgcaaattggaaatgtaaaactcatgaaatttaagcaatataggtttagctatctgtgtttattttctaaaataatacctgagctggttaaatgatttctctccatcttagctaattctgtttaaaactctgtcagaggcctgcaggctgtgagttatatttataaatatatcttcagaaattaatcttaaaagaggcattagttcagaatacttttttaaaagtttaaattaaatatttaggcacgtcagaaattacttttccttattttgaaatgaggctacttatgtcttggttttattttgttccatgtttaaatcattcactttgatttgagtgggaaaagcctgaagcctttatcatgtggttgctggtgtgtgtaattattaatgaaatgttcactcctagtcccttatgaggcttagaatttcaaccacgtgtcaggtcagacagtattataaactgtactttgctgtctgagacagcacatttgtgaatgatgcttgctgcctgccattttcaacctattctctcttaagagtgctaggtaccaaattgtgaaagtttgttttcagttatattacttttgaggctggtgaaaaatttaaatgtaactttgtgggaacactgattcatatttagaaaatgtaaatgtctgtagcactttcttgcagttaatttgaaaactttggatgctgaaccttgtttgtcagtgatttagatgatttaaaaatgcatgtgtgatttgaattttataattgttttgacaagcataatttacttggacaacttcgtaggtagccttaacttctggccaagtttgttttttatataaatatatatacatatatacatattatgtatggttgtaaattcatacacttatcacatgaatgtgttactgtatacaaaactcttaatgctttattctcaaatgctgggttgaaaaatgttttgaaagccttttaaaatatatatctttataaagtaatattcaggatgatgataaaaattgtttatattgttatgataaaaatgacagtataatgttaaaaaaaaaaaaaaaaaaaaaaa

SEQ ID NO: 1222 - protein, 1235 aa, Homo sapiens
MSFFNFRKIFKLGSEKKKKQYEHVKRDLNPEDFWEIIGELGDGAFGKVYKAQNKETSVLAAAKVIDTKSEEELEDYMVEIDILASCDHPNIVKLLDAFYYENNLWILIEFCAGGAVDAVMLELERPLTESQIQVVCKQTLDALNYLHDNKIIHRDLKAGNILFTLDGDIKLADFGVSAKNTRTIQRRDSFIGTPYWMAPEVVMCETSKDRPYDYKADVWSLGITLIEMAEIEPPHHELNPMRVLLKIAKSEPPTLAQPSRWSSNFKDFLKKCLEKNVDARWTTSQLLQHPFVTVDSNKPIRELIAEAKAEVTEEVEDGKEEDEEEETENSLPIPASKRASSDLSIASSEEDKLSQNACILESVSEKTERSNSEDKLNSKILNEKPTTDEPEKAVEDINEHITDAQLEAMTELHDRTAVIKENEREKRPKLENLPDTEDQETVDINSVSEGKENNIMITLETNIEHNLKSEEEKDQEKQQMFENKLIKSEEIKDTILQTVDLVSQETGEKEANIQAVDSEVGLTKEDTQEKLGEDDKTQKDVISNTSDVIGTCEAADVAQKVDEDSAEDTQSNDGKEVVEVGQKLINKPMVGPEAGGTKEVPIKEIVEMNEIEEGKNKEQAINSSENIMDINEEPGTTEGEEITESSSTEEMEVRSVVADTDQKALGSEVQDASKVTTQIDKEKKEIPVSIKKEPEVTVVSQPTEPQPVLIPSININSDSGENKEEIGSLSKTETILPPESENPKENDNDSGTGSTADTSSIDLNLSISSFLSKTKDSGSISLQETRRQKKTLKKTRKFIVDGVEVSVTTSKIVTDSDSKTEELRFLRRQELRELRFLQKEEQRAQQQLNSKLQQQREQIFRRFEQEMMSKKRQYDQEIENLEKQQKQTIERLEQEHTNRLRDEAKRIKGEQEKELSKFQNMLKNRKKEVINEVEKAPKELRKELMKRRKEELAQSQHAQEQEFVQKQQQELDGSLKKIIQQQKAELANIERECLNNKQQLMRAREAAIWELEERHLQEKHQLLKQQLKDQYFMQRHQLLKRHEKETEQMQRYNQRLIEELKNRQTQERARLPKIQRSEAKTRMAMFKKSLRINSTATPDQDRDKIKQFAAQEEKRQKNERMAQHQKHENQMRDLQLQCEANVRELHQLQNEKCHLLVEHETQKLKELDEEHSQELKEWREKLRPRKKTLEEEFARKLQEQEVFFKMTGESECLNPSTQSRISKFYPIPSLHSTGS

SEQ ID NO: 1223 - DNA, 5610 bp, Homo sapiens
aacatttttgaaagatcactcagctttaacacaccttggctgggtctggataaaaaaaaagtgagcactgcaaatttctagaagaaaacatcaggagaagaaagagagagggggatttattcaaagttgtttccaattccttcaaaacctcaaaccaggtggctatggtatggatgtaaccaagaaaaacaaacgagatggaactgaagtcactgagagaattgtcactgaaacagtaaccacaagacttacatccttaccaccaaaaggcgggaccagcaatggctatgctaaaacagcctctcttggtggagggagccggctggagaaacaaagcctgactcatggcagcagcggctacataaactcaactggaagcacacgaggccatgcctccacctctagttacaggagggctcactcacctgcctccactctgcccaactccccaggctcaacctttgaaaggaaaactcacgttacccgccatgcgtatgaagggagctccagtggcaactcttctccggagtaccctcggaaggaatttgcatcttcttcaaccagaggacggagtcaaacacgagagagtgaaattcgagttcgactgcagagtgcgtccccatccacccgatggacagaattggatgatgttaagcgtttgctcaaggggagtcgatcggcaagtgtgagccccacccggaattcctccaacacactccccatccccaagaaaggcactgtggagaccaaaattgtgacagcgagctcccagtcggtgtcaggcacctacgatgcaacgatcctggatgccaaccttccctcccatgtgtggtcctccaccctgcccgcggggtcctccatggggacctatcacaacaacatgacaacccagagctcatccctcctcaacaccaatgcctactctgcgggatcagtcttcggagttccaaacaacatggcgtcctgctcacccactttgcaccctggactcagcacatcctcctcagtgtttggcatgcagaacaatctggcccccagcttgaccaccctgtcccatggcaccaccaccacttccacagcatatggggtgaagaaaaacatgccccagagtcctgcggctgtgaacactggcgtttccacctccgccgcctgcaccacaagtgtgcagagcgatgaccttttgcacaaggactgcaagttcctgatcctagagaaagacaacacacctgctaagaaggagatggagctgctcatcatgaccaaggacagcgggaaggtctttacagcctcccctgccagcatcgctgcaacttctttttcagaagacaccctaaaaaaagaaaagcaagctgcctacaatgctgactcaggcctaaaagccgaagctaatggagacctgaagactgtgtccacaaagggcaagaccaccactgcagatatccacagctacagcagcagtggtggtggtggcagtggaggaggtggcggtgttggtggcgctggcggcggcccttggggaccagcgccagcctggtgcccctgcggctcctgctgcagctggtggaagtggctgctgggcctgctgctcacctggctgctactcctggggctgctcttcggcctcattgctctggcggaggaggtgaggaagctgaaggcgcgtgtggatgagctggagaggatcaggaggagcatactgccctatggggacagcatggatagaatagaaaaggaccgcctccagggcatggcacccgcggcgggagcagacctggacaaaattgggctgcacagtgacagccaggaggagctctggatgttcgtgaggaagaagctaatgatggaacaggaaaatggaaatctccgaggaagccctggccctaaaggtgacatgggaagtccaggccctaaaggagatcgagggttccctgggactccaggtatccctgggcccttgggccacccaggtccacaaggaccaaagggtcaaaaaggcagcgtgggagatcctggcatggaaggccccatgggccagagagggcgagaaggccccatgggacctcgtggtgaggcagggcctcctggatctggagagaaaggggaaagaggggctgctggtgaaccaggtcctcatggcccacctggtgtcccaggttctgtgggtcccaaaggttccagcggctctcctggcccacagggccctccaggtcctgtaggtctccaagggctccgaggtgaagtaggacttcctggtgtcaaaggtgacaaaggaccaatgggaccaccaggacccaaaggtgaccagggtgagaaaggacctcgaggcctcacaggcgagcctggcatgagaggtttgcctggtgctgttggtgagcccggggctaaaggagcaatgggtcctgctggcccagacggacaccaaggcccaagaggtgaacaaggtcttactgggatgcctggaatccgtggcccaccaggaccttctggagacccaggaaagccaggtctcacaggaccccagggacctcagggacttcccggtacccctggccgaccaggaataaaaggtgaaccaggagctccaggcaagatcgtgacttcggaggggtcatcgatgctcactgtcccaggccccccaggacctcctggagccatgggacccccaggacctccaggtgccccaggccctgccggcccagctggtctcccaggacatcaagaagttcttaatttacaaggtcccccaggcccacccggcccacgtgggccaccagggccttccattccaggcccaccaggaccccgaggcccaccaggggagggtttgccaggcccaccaggcccaccaggatcgttcctgtccaactcagaaaccttcctcttcggccccccaggcccacctggccccccaggtcccaagggagaccaaggtcccccaggccccagaggacaccaaggcgagcaaggcctcccaggtttctcaacctcagggtccagttctttcggactcaaccttcagggaccaccaggcccacctggcccccagggaccaaaaggtgacaaaggtgatccgggtgttccaggggctcttggcattcctagtggtccttctgaagggggatcatcaagtaccatgtacgtgtcaggcccgccagggccccctgggccccctgggcctccgggctctatcagcagctctggccaggagattcagcagtacatctctgagtacatgcagagtgacagtattagatcttacctatccggagttcagggtcccccaggcccacctggtcccccaggacctgtcaccaccatcacaggcgagactttcgactactcagagctggcaagccacgttgtgagctacttacggacttcggggtacggtgtcagcttgttctcgtcctccatctcttctgaagacatcctggctgtgctgcagcgggatgacgtgcgtcagtacctacgtcagtacttgatgggccctcggggtccgccagggccaccaggagccagtggagatgggtccctcctgtctttggactatgcagagctgagtagtcgcattctcagctacatgtcgagttctgggatcagcattgggcttcctggtcccccggggccccctggcttgccgggaacctcctatgaggagctcctctccttgctgcgagggtctgaattcagaggcatcgttggacccccaggtcccccgggtccaccagggatcccaggcaatgtgtggtccagcatcagcgtggaggacctctcgtcttacttacatactgccggcttgtcattcatcccaggccctccaggacctcctggtcccccagggcctcgagggcccccgggtgtctcaggagccctggcaacctatgcagctgaaaacagcgacagcttccggagcgagctgatcagctacctcacaagtcctgatgtgcgcagcttcattgttggccccccaggccctcctgggccgcagggaccccctggggacagccgcctcctgtccacggatgcctcccacagtcggggtagcagctcctcctcacacagctcatctgtcaggcggggcagctcctacagctcttccatgagcacaggaggaggtggtgcaggctccctgggtgcaggcggtgcctttggtgaagctgcaggagacaggggtccctatggcactgacatcggcccaggcggaggctatggggcagcagcagaaggcggcatgtatgctggcaatggcggactattgggagctgactttgctggagatctggattacaatgagctggctgtgagggtgtcagagagcatgcagcgtcagggcctactgcaagggatggcctacactgtccagggcccaccaggccagcctgggccacaggggccacccggcatcagcaaggtcttctctgcctacagcaacgtgactgcggacctcatggacttcttccaaacttatggagccattcaaggaccccctgggcaaaaaggagagatgggcactccaggacccaaaggtgacaggggccctgctgggccaccaggtcatcctgggccacctggccctcgaggacacaagggagaaaaaggagacaaaggtgaccaagtctatgctgggcggagaaggagaagaagtattgctgtcaagccgtgagctagccatggcaggacagctcctggaccaggtctcataatgcatgtggcacttaggtccaaggtctccagagggtgaaagctggagtctgtcaatgtcctactgagacagcacagccaacctagctagcaacatttgttttagtctgaacaatatatacttatagaattcagtcaaagatacacaatctgaaacagcttcatggggtggactctaacagtagttgcaatgttttagaatgagacttacttctctgctatctagatctgaactccttggcttctttacttagttcaagccccagcctaggaaagccagttacataaaagttggctcaggagtcttagagctttacctaaatatgagcccagaaaacggaggatgggggtggggcgccttcctggaggtgacacttgatgggggtgtgttctggttactgttctaaggctgtgccatcagctccttcctcccctgttcattctgcattctctagtcagttggctaagaagtgactcttgcaactaaaaaaattaagaaattcacttcccctctaggaggtgatgatagggtttctaatggttatatgtatatcacattcccatttgcttagaaagtctgattgtagctatgattgtccgtaggcccatactagagttcatggatatgttatactgaaccaggccagagcaaacagaaaaagaaggttgagggcaatggacaaggaaggaataaagggagaagagggaaaacagaaaacctgatgctggggacacagcatcagctcaagacgtcaccctccattctgcactcagaaaatggcacttgggggactgggcgcagttggtctttaaccacttttcaatgtctaaaaacatttgtttgtggtctataagatgaaacatcatttcaatcgtaaaatttcccattaaagaagtttttttttctaa

SEQ ID NO: 1224 - protein, 1497 aa, Homo sapiens
MDVTKKNKRDGTEVTERIVTETVTTRLTSLPPKGGTSNGYAKTASLGGGSRLEKQSLTHGSSGYINSTGSTRGHASTSSYRRAHSPASTLPNSPGSTFERKTHVTRHAYEGSSSGNSSPEYPRKEFASSSTRGRSQTRESEIRVRLQSASPSTRWTELDDVKRLLKGSRSASVSPTRNSSNTLPIPKKGTVETKIVTASSQSVSGTYDATILDANLPSHVWSSTLPAGSSMGTYHNNMTTQSSSLLNTNAYSAGSVFGVPNNMASCSPTLHPGLSTSSSVFGMQNNLAPSLTTLSHGTTTTSTAYGVKKNMPQSPAAVNTGVSTSAACTTSVQSDDLLHKDCKFLILEKDNTPAKKEMELLIMTKDSGKVFTASPASIAATSFSEDTLKKEKQAAYNADSGLKAEANGDLKTVSTKGKTTTADIHSYSSSGGGGSGGGGGVGGAGGGPWGPAPAWCPCGSCCSWWKWLLGLLLTWLLLLGLLFGLIALAEEVRKLKARVDELERIRRSILPYGDSMDRIEKDRLQGMAPAAGADLDKIGLHSDSQEELWMFVRKKLMMEQENGNLRGSPGPKGDMGSPGPKGDRGFPGTPGIPGPLGHPGPQGPKGQKGSVGDPGMEGPMGQRGREGPMGPRGEAGPPGSGEKGERGAAGEPGPHGPPGVPGSVGPKGSSGSPGPQGPPGPVGLQGLRGEVGLPGVKGDKGPMGPPGPKGDQGEKGPRGLTGEPGMRGLPGAVGEPGAKGAMGPAGPDGHQGPRGEQGLTGMPGIRGPPGPSGDPGKPGLTGPQGPQGLPGTPGRPGIKGEPGAPGKIVTSEGSSMLTVPGPPGPPGAMGPPGPPGAPGPAGPAGLPGHQEVLNLQGPPGPPGPRGPPGPSIPGPPGPRGPPGEGLPGPPGPPGSFLSNSETFLFGPPGPPGPPGPKGDQGPPGPRGHQGEQGLPGFSTSGSSSFGLNLQGPPGPPGPQGPKGDKGDPGVPGALGIPSGPSEGGSSSTMYVSGPPGPPGPPGPPGSISSSGQEIQQYISEYMQSDSIRSYLSGVQGPPGPPGPPGPVTTITGETFDYSELASHVVSYLRTSGYGVSLFSSSISSEDILAVLQRDDVRQYLRQYLMGPRGPPGPPGASGDGSLLSLDYAELSSRILSYMSSSGISIGLPGPPGPPGLPGTSYEELLSLLRGSEFRGIVGPPGPPGPPGIPGNVWSSISVEDLSSYLHTAGLSFIPGPPGPPGPPGPRGPPGVSGALATYAAENSDSFRSELISYLTSPDVRSFIVGPPGPPGPQGPPGDSRLLSTDASHSRGSSSSSHSSSVRRGSSYSSSMSTGGGGAGSLGAGGAFGEAAGDRGPYGTDIGPGGGYGAAAEGGMYAGNGGLLGADFAGDLDYNELAVRVSESMQRQGLLQGMAYTVQGPPGQPGPQGPPGISKVFSAYSNVTADLMDFFQTYGAIQGPPGQKGEMGTPGPKGDRGPAGPPGHPGPPGPRGHKGEKGDKGDQVYAGRRRRRSIAVKP

SEQ ID NO: 1225 - DNA, 5000 bp, Homo sapiens
aacatttttgaaagatcactcagctttaacacaccttggctgggtctggataaaaaaaaagtgagcactgcaaatttctagaagaaaacatcaggagaagaaagagagagggggatttattcaaagttgtttccaattccttcaaaacctcaaaccaggtggctatggtatggatgtaaccaagaaaaacaaacgagatggaactgaagtcactgagagaattgtcactgaaacagtaaccacaagacttacatccttaccaccaaaaggcgggaccagcaatggctatgctaaaacagcctctcttggtggagggagccggctggagaaacaaagcctgactcatggcagcagcggctacataaactcaactggaagcacacgaggccatgcctccacctctagttacaggagggctcactcacctgcctccactctgcccaactccccaggctcaacctttgaaaggaaaactcacgttacccgccatgcgtatgaagggagctccagtggcaactcttctccggagtaccctcggaaggaatttgcatcttcttcaaccagaggacggagtcaaacacgagagagtgaaattcgagttcgactgcagagtgcgtccccatccacccgatggacagaattggatgatgttaagcgtttgctcaaggggagtcgatcggcaagtgtgagccccacccggaattcctccaacacactccccatccccaagaaaggcactgtggagaccaaaattgtgacagcgagctcccagtcggtgtcaggcacctacgatgcaacgatcctggatgccaaccttccctcccatgtgtggtcctccaccctgcccgcggggtcctccatggggacctatcacaacaacatgacaacccagagctcatccctcctcaacaccaatgcctactctgcgggatcagtcttcggagttccaaacaacatggcgtcctgctcacccactttgcaccctggactcagcacatcctcctcagtgtttggcatgcagaacaatctggcccccagcttgaccaccctgtcccatggcaccaccaccacttccacagcatatggggtgaagaaaaacatgccccagagtcctgcggctgtgaacactggcgtttccacctccgccgcctgcaccacaagtgtgcagagcgatgaccttttgcacaaggactgcaagttcctgatcctagagaaagacaacacacctgctaagaaggagatggagctgctcatcatgaccaaggacagcgggaaggtctttacagcctcccctgccagcatcgctgcaacttctttttcagaagacaccctaaaaaaagaaaagcaagctgcctacaatgctgactcaggcctaaaagccgaagctaatggagacctgaagactgtgtccacaaagggcaagaccaccactgcagatatccacagctacagcagcagtggtggtggtggcagtggaggaggtggcggtgttggtggcgctggcggcggcccttggggaccagcgccagcctggtgcccctgcggctcctgctgcagctggtggaagtggctgctgggcctgctgctcacctggctgctactcctggggctgctcttcggcctcattgctctggcggaggaggtgaggaagctgaaggcgcgtgtggatgagctggagaggatcaggaggagcatactgccctatggggacagcatggatagaatagaaaaggaccgcctccagggcatggcacccgcggcgggagcagacctggacaaaattgggctgcacagtgacagccaggaggagctctggatgttcgtgaggaagaagctaatgatggaacaggaaaatggaaatctccgaggaagccctggccctaaaggtgacatgggaagtccaggccctaaaggagatcgagggttccctgggactccaggtatccctgggcccttgggccacccaggtccacaaggaccaaagggtcaaaaaggcagcgtgggagatcctggcatggaaggccccatgggccagagagggcgagaaggccccatgggacctcgtggtgaggcagggcctcctggatctggagagaaaggggaaagaggggctgctggtgaaccaggtcctcatggcccacctggtgtcccaggttctgtgggtcccaaaggttccagcggctctcctggcccacagggccctccaggtcctgtaggtctccaagggctccgaggtgaagtaggacttcctggtgtcaaaggtgacaaaggaccaatgggaccaccaggacccaaaggtgaccagggtgagaaaggacctcgaggcctcacaggcgagcctggcatgagaggtttgcctggtgctgttggtgagcccggggctaaaggagcaatgggtcctgctggcccagacggacaccaaggcccaagaggtgaacaaggtcttactgggatgcctggaatccgtggcccaccaggaccttctggagacccaggaaagccaggtctcacaggaccccagggacctcagggacttcccggtacccctggccgaccaggaataaaaggtgaaccaggagctccaggcaagatcgtgacttcggaggggtcatcgatgctcactgtcccaggccccccaggacctcctggagccatgggacccccaggacctccaggtgccccaggccctgccggcccagctggtctcccaggacatcaagaagttcttaatttacaaggtcccccaggcccacccggcccacgtgggccaccagggccttccattccaggcccaccaggaccccgaggcccaccaggggagggtttgccaggcccaccaggcccaccaggatcgttcctgtccaactcagaaaccttcctcttcggccccccaggcccacctggccccccaggtcccaagggagaccaaggtcccccaggccccagaggacaccaaggcgagcaaggcctcccaggtttctcaacctcagggtccagttctttcggactcaaccttcagggaccaccaggcccacctggcccccagggaccaaaaggtgacaaaggtgatccgggtgttccaggggctcttggcattcctagtggtccttctgaagggggatcatcaagtaccatgtacgtgtcaggcccgccagggccccctgggccccctgggcctccgggctctatcagcagctctggccaggagattcagcagtacatctctgagtacatgcagagtgacagtattagatcttacctatccggagttcagggtcccccaggcccacctggtcccccaggacctgtcaccaccatcacaggcgagactttcgactactcagagctggcaagccacgttgtgagctacttacggacttcggggtacggtgtcagcttgttctcgtcctccatctcttctgaagacatcctggctgtgctgcagcgggatgacgtgcgtcagtacctacgtcagtacttgatgggccctcggggtccgccagggccaccaggagccagtggagatgggtccctcctgtctttggactatgcagagctgagtagtcgcattctcagctacatgtcgagttctgggatcagcattgggcttcctggtcccccggggccccctggcttgccgggaacctcctatgaggagctcctctccttgctgcgagggtctgaattcagaggcatcgttggacccccaggtcccccgggtccaccagggatcccaggcaatgtgtggtccagcatcagcgtggaggacctctcgtcttacttacatactgccggcttgtcattcatcccaggccctccaggacctcctggtcccccagggcctcgagggcccccgggtgtctcaggagccctggcaacctatgcagctgaaaacagcgacagcttccggagcgagctgatcagctacctcacaagtcctgatgtgcgcagcttcattgttggccccccaggccctcctgggccgcagggaccccctggggacagccgcctcctgtccacggatgcctcccacagtcggggtagcagctcctcctcacacagctcatctgtcaggcggggcagctcctacagctcttccatgagcacaggaggaggtggtgcaggctccctgggtgcaggcggtgcctttggtgaagctgcaggagacaggggtccctatggcactgacatcggcccaggcggaggctatggggcagcagcagaaggcggcatgtatgctggcaatggcggactattgggagctgactttgctggagatctggattacaatgagctggctgtgagggtgtcagagagcatgcagcgtcagggcctactgcaagggatggcctacactgtccagggcccaccaggccagcctgggccacaggggccacccggcatcagcaaggtcttctctgcctacagcaacgtgactgcggacctcatggacttcttccaaacttatggagccattcaaggaccccctgggcaaaaaggagagatgggcactccaggacccaaaggtgacaggggccctgctgggccaccaggtcatcctgggccacctggccctcgaggacacaagggagaaaaaggagacaaaggtgaccaagtctatgctgggcggagaaggagaagaagtattgctgtcaagccgtgagctagccatggcaggacagctcctggaccaggcccatactagagttcatggatatgttatactgaaccaggccagagcaaacagaaaaagaaggttgagggcaatggacaaggaaggaataaagggagaagagggaaaacagaaaacctgatgctggggacacagcatcagctcaagacgtcaccctccattctgcactcagaaaatggcacttgggggactgggcgcagttggtctttaaccacttttcaatgtctaaaaacatttgtttgtggtctataagatgaaacatcatttcaatcgtaaaatttcccattaaagaagtttttttttctaa

SEQ ID NO: 1226 - protein, 1497 aa, Homo sapiens; identical to SEQ ID NO: 1224

SEQ ID NO: 1227 - DNA, 1447 bp, Homo sapiens
gctctcgctgggaatggcggagggagagaaaaaccaagatttcactttcaagatggaaagtccgtcagactcagctgtggttttacctagcactcctcaggcctctgcgaatccatcatctccctatacaaatagttcccgaaaacaacctatgagtgcaacacttagagaaagattaaggaaaacaagattttcatttaattcctcttacaatgtggtgaaacgtcttaaagtagagagtgaagaaaatgatcagaccttttcagagaaaccagcatcttccacagaggaaaactgtttggaatttcaagaaagttttaaacatatagacagtgaatttgaagaaaatacaaatttgaaaaatactttgaagaatctcaatgtctgtgaatctcagtcacttgattctggatcatgcagtgctctccaaaatgagtttgtgagtgagaagcttcctaaacaaagattaaacgctgaaaaagccaaattggtgaagcaggttcaggagaaagaagaccttcttcggaggctaaaactagtcaaaatgtatagatcaaagaatgatctgtctcagttacagttgttaataaagaagtggagaagctgtagccagctcttgctttatgagttgcagtcagctgtgtctgaagagaacaagaaactaagccttactcaattgatagaccactatgggttagatgataaattactacactataacagaagtgaagaagaatttatagatgtttaattcctgatttttgctccagaatatctttgagaatgacaacttaattaaaagatacttaggcactttttttttttttttgagactgagtttcgctcttgtcatcctggctggagtgtgatggtgcgatcttgactcactgcaacctctgcctctcgggttccagcaattctcctgcctcagcctcccgagtagctgagattacaggcgcccgccaccatgcccggctaatttttgcatttttagtagagactgggtttcaccacgttggccaggctggtctcgaactcctgacctcaggtgatccaccgcctaggcctcccaaaaccattagggctcagaggaaggtatcccaatgaatatcaattaagggcactttaatatataaattataaactaagttctaaaaggaaaattagtattttggatagatttgtcaaaacgacatttaagtcatgtttaaaaagtcatttgggcagttctggaaactagttttaatacatttgttttttatgacaaaaagttttattttaaatgttaaaaattgtccaatctggtgaatgtctaaccctaaagtttaaaaatttctgcctcctaagtttatgtaccttgtttccatccatttaccacatatttccatctgatagtctagcaggtaattaaacttatatgtccaaaaccataaaaaaaaaaaaaaaa

SEQ ID NO: 1228 - protein, 245 aa, Homo sapiens
MAEGEKNQDFTFKMESPSDSAVVLPSTPQASANPSSPYTNSSRKQPMSATLRERLRKTRFSFNSSYNVVKRLKVESEENDQTFSEKPASSTEENCLEFQESFKHIDSEFEENTNLKNTLKNLNVCESQSLDSGSCSALQNEFVSEKLPKQRLNAEKAKLVKQVQEKEDLLRRLKLVKMYRSKNDLSQLQLLIKKWRSCSQLLLYELQSAVSEENKKLSLTQLIDHYGLDDKLLHYNRSEEEFIDV

SEQ ID NO: 1229 - DNA, 1518 bp, Homo sapiens
agcggcgcctcgcgcgtcaggcaatctggccaattgcgcatcttttccgcctaccgcacggccccgcccctgccacaggatcgatttacggccgcagagaaaaaccaagatttcactttcaagatggaaagtccgtcagactcagctgtggttttacctagcactcctcaggcctctgcgaatccatcatctccctatacaaatagttcccgaaaacaacctatgagtgcaacacttagagaaagattaaggaaaacaagattttcatttaattcctcttacaatgtggtgaaacgtcttaaagtagagagtgaagaaaatgatcagaccttttcagagaaaccagcatcttccacagaggaaaactgtttggaatttcaagaaagttttaaacatatagacagtgaatttgaagaaaatacaaatttgaaaaatactttgaagaatctcaatgtctgtgaatctcagtcacttgattctggatcatgcagtgctctccaaaatgagtttgtgagtgagaagcttcctaaacaaagattaaacgctgaaaaagccaaattggtgaagcaggttcaggagaaagaagaccttcttcggaggctaaaactagtcaaaatgtatagatcaaagaatgatctgtctcagttacagttgttaataaagaagtggagaagctgtagccagctcttgctttatgagttgcagtcagctgtgtctgaagagaacaagaaactaagccttactcaattgatagaccactatgggttagatgataaattactacactataacagaagtgaagaagaatttatagatgtttaattcctgatttttgctccagaatatctttgagaatgacaacttaattaaaagatacttaggcactttttttttttttttgagactgagtttcgctcttgtcatcctggctggagtgtgatggtgcgatcttgactcactgcaacctctgcctctcgggttccagcaattctcctgcctcagcctcccgagtagctgagattacaggcgcccgccaccatgcccggctaatttttgcatttttagtagagactgggtttcaccacgttggccaggctggtctcgaactcctgacctcaggtgatccaccgcctaggcctcccaaaaccattagggctcagaggaaggtatcccaatgaatatcaattaagggcactttaatatataaattataaactaagttctaaaaggaaaattagtattttggatagatttgtcaaaacgacatttaagtcatgtttaaaaagtcatttgggcagttctggaaactagttttaatacatttgttttttatgacaaaaagttttattttaaatgttaaaaattgtccaatctggtgaatgtctaaccctaaagtttaaaaatttctgcctcctaagtttatgtaccttgtttccatccatttaccacatatttccatctgatagtctagcaggtaattaaacttatatgtccaaaaccataaaaaaaaaaaaaaaa

SEQ ID NO: 1230 - protein, 232 aa, Homo sapiens
MESPSDSAVVLPSTPQASANPSSPYTNSSRKQPMSATLRERLRKTRFSFNSSYNVVKRLKVESEENDQTFSEKPASSTEENCLEFQESFKHIDSEFEENTNLKNTLKNLNVCESQSLDSGSCSALQNEFVSEKLPKQRLNAEKAKLVKQVQEKEDLLRRLKLVKMYRSKNDLSQLQLLIKKWRSCSQLLLYELQSAVSEENKKLSLTQLIDHYGLDDKLLHYNRSEEEFIDV

SEQ ID NO: 1231 - DNA, 5757 bp, Homo sapiens
atcaccctctggacaagagaacgggcgagcgggagctaggagggaagagtggagaggaccggcgaggcgcgccagccggagccacctccttcccggccgccccctccccactccccctacacacacacgctcgctcgctcgccggcgcgcgcacaccccccgcgccggacccgcacctcggcgggcgccacacactcggcagcccgagccgcggtagccgcagcgggatggaggcggcgcgcacggagcgccccgcaggcaggccgggggcgccgcttgtccggacggggctcctactcttgtcgacgtgggtcctggccggcgccgagatcacttgggacgcgacaggcggtcccggacgcccggcggccccggcttcgcggccaccggcgttgtctccactctcgccgcgggcagtggccagccagtggccggaggagctggcgtcggcgcggagagccgccgtgctggggcgccgggccggaccagagctgctgccccagcagggcggcggcagaggcggtgagatgcaggtggaagccggagggacatcaccggcaggcgagcggcggggccggggcatcccagctcctgccaagcttggcggcgcgaggaggagtcgccgggcgcagcccccaatcacccaggaacgcggggacgcctgggccactgctccggccgatggttccagaggaagccgtccccttgctaagggttcccgggaggaggtgaaggcgccgcgggctggggggtcggcggctgaagacctccggctgcccagcacctccttcgcgctgaccggggactcggcccacaaccaagccatggtgcactggtcgggacacaacagcagcgtcatacttatcctgacgaagctgtatgacttcaacctgggcagcgtgactgagagttcactatggaggtcgacagattatggcaccacctatgaaaagctgaatgacaaagtgggtttgaagactgtcctcagttacctctatgtcaatccaaccaacaaaaggaagattatgcttctcagtgatcctgagatggagagcagcatattgatcagctcagacgaaggggcgacctatcagaagtatcggctcaccttctatatccagagcctgctctttcatcccaagcaagaggactgggtgctggcctacagtttggatcaaaagctctacagctccatggactttggaagacggtggcaactcatgcatgaacgcatcacacccaacaggttttattggtcggtggccggattggataaggaggcggacctggtgcacatggaggtgcggaccacggatggatatgctcactacctcacctgcaggatccaggaatgtgccgagacaactagaagtgggccttttgcccgctccattgacatcagttccctggttgtccaggatgaatatatcttcattcaggtaacaactagtggaagagccagctactacgtgtcttatcgaagagaggcctttgctcagataaagctgcctaagtactcgttgccaaaggacatgcacatcatcagtacagacgagaaccaagtatttgctgcggtccaagaatggaaccagaatgacacgtacaacctctacatctcagacacgcgtgggatttacttcactctggccatggagaacatcaagagcagcagaggtctaatggggaacatcattattgaattgtatgaggtagcaggtatcaaagggatatttctggcaaacaagaaggtggacgaccaggtgaagacatacatcacttacaacaaaggcagggattggcgcctgctgcaagctccggatgtggacctgagaggaagcccagtgcactgcctgctgcccttctgttccttacatctgcacctgcaactctctgaaaatccatattcctcaggaagaatctctagcaaggagacagccccaggacttgtggtggctacaggcaacattggcccggagctctcatatactgatattggtgtgttcatctcctccgatgggggcaacacatggagacagatctttgatgaagagtacaatgtctggttcctagactggggtggtgccctcgtggccatgaaacacacacctctgccagtcaggcatttgtgggtgagttttgatgagggccactcttgggacaagtatggtttcacttcggttcctctctttgttgacggggctctggtggaggcaggaatggagacccacatcatgacagtttttggccacttcagcctccgctccgaatggcaattggtgaaagtggactacaaatctatcttcagccggcattgcaccaaggaggactatcagacctggcacctgctcaatcagggagagccttgtgtcatgggagaaaggaaaatattcaagaaacgtaagccaggagctcagtgtgccctgggccgagaccactcaggatcagtggtctcagaaccctgtgtctgtgccaattgggacttcgagtgtgactatgggtatgagagacatggggagagccagtgtgtcccagctttctggtacaatccagcatccccatcaaaggactgcagccttggtcaaagctaccttaacagcactgggtatcggcggattgtgtccaacaactgcacagatgggctaagggagaagtacaccgccaaggcccagatgtgccctggaaaagcccctcggggcctccatgtggtgacgaccgatgggcggctggtggcagagcaggggcacaatgcaactttcatcatcctcatggaggagggtgatctacaaaggacaaacatccagcttgactttggggatgggattgctgtgtcctacgcaaacttcagccccatcgaggacggcatcaagcacgtgtataagagtgcggggatcttccaggtgacagcctatgcagagaacaaccttggctcagacacagctgtcctcttcctgcatgtggtttgtcctgtggagcatgttcatctccgagttccatttgttgccataagaaataaggaggtcaacatcagtgcagtcgtgtggcccagtcaactggggacccttacctatttctggtggttcggcaatagcacaaagcctctcatcactttggacagcagcatttccttcacattccttgcagaaggaaccgacaccatcacagtccaggtggctgctgggaatgccctcatccaggacacaaaagagattgcagttcatgaatatttccagtcccagcttttatcattctctcctaatctggattaccacaatcctgacattcctgagtggagaaaagatattggcaatgtcatcaagcgagctctggttaaagtaaccagtgtcccagaggaccagatcctcattgccgtgtttcctggtctccccacttcagcagagcttttcattcttccacccaagaacctgacagagaggaggaaaggcaatgaaggggacctggaacaaattgtagaaacactgtttaatgctctcaaccaaaatttggtccagtttgagctgaagccgggggtacaagtcattgtgtatgtcacacagctgacgttagctccattggtggactccagtgctgggcacagcagctcagccatgcttatgctattatcagtggtatttgttggcctggctgtgtttttgatctacaagtttaaaaggaaaatcccttggattaacatctatgctcaagtccaacacgacaaggagcaggagatgattgggtcagtgagccaaagtgaaaacgcccccaaaatcacactcagtgactttacggagcctgaggagctgctggacaaagagctggacacgcgggtcataggaggcattgccactattgcaaacagcgaaagcacaaaggagatccccaactgcactagtgtttaataccagcaagccacgtggtcaaccacctttctgactttttatttttgatgattactattactattattatggaaaaattaaaatgtcttttttaccttttgtttaccaagggccccttcataaatagcaggcaaatgcctagctttgggagaaaagggcattcttagctgattgaaatgagacaaagggaataaatggctgtatttgtgctaagagcaaaggatgcatcttcccacagcctcctcgctttactctgccattggtagcttaaagactttctttttccttgtggtctcccttttttcaaaattgaagttgggttggctctttgtgaacctctcatccccacagcagaatcaccaacactctccgcttcccccagcacacacacatacaacacagatcatttcccagttagatccgcaggaagtaggttggtgggggtggatgtagctgcagaaagcatgcacaactttgtgaaagaggccctgccttgtgcatgtccatagtgaggctacagatggcttattgtatataattacaatgtaaatagctttttatttcctaagaaataatttaatgtttagtaaaaaagaaaacagaaaaaagaaagatgcgtgtgttggcttacgcactggccctcagagctgaccaacccgccaggcctgctcaatgcattgggtttggatgctctcctgttgtctgtcacacttaactcttgcatctccttgtccatgccatagctggtttctacttatgtatataaaggggggtggggggaggggcttctctggggcaattgataaaggaaggactctagtgacatcatagaacatggcagtcgtttttgttccaagaatgatatgaaaggtgaagaagaggcccactagaggcttcatactgagacccagatgggggaaaacagcttcctctctaaaaggaaaaacttgatatttatcagtctgagaaaatatttttttctaaagaaggcagtcagtggatcttaaaatgacaatctgtttttaaattggattctatgaaaatgcataatgcttatggtgaattctcaggctattctgagctcagaaaagtcccctgggcactaggtaaagcccagtgaatgtctcttggcatgggaggagttaaagaggttggaagggaagaggcatttgtggaattatgagttcatgcaaaactctccaggccaagtaggggtctagcctttaatgatattagtcaaaggcaattttagcaaagctgtgctatttgcttgtcagatgtacacaacttccttaaagtcaaatgtctgccttcagttcccttaaggtagttcttgcctctggggtgagtggctttcaaagccttttagcttttccagcacctcagccccttcacacatttacacataccaatttttttcaatagggtcacgttaagccatgctgtaagcattgtttttattttcaggcttagcctgagcacacttatttttgaaaatgatataatgtatatatatgggaggaaaggccacattttgtacctgttaatttttgtgggatgttgttcccattcttctttgtgagacagagagaatgtgatatagagaaatctggctggctacagtgtagatcagtattaggaatatttctaaagatcctgcttttttgtttcaagggttaaatggggcagacaattgcaatacttgtactaaacactggaatacaaatgcatgactcatatctatatatacagtatatgtacatatactgttcttggttttattgttccacttgaatatttctactgtaaaaaaaagacagtggttttgaaattgttgaaaataaatgtatttttgtacatc

SEQ ID NO: 1232 - protein, 1222 aa, Homo sapiens
MEAARTERPAGRPGAPLVRTGLLLLSTWVLAGAEITWDATGGPGRPAAPASRPPALSPLSPRAVASQWPEELASARRAAVLGRRAGPELLPQQGGGRGGEMQVEAGGTSPAGERRGRGIPAPAKLGGARRSRRAQPPITQERGDAWATAPADGSRGSRPLAKGSREEVKAPRAGGSAAEDLRLPSTSFALTGDSAHNQAMVHWSGHNSSVILILTKLYDFNLGSVTESSLWRSTDYGTTYEKLNDKVGLKTVLSYLYVNPTNKRKIMLLSDPEMESSILISSDEGATYQKYRLTFYIQSLLFHPKQEDWVLAYSLDQKLYSSMDFGRRWQLMHERITPNRFYWSVAGLDKEADLVHMEVRTTDGYAHYLTCRIQECAETTRSGPFARSIDISSLVVQDEYIFIQVTTSGRASYYVSYRREAFAQIKLPKYSLPKDMHIISTDENQVFAAVQEWNQNDTYNLYISDTRGIYFTLAMENIKSSRGLMGNIIIELYEVAGIKGIFLANKKVDDQVKTYITYNKGRDWRLLQAPDVDLRGSPVHCLLPFCSLHLHLQLSENPYSSGRISSKETAPGLVVATGNIGPELSYTDIGVFISSDGGNTWRQIFDEEYNVWFLDWGGALVAMKHTPLPVRHLWVSFDEGHSWDKYGFTSVPLFVDGALVEAGMETHIMTVFGHFSLRSEWQLVKVDYKSIFSRHCTKEDYQTWHLLNQGEPCVMGERKIFKKRKPGAQCALGRDHSGSVVSEPCVCANWDFECDYGYERHGESQCVPAFWYNPASPSKDCSLGQSYLNSTGYRRIVSNNCTDGLREKYTAKAQMCPGKAPRGLHVVTTDGRLVAEQGHNATFIILMEEGDLQRTNIQLDFGDGIAVSYANFSPIEDGIKHVYKSAGIFQVTAYAENNLGSDTAVLFLHVVCPVEHVHLRVPFVAIRNKEVNISAVVWPSQLGTLTYFWWFGNSTKPLITLDSSISFTFLAEGTDTITVQVAAGNALIQDTKEIAVHEYFQSQLLSFSPNLDYHNPDIPEWRKDIGNVIKRALVKVTSVPEDQILIAVFPGLPTSAELFILPPKNLTERRKGNEGDLEQIVETLFNALNQNLVQFELKPGVQVIVYVTQLTLAPLVDSSAGHSSSAMLMLLSVVFVGLAVFLIYKFKRKIPWINIYAQVQHDKEQEMIGSVSQSENAPKITLSDFTEPEELLDKELDTRVIGGIATIANSESTKEIPNCTSV

SEQ ID NO: 1233 - DNA, 1143 bp, Homo sapiens
cgtgcgctgcaccggccacgagaacgcgctggagcgctgcacccactcgggctgggcccggcacaactgccagcaccgcgaggacgcgggcgtggtgtgcgcaggtctggctgactctcttgtacctaaggacaatggtaaagtcttccctctagcgtctgaggctaaggatgctgatgggggagctgagagaacagccaagcaggggagaaagaacaggctgtgatggggacccgcttctgtgtttacactgagatctctggatttccacccactcgctgggttttaggagcccagctatcctgcttgcctcacctcttccaagccgtcattgaccgaggctatctccggaggctgggctactcctcctgggacatccacttaaatgatgagctatgtcgccccaaagtcatgggacgctgcctgatcttcaacattccctatggccactgtggcactatccagcaggagcaccttggctccctcagctactctaactccatcagaggccggaaacggggccaccctggccgagtcattgtgcggcacaaggtgcccaagctgaagttcacctgtagggcggacggcccatccacagttgaaatcattcatggggatgacgccccaacagagggtgctggctacaccgtgtctatatccttcctccagtcccctgagtcccagcatgtgggaggcatggtgccctactatgacagccagaggaaagaggtcttcctccaagccaccctccacagccccaatcccaacctgatgctcttcgtggatacctgtgtggcttctcctgatccccatgattttacagccatcaagtatgatttgatccggcaggggtgcatcaaagacaatacctacatcaacctccatccccgccagaagaacatggctcagttcaagttcaatgtcttcagctttcttgacagctatgatgtggtatatctgcagtgtaaggttgcagtgtgcaaggtgggggattatgcctctctctgctcctggggctgtacaggacagagtaggagaggtgcaggccccatggaggccaaggaaaagcagactgagcatttccaaatggtggggccactggagatccacaaagtcactgctcagaggaggactcttgagtga

SEQ ID NO: 1234 - protein, 305 aa, Homo sapiens
MGTRFCVYTEISGFPPTRWVLGAQLSCLPHLFQAVIDRGYLRRLGYSSWDIHLNDELCRPKVMGRCLIFNIPYGHCGTIQQEHLGSLSYSNSIRGRKRGHPGRVIVRHKVPKLKFTCRADGPSTVEIIHGDDAPTEGAGYTVSISFLQSPESQHVGGMVPYYDSQRKEVFLQATLHSPNPNLMLFVDTCVASPDPHDFTAIKYDLIRQGCIKDNTYINLHPRQKNMAQFKFNVFSFLDSYDVVYLQCKVAVCKVGDYASLCSWGCTGQSRRGAGPMEAKEKQTEHFQMVGPLEIHKVTAQRRTLE

SEQ ID NO: 1235 - DNA, 1827 bp, Homo sapiens
ttttttttttttatacggagtctcgctctgctgcccaggctggagtgcagtggtgcaatctcggctcactgccagctccgtctcctgggttcacaccattctcccgcctcaggctcctgagtagctgggactacaggtgcctgccaccaaacctggctaattttgtttttgtatttttagtagagacggggtttcaccgtgttagccaggatggtctcgatctcctgacctcgtgatccacccgcatctgcctcccaaagtgctgggattacaggcgtgagccaccgcgctaggctgcatattggctttttaaaatttcacttatcacttaacattatatgatatgcaatttaaatgttcttaaatattcctgaaaaacaagtttatggttgcacagggtttattttctaccaaaaccaaatttgactatcctcctcctagtgttagatattatgttcaacttttcaccataaaaaacaatgcataacttgcaaaaaccaaaaaagaattattggctgcaatattcaaatgaaatgataaaaatcaaaatcaatacatgttgaagtaaatgtctacaaaatacactattatatcaaattaactgttaaatttaattcactattattatttttttaagacagagtctcactatcgcccaggctggagcgcagtgttgccatctctgctcactgcaacctctgcctcccaggttcaagcgattctcctgcctcagcctccctagtagctgggattacaggcgcccaccaccacatctggctaatttttgtatttttagtagagatggggtttcaccctgttcgtcaggctggtctcgatctcctgacctcaggcaatctgcccacctcggcctcccaaagtgcagggattaaaggcgtgagccaccgcgcccggcctgttaaatttaattcataaaattgttttgttacatttgaaagcaatttgtgagttgaatgcttactcatcaggagcattcctgaaaacggacaggacagtgagttgtaagagccaaacgtgaattacaaattgagacagccaaattgcaagagccaagttaatttttaaaaacactttctgtatcttacggcacaacaaaacacttttactacaaaacatgtattgtataacggatgtggctgcgtttgacagtttgagatgacactgaggagtgtgaaagagagcctggaccttcaaagcttgcaaacggcccgggctatttctccacctcttcgctactcaaagcgctggcatcgtttcctgggaacctgtgagaaatgccgagtctcggacccatccagagcgcccgaatggaaacctaggcgttacgaggccccaggttcagcgtctcacgggtcctgcaccacctgggacgccccgcaagcagcgggcatgccgggcccccagaagactccgaaagccacccattccctaaacggggagggcctcgtccgcgcgtcccagcgccctccccggaagccccgccgctcccacacccaggatggggccacatgggcactaaaaggcgggcaggagcgcccagtctcgagatggctggctcgcctttccagtccgggccctcggggtgcccgtgtgaaaagatgtgacactgaagcctggggaagaagtttgaacctctcactaattcacgtaacgggagccgccggcagcgctgacggctgcacctcccctcccacgcggacactacctgcaggatcggacgacccccagaactgtttgccaacaaagacatgcagggggcggagcctgagcgtcagataccgtgagcggcgtgcagagggcggagcctag

SEQ ID NO: 1236 - protein, 217 aa, Homo sapiens [sequence omitted]

SEQ ID NO: 1237 - DNA, 4596 bp, Homo sapiens
gcggagcctaggagtcagataccgcgagaagtagtctcccgaagaggttcggacaagcgcaggcgcactacaattcccgccctggccgcgaaggtggcacccgcagcgggaggcggggccgggccttcgggacaaagatcgcgagatttaatggcgagtcacagctacttcttcctggcagagaccggaagtgcggtccgcggagcgtctctggcgcttaccctgctttgggcctgcgttgctgctgctgctcctccgctcccccgtcgtatcgcctgccctggatcgaagtgatgggggatgccaaggaggccggagccgagggtccgccggccggggccgccgctcgaggagggctcagcctcctgtcccagggagaatccgaggaatcttctgcacagggatcagctttatttcttggaggcaatgaagtgaagagccgagctgtggtgaaatactcttctgcccctcctcgaacagcatttgcacgccttgaagagaaaacagacttgaaactcccacctgccaactggttacgagagagtgccaaactagggccagcaggaactaccattcttggcaacagcaagaaaagcaagccattttcaagctttggcatggcatatgactttattgattcagtgggaaatgatgtggatgttgtctctgactctgaaaacataaaaaaactcctgaaaattccctacagcaagtcgcacgtgagcatggcagtacaccgcataggaaggactctcttactagatgagctagatattcaagaactctttatgagatcgtctcagactggtgactggacatggttgaaagagttttatcaaagactcattgatcagaagtggcagaggaagaaaaagagcaaagagcactggtatcaaaaggcaattctttccaagtttttatattacagtatcaatggtgatggagccgctcagcctgtctcatccaccgcagaacagcaggaatcgtccagttcagatcagacaaatgattcggaaggggcttcatggcctgctcccttcgaaatgccttcttcagtttctgaagatcccagtgcttccagtcagggtcttaaaaatgattttgttcggaatattctatggacatttgaagatatccatatgttggtcggctccaacatgcccatatttggaggaggcagatacccagcagtcagcttacgtctcagggataacaacaaaccaattaatgtgctaactggaattgactattggttggacaacttgatatgcaatgtgccagagcttgtgatgtgttttcatgtaaatggaattgtacagaaatatgaaatgataaagacagaagaaattcccaatttggaaaattctaatttttctactaaagtcataaaagacattgcacagaatattttatcatttttgaaatctaattgtaccaaagaaggacatacctattggctctttaaagcaagtggcagcgatatagtgaagctctatgacctcactactctttgtgaagaaactgaagacaaataccaaaatccattcacaatgccggtagccattctcttgtacaaggttgcttgcaacatgatgatgaagaagaatcaaaataagaaacactatggaactattagaacattgcttcttaattgtctgaaattactggacaaaagtaggcatcctcaaattattgcttccgccaattacatgctttcagaactttttcaattggatgaacctaaaaaggaagaaaattcagaatctcctttaaatgagaattctgatgaaagttatagtgaagaggaggaagagatgcccgacagtgatgaaaatggatcctatagcaccagctctgatccatcagatgatagcaaagcagtagctataatcaagtctgttggagaactatcagtaccagaaaaatacaaatctattcatcaaatcagacccagttgtgcatttccagtttgccatgacacagaagagcgctgtagacttgtgcttagctatgttctagagggtttaaaatctgtcgatagcagcatcaaaaaagaaagcgaccttccagcagctgaccccagcactccaatcccgttaaaatatgaagatgaatcctcaagagggggtcccgaggggctagagaagcagatggccttgtttttggacaaaatgggctcccttcagaagggcaattattccagtcaatctggaatgatccctggctcttggcaacataaaatgaaacttcagctgattctcaagtcatcaaaggcctattatgttttgtccgatgctgccatgagtcttcagaaatacggaagagcattacgatacattaaattagctttgcaaagccatgatacttattgctgcctctgcaccaatatgctttccgaagtgctgttgtttctctctcaatatttgacactttgtggtgatatccaactaatgctggcccagaatgcaaataatagagcagcacaccttgaagagtttcattaccaaacaaaagaagaccaggagatcctgcatagccttcacagagagtccagttgccaaggatttgcatgggcaactgatttgtctacagacttagaaagtcaactctctgttagttgtaaatgttatgaggctgctaatgaaatcttgcagtttagtgacttgaaaagccaaaatccagaacactatgtacaagtattaaagagaatgggtaacattagaaatgaaattggtgtgttttacatgaatcaggctgctgcattacagagtgagagactagtgagcaaatctgtgtctgctgccgagcaacagttgtggaaaaaaagcttttcttgttttgaaaagggaattcacaactttgaatcaattgaggatgccaccaatgccgcccttttattatgtaacacgggaaggctcatgcggatttgtgcgcaggcccactgtggtgcaggggatgaactgaaacgtgaattttcaccagaagaaggcttgtattataataaggctattgattactatttgaaagcgctaaggtcattgggaacacgagacatacacccagctgtttgggattcagtgaactgggaattgtccactacttactttactatggcaactctacagcaagattatgctccgttatctagaaaagctcaggagcagattgagaaagaagtcagtgaggccatgatgaagtccctaaaatactgcgatgtggattcagtgtctgctcgacagcccctttgtcagtatcgagctgcaaccatccatcacaggctggcctccatgtaccacagctgtctgaggaatcaggttggtgatgaacaccttaggaaacaacaccgggtgctggcagatcttcattacagcaaggccgcaaagctgtttcagctgctgaaagatgctccctgcgaactgcttagagtacagctagagagagtagcatttgctgaatttcagatgaccagtcagaatagcaatgttggaaagttgaaaacactatctggggctcttgatataatggtgagaactgagcacgcattccagcttatccagaaggagcttatagaagaatttggccagcctaagagtggtgacgccgctgcagctgctgatgcttctcctagtctcaatcgagaagaagtgatgaaactcctcagtatatttgagtctcggttgtcatttcttctccttcagtccattaaactgctatcttcaactaaaaagaaaacaagcaataacatcgaagatgacacaattctcaaaaccaacaagcacatttactcccagcttttgagagcaactgcaaataaaaccgcgactcttctggaaagaatcaacgttatcgtccacctgctgggccagcttgccgccggcagtgcagcgagcagcaatgccgttcagtgactgcacagagccgtgtcccagacacgctgtcagtgccttcaacacggagccggtttgttcattcggtgctttgtttcattaaataatagggaaatatccatttaaaacaggtatatcagtggaaacacagagttattttaagtgacagacaaattacggttgagttctgtggcttcttcacttgaagtgctaacatcagaatcaaacttaaagcttccactatttatgtctttgagaagtatgtagtacctcggtattaacagacctgctgtgatgcagttacactttcacgtatttttgaagtatgtcaagctacacgggtctaagatatgattattttggataaaatgttactttggtcaagagaacttttatccagatgacattacaggttcaagtgggttaaggagacctcctgtacatctacagtgtttccttttaaattgtccagaaaaaaggtgtgttcttcataagcttcagtgcaggatttttcaaagacgagctgttgtgcaatttgctgtatttaatgcatgttctgaaaggattcacttttgactttatatgacagttgatcaagaacaggtactacccctttttttcatttcaaacttgaaactgtgaataaggtaagaaaactattttgaataaataaactatttatttaaaatgtcaaaaaaaaaaaaaaaaa

SEQ ID NO: 1238 - protein, 1204 aa, Homo sapiens
MGDAKEAGAEGPPAGAAARGGLSLLSQGESEESSAQGSALFLGGNEVKSRAVVKYSSAPPRTAFARLEEKTDLKLPPANWLRESAKLGPAGTTILGNSKKSKPFSSFGMAYDFIDSVGNDVDVVSDSENIKKLLKIPYSKSHVSMAVHRIGRTLLLDELDIQELFMRSSQTGDWTWLKEFYQRLIDQKWQRKKKSKEHWYQKAILSKFLYYSINGDGAAQPVSSTAEQQESSSSDQTNDSEGASWPAPFEMPSSVSEDPSASSQGLKNDFVRNILWTFEDIHMLVGSNMPIFGGGRYPAVSLRLRDNNKPINVLTGIDYWLDNLICNVPELVMCFHVNGIVQKYEMIKTEEIPNLENSNFSTKVIKDIAQNILSFLKSNCTKEGHTYWLFKASGSDIVKLYDLTTLCEETEDKYQNPFTMPVAILLYKVACNMMMKKNQNKKHYGTIRTLLLNCLKLLDKSRHPQIIASANYMLSELFQLDEPKKEENSESPLNENSDESYSEEEEEMPDSDENGSYSTSSDPSDDSKAVAIIKSVGELSVPEKYKSIHQIRPSCAFPVCHDTEERCRLVLSYVLEGLKSVDSSIKKESDLPAADPSTPIPLKYEDESSRGGPEGLEKQMALFLDKMGSLQKGNYSSQSGMIPGSWQHKMKLQLILKSSKAYYVLSDAAMSLQKYGRALRYIKLALQSHDTYCCLCTNMLSEVLLFLSQYLTLCGDIQLMLAQNANNRAAHLEEFHYQTKEDQEILHSLHRESSCQGFAWATDLSTDLESQLSVSCKCYEAANEILQFSDLKSQNPEHYVQVLKRMGNIRNEIGVFYMNQAAALQSERLVSKSVSAAEQQLWKKSFSCFEKGIHNFESIEDATNAALLLCNTGRLMRICAQAHCGAGDELKREFSPEEGLYYNKAIDYYLKALRSLGTRDIHPAVWDSVNWELSTTYFTMATLQQDYAPLSRKAQEQIEKEVSEAMMKSLKYCDVDSVSARQPLCQYRAATIHHRLASMYHSCLRNQVGDEHLRKQHRVLADLHYSKAAKLFQLLKDAPCELLRVQLERVAFAEFQMTSQNSNVGKLKTLSGALDIMVRTEHAFQLIQKELIEEFGQPKSGDAAAAADASPSLNREEVMKLLSIFESRLSFLLLQSIKLLSSTKKKTSNNIEDDTILKTNKHIYSQLLRATANKTATLLERINVIVHLLGQLAAGSAASSNAVQ

SEQ ID NO: 1239 - DNA, 1919 bp, Homo sapiens
atgctcgccgcctccatcttccgtccgacactgctgctctgctggctggctgctccctggcccacccagcccgagagtctcttccacagccgggaccgctcggacctggagccgtccccactgcgccaggccaagcccattgccgacctccacgctgctcagcggttcctgtccagatacggctggtcaggggtgtgggcggcctgggggcccagtcccgaggggccgccggagacccccaagggcgccgccctggccgaggcggtgcgcaggttccagcgggcgaacgcgctgccggccagcggggagctggacgcggccaccctagcggccatgaaccggccgcgctgcggggtcccggacatgcgcccaccgcccccctccgccccgccttcgcccccgggcccgccccccagagcccgctccaggcgctccccgcgggcgccgctgtccttgtcccggcggggttggcagccccggggctaccccgacggcggagctgcccaggccttctccaagaggacgctgagctggcggctgctgggcgaggccctgagcagccaactgtccgtggccgaccagcggcgcattgtggcgctggccttcaggatgtggagcgaggtgacgccgctggacttccgcgaggacctggccgcccccggggccgcggtcgacatcaagctgggctttgggagaggccggcacctgggctgtccgcgggccttcgatgggagcgggcaggagtttgcacacgcctggcgcctaggtgacattcactttgacgacgacgagcacttcacacctcccaccagtgacacgggcatcagccttctcaaggtggccgtccatgaaattggccatgtcctgggcttgcctcacacctacaggacgggatccataatgcaaccaaattacattccccaggagcctgcctttgagttggactggtcagacaggaaagcaattcaaaagctgtatggctcctgtgagggatcatttgatactgcgtttgactggattcgcaaagagagaaaccaatatggagaggtgatggtgagatttagcacatatttcttccgtaacagctggtactggctttatgaaaatcgaaacaataggacacgctatggggaccctatccaaatcctcactggctggcctggaatcccaacacacaacatagatgcctttgttcacatctggacatggaaaagagatgaacgttatttttttcaaggaaatcaatactggagatatgacagtgacaaggatcaggccctcacagaagatgaacaaggaaaaagctatcccaaattgatttcagaaggatttcctggcatcccaagtcccctagacacggcgttttatgaccgaagacagaagttaatttacttcttcaaggagtcccttgtatttgcatttgatgtcaacagaaatcgagtacttaattcttatccaaagaggattactgaagtttttccagcagtaataccacaaaatcatcctttcagaaatatagattccgcttattactcctatgcatacaactccattttctttttcaaaggcaatgcatactggaaggtagttaatgacaaggacaaacaacagaattcctggcttcctgctaatggcttatttccaaaaaagtttatttcagagaagtggtttgatgtttgtgacgtccatatctccacactgaacatgtaataagaaaaagtaggaaatggagggtcataggacttcgctaaaattctgatactgtttacaaagaaaaccggattttcagtagctgaagaaaatatggcactgtaagttaaaacccaatgggaaaagccttagttgaacttttaaaatacttgatttaaaaacaattgctcaggcaaaacataattcataaactaaaaggtttaaaaaaa

SEQ ID NO: 1240 - protein, 569 aa, Homo sapiens
MLAASIFRPTLLLCWLAAPWPTQPESLFHSRDRSDLEPSPLRQAKPIADLHAAQRFLSRYGWSGVWAAWGPSPEGPPETPKGAALAEAVRRFQRANALPASGELDAATLAAMNRPRCGVPDMRPPPPSAPPSPPGPPPRARSRRSPRAPLSLSRRGWQPRGYPDGGAAQAFSKRTLSWRLLGEALSSQLSVADQRRIVALAFRMWSEVTPLDFREDLAAPGAAVDIKLGFGRGRHLGCPRAFDGSGQEFAHAWRLGDIHFDDDEHFTPPTSDTGISLLKVAVHEIGHVLGLPHTYRTGSIMQPNYIPQEPAFELDWSDRKAIQKLYGSCEGSFDTAFDWIRKERNQYGEVMVRFSTYFFRNSWYWLYENRNNRTRYGDPIQILTGWPGIPTHNIDAFVHIWTWKRDERYFFQGNQYWRYDSDKDQALTEDEQGKSYPKLISEGFPGIPSPLDTAFYDRRQKLIYFFKESLVFAFDVNRNRVLNSYPKRITEVFPAVIPQNHPFRNIDSAYYSYAYNSIFFFKGNAYWKVVNDKDKQQNSWLPANGLFPKKFISEKWFDVCDVHISTLNM

SEQ ID NO: 1241 - DNA, 1279 bp, Homo sapiens
tcctggggcccagcgcgggtggctgccgcggcccctcgggctgcgtggggagggggcttccgcccctgttgtcattgctcctgcagccttttcgctgggactgcgcgacaccgccccccgaccgggtgcccgctgtgtgccaggccgggtgctgggcacggtcccgcgagtgccctataaggactgccaggcaataatgaaggttcttttactgaaggatgcgaaggaagatgactgtggccaggatccgtatatcagggaattaggattatatggacttgaagccactttgatccctgttttatcgtttgagtttttgtctcttcccagtttctctgagaagctttctcatcctgaagattacgggggactcatttttaccagccccagagcagtggaagcagcagagttatgtttggagcaaaacaataaaactgaagtctgggaaaggtctctgaaagaaaaatggaatgccaagtcagtgtatgtggttggaaatgctactgcttctctagtgagtaaaattggcctggatacagaaggagaaacctgtggaaatgcagaaaagcttgcagaatatatttgttccagggagtcctcagcactgcctcttctatttccctgtggaaacctcaaaagagaaatcctgccaaaagcgctcaaggacaaagggattgccatggaaagcataactgtgtatcagacagttgcacacccaggaatccaagggaacctgaacagctactattcccagcagggggttccagccagcatcacattttttagtccctctggcctcacatacagtctcaagcacattcaggagttatctggtgacaatatcgatcaaattaagtttgcagccatcggccccactacggctcgcgcgctggccgcccagggccttcctgtaagctgcactgcagagagccccacgccacaagccctggccactggcatcaggaaggctctccagccccatggctgctgctgagtcagccacctagcgctggccccatgcagcctccctgggctgggctggctctggatggagccaggcatcggcaagggctctcgggagctgctgccgtcagactcctgcctcaagcctgagtggaagcacctgaggaccggggatcgggacctgacctggggctggcctcaggcccacgtgcacgtgactgccctctgtggaagccagcttaaaccctagccctgtgagagcttcctgtgcccagcaggaaggaagtcaaataaaccacactgactacctgtgctt

SEQ ID NO: 1242 - protein, 265 aa, Homo sapiens
MKVLLLKDAKEDDCGQDPYIRELGLYGLEATLIPVLSFEFLSLPSFSEKLSHPEDYGGLIFTSPRAVEAAELCLEQNNKTEVWERSLKEKWNAKSVYVVGNATASLVSKIGLDTEGETCGNAEKLAEYICSRESSALPLLFPCGNLKREILPKALKDKGIAMESITVYQTVAHPGIQGNLNSYYSQQGVPASITFFSPSGLTYSLKHIQELSGDNIDQIKFAAIGPTTARALAAQGLPVSCTAESPTPQALATGIRKALQPHGCC

SEQ ID NO: 1243 - DNA, 1290 bp, Homo sapiens
gtgagcggcaacatggcgtccaggtctaagcggcgtgccgtggaaagtggggttccgcagccgccggatcccccagtccagcgcgacgaggaagaggaaaaagaagtcgaaaatgaggatgaagacgatgatgacagtgacaaggaaaaggatgaagaggacgaggtcattgacgaggaagtgaatattgaatttgaagcttattccctatcagataatgattatgacggaattaagaaattactgcagcagctttttctaaaggctcctgtgaacactgcagaactaacagatctcttaattcaacagaaccatattgggagtgtgattaagcaaacggatgtttcagaagacagcaatgatgatatggatgaagatgaggtttttggtttcataagccttttaaatttaactgaaagaaagggtacccagtgtgttgaacaaattcaagagttggttctacgcttctgtgagaagaactgtgaaaagagcatggttgaacagctggacaagtttttaaatgacaccaccaagcctgtgggccttctcctaagtgaaagattcattaatgtccctccacagatcgctctgcccatgtaccagcagcttcagaaagaactggcgggggcacacagaaccaataagccatgtgggaagtgctacttttaccttctgattagtaagacatttgtggaagcaggaaaaaacaattccaaaaagaaacctagcaacaaaaagaaagctgcgttaatgtttgcaaatgcagaggaagaatttttctatgaggagcagggaaaacctgaggtgcttggaggtccagacacaagaagaggattggaaccagttccgatacagcacaatggtggttcacgggggcaagtgacagccctggtttctctgaaggctggactaattcaatcaagatcaactctaagtgatttccagggaaccttcatgactgttggaattgctctgtcataataagtcagggatatttaggaggctcatagtctcctggagggataaaacatctcggcacctagtaatggtaaattagtcaatatttgttagtttcgtttgagatctcaaatgttaggattttctgaagtctcagtgtctttcagagtttgagataccttgttttcattttttctaatttttaatttaaaagtaataaagaatattttgtaatgattaggatgaaaattttatcgtcaattataagccaaaatttgctaaaattaaagtcagtatacttggaaaaaaaaaaaaaaaaaaaaaaaaaaaaaa

SEQ ID NO: 1244 - protein, 322 aa, Homo sapiens
MASRSKRRAVESGVPQPPDPPVQRDEEEEKEVENEDEDDDDSDKEKDEEDEVIDEEVNIEFEAYSLSDNDYDGIKKLLQQLFLKAPVNTAELTDLLIQQNHIGSVIKQTDVSEDSNDDMDEDEVFGFISLLNLTERKGTQCVEQIQELVLRFCEKNCEKSMVEQLDKFLNDTTKPVGLLLSERFINVPPQIALPMYQQLQKELAGAHRTNKPCGKCYFYLLISKTFVEAGKNNSKKKPSNKKKAALMFANAEEEFFYEEQGKPEVLGGPDTRRGLEPVPIQHNGGSRGQVTALVSLKAGLIQSRSTLSDFQGTFMTVGIALS

SEQ ID NO: 1245 - DNA, 1268 bp, Homo sapiens
gtgagcggcaacatggcgtccaggtctaagcggcgtgccgtggaaagtggggttccgcagccgccggatcccccagtccagcgcgacgaggaagaggaaaaagaagtcgaaaatgaggatgaagacgatgatgacagtgacaaggaaaaggatgaagaggacgaggtcattgacgaggaagtgaatattgaatttgaagcttattccctatcagataatgattatgacggaattaagaaattactgcagcagctttttctaaaggctcctgtgaacactgcagaactaacagatctcttaattcaacagaaccatattgggagtgtgattaagcaaacggatgtttcagaagacagcaatgatgatatggatgaagatgaggtttttggtttcataagccttttaaatttaactgaaagaaagggtacccagtgtgttgaacaaattcaagagttggttctacgcttctgtgagaagaactgtgaaaagagcatggttgaacagctggacaagtttttaaatgacaccaccaagcctgtgggccttctcctaagtgaaagattcattaatgtccctccacagatcgctctgcccatgtaccagcagcttcagaaagaactggcgggggcacacagaaccaataagccatgtgggaagtgctacttttaccttctgattagtaagacatttgtggaagcaggaaaaaacaattccaaaaagaaacctagcaacaaaaagaaagctgcgttaatgtttgcaaatgcagaggaagaatttttctatgagaaggcaattctcaagttcaactactcagtgcaggaggagagcgacacttgtctgggaggcaaatggtcttttgatgacgtaccaatgacgcccttgcgaactgtgatgttaattccaggcgacaagatgaacgaaatcatggataaactgaaagaatatctatctgtctaacccatttccaatggacagtgatgggcttgtttttgtaaaattaccagaaaactcagtggagatttactgaaaaactcagactttattcagattaagttcctctacaaaaagtagggttctgtcccatgtgtctctgacacatttacaaaataccagttttttaaaattttggtcaaattatgagtggttgatttaaaaacttttccaagaagaagaaaagcatggagtcgtaatttaaagaactcaataaaaacttctattttttattttaaaataataccaaaaaaaaaaaaaaaaaaaaaaaaaaaaaa

SEQ ID NO: 1246 - protein, 314 aa, Homo sapiens
MASRSKRRAVESGVPQPPDPPVQRDEEEEKEVENEDEDDDDSDKEKDEEDEVIDEEVNIEFEAYSLSDNDYDGIKKLLQQLFLKAPVNTAELTDLLIQQNHIGSVIKQTDVSEDSNDDMDEDEVFGFISLLNLTERKGTQCVEQIQELVLRFCEKNCEKSMVEQLDKFLNDTTKPVGLLLSERFINVPPQIALPMYQQLQKELAGAHRTNKPCGKCYFYLLISKTFVEAGKNNSKKKPSNKKKAALMFANAEEEFFYEKAILKFNYSVQEESDTCLGGKWSFDDVPMTPLRTVMLIPGDKMNEIMDKLKEYLSV

SEQ ID NO: 1247 - DNA, 2338 bp, Homo sapiens
gtgagcggcaacatggcgtccaggtctaagcggcgtgccgtggaaagtggggttccgcagccgccggatcccccagtccagcgcgacgaggaagaggaaaaagaagtcgaaaatgaggatgaagacgatgatgacagtgacaaggaaaaggatgaagaggacgaggtcattgacgaggaagtgaatattgaatttgaagcttattccctatcagataatgattatgacggaattaagaaattactgcagcagctttttctaaaggctcctgtgaacactgcagaactaacagatctcttaattcaacagaaccatattgggagtgtgattaagcaaacggatgtttcagaagacagcaatgatgatatggatgaagatgaggtttttggtttcataagccttttaaatttaactgaaagaaagggtacccagtgtgttgaacaaattcaagagttggttctacgcttctgtgagaagaactgtgaaaagagcatggttgaacagctggacaagtttttaaatgacaccaccaagcctgtgggccttctcctaagtgaaagattcattaatgtccctccacagatcgctctgcccatgtaccagcagcttcagaaagaactggcgggggcacacagaaccaataagccatgtgggaagtgctacttttaccttctgattagtaagacatttgtggaagcaggaaaaaacaattccaaaaagaaacctagcaacaaaaagaaagctgcgttaatgtttgcaaatgcagaggaagaatttttctatgaggagcagggaaaacctgaggtgcttggaggtccagacacaagaagaggattggaaccagttccgatacagcacaatggttggtctgttcccccagtattagaataaattaaaacatacaagccaggatgaatgaagccaataggaaataaaaaacaggcacacaacattatttggggaaaaacacctctagtgacacattttcttcatctgcactgattatttcagcaaaagaaatctagtatgttttcatacatctgatgtataaatttgctgaactttgagttagttttcttaagataatttttcatattaagaaaattttccttttctaacctattaaaatacctcactatcatttcaaaaggttaaatgagttgatcactatctctgctctgtgctcctcaaaatataatttcaaatggatccgatctaaatctatacctagtgcagatttgcaaaaaaagaaaaggaatagtcattaaggatacctgttaccatggctgcgattgttagcacttcatctacacagtcaaattcacaggacgctaagatagacttcgagagttgtggatcaagaggaaactctgacatgatgattccaaattcagaaagatttccatcattatccagtgctgccagataatctaagtcttccaatgcctgcatcaaactttctggtgctaggaaaggaaaaaaataataatttaagagtctcatatggctaagatggagaaacaggtactggacttttccctcctgcatgaaacaagcaaacaatggacaaaatatgtgaaacaacggtttgcaagccaccaaataccagggagtgaaggatagtgattcttgagagggcaaactcaggaggggagccctgtgattgtccagctcatgctccgaggagggtcccagctgcagtgtgcatgcggggggaacccaggtggagcctgccagcctccctgcagtaggaaaacaatgccagggatccagggagactaaggtggccggaactcgcggtcacagtactggagagagacacacagatctaagtcgggggccagagggagctccctcaactaggcagcacagccctactgatcagcgcatgtgtgtaaggaaccacctcaggccagagaaagagccatgtgagaagattagaaggaacagtggtgctgacacaggacctagggtagggcctgttcccaccaccctagctggaaaacctcatgatttatggggcactgggtagaaaacacaagtgagaaaccctagatgggcactgccacctgacacagctatacagcaggacctgaaaggatcacactgcatcctaggacaaagctcaaaagtacctctgggactacaaaaatattcagtgcccaagaaggtaaaatgtacaatgtctagcatccagtagagaggcatgaaaagcaggaaaatacattgcataatacagagaaaaattaatcacaactgacctggatctcagatgctagaaatagtagacaaagatgttatttcccagtgcaaataaagaaataaagatagcaagctg

SEQ ID NO: 1248 - protein, 292 aa, Homo sapiens
MASRSKRRAVESGVPQPPDPPVQRDEEEEKEVENEDEDDDDSDKEKDEEDEVIDEEVNIEFEAYSLSDNDYDGIKKLLQQLFLKAPVNTAELTDLLIQQNHIGSVIKQTDVSEDSNDDMDEDEVFGFISLLNLTERKGTQCVEQIQELVLRFCEKNCEKSMVEQLDKFLNDTTKPVGLLLSERFINVPPQIALPMYQQLQKELAGAHRTNKPCGKCYFYLLISKTFVEAGKNNSKKKPSNKKKAALMFANAEEEFFYEEQGKPEVLGGPDTRRGLEPVPIQHNGWSVPPVLE

SEQ ID NO: 1249 - DNA, 3070 bp, Homo sapiens
aggcagagagcacgaggcccagtgcagaatcattttctgaaccagccaggaaataccggaacccaccaaactttaaacaccagcctaaattattcctgttcttttaagcaggcagcagaaatgacagaaacccgttaacagaaaaaaaaaaaataatgcttttcatttgaactcctgtgcattttctttttaacttatatgtgttcctaattttccttactctttttgtttgtttgtttcttagtgtggtttattgacaatcatttacaatgccgaagagtgctgtagtgagccagcacagtgggtaacacagcaacggagaacagatgcaggtttgaggaatttaacttgctaaaaccttgaactgaagtcttagagattggaacatacgggtttgtataaataggcttttaagccctgtttgcaatgggttactgataggagaaacttgcttgtggaatgtcagctgcgtgagctcactgtcagacaagatggaagaagaagggctggagtgtccaaactcttcctctgaaaaacgctattttcctgaatccctggattccagcgatggggatgaggaagaggttttggcctgtgaggatttggaacttaacccctttgatggattgccatattcatcacgttattataaacttctgaaagaaagagaagatcttcctatatggaaagaaaaatactcctttatggagaacctgcttcaaaatcaaatcgtgattgtttcaggagatgctaaatgtggtaagagcgctcaggttcctcagtggtgtgctgaatattgtctttccatccactaccagcacgggggcgtgatatgcacacaggtccacaagcagactgtggtccagctcgccctgcgggtggcggatgaaatggatgttaacattggtcatgaggttggctacgtgatccctttcgagaactgctgtaccaacgaaacaatcctgaggtattgtactgatgatatgctgcaaagagaaatgatgtccaatccttttttgggtagctatggggtcatcatcttagatgatattcatgaaagaagcattgcaactgatgtgttacttggacttcttaaagatgttttactagcaagaccagaactgaagctcataattaactcctcacctcacctgatcagcaaactcaattcttattatggaaacgtgcctgtcatagaagtgaaaaataaacaccctgtggaggttgtgtaccttagtgaggctcaaaaggattcttttgagtctattttacgccttatctttgaaattcaccactcgggtgagaaaggtgacattgtagtctttctggcctgtgaacaagatattgagaaagtctgtgaaactgtctatcaaggatctaacctaaacccagatcttggagaactggtggttgttcctttgtatccaaaagagaaatgttcattgttcaagccactcgatgaaacagaaaaaagatgccaagtttatcaaagaagagtggtgttaactactagctctggagagtttttgatctggagcaactcagtcagatttgttatcgatgtgggtgtggaaagaagaaaggtgtacaacccgagaataagagcaaactcgctcgtcatgcagcccatcagccagagccaggcagagatacgcaagcagattcttggctcatcttcttcaggaaaatttttctgcctgtacactgaagaatttgcctccaaagacatgacgccactgaagccagcagaaatgcaggaagccaacctaacaagcatggtgctttttatgaagaggatagacattgcgggcctaggccactgtgacttcatgaacagaccagcaccagaaagtttgatgcaggcattggaagacttagattatctggcagcactggataatgatggaaatctttctgaatttggaatcatcatgtcagagtttcctcttgatccacaactctcgaagtctatcttagcgtcctgtgaatttgactgtgtagatgaagtgctaacaatcgcagccatggtaacagctccaaattgcttttcacatgtgccacatggagctgaagaggctgccttgacttgttggaagacatttttacatcccgaaggagatcactttaccctcatcagcatttacaaggcttaccaagacacaactctgaattctagcagtgagtactgtgtggaaaagtggtgtcgtgattacttcctcaactgttcagcactcagaatggcagatgttattcgagctgaactcttagaaattatcaagcgaatcgagcttccctatgcagaacctgcttttggctccaaggaaaacactctaaacataaagaaagctcttctgtccggttactttatgcagattgctcgggatgttgatggatcaggtaactacttaatgctgacacataagcaggttgctcagctgcatcccctgtctggttactcaatcaccaagaagatgccagagtgggtcctcttccataaattcagcatttctgagaacaactacatcaggattacctcagaaatctctcctgaactatttatgcagctggtaccacaatactatttcagtaatctgcctcctagtgaaagtaaggacattctacagcaagtagtggatcacctatcccctgtgtcaacaatgaataaggaacagcaaatgtgtgagacgtgccctgaaactgaacagagatgcactctccagtgactccccagcaaacacaaggtgcagcagggtcccaaaggtagctggatggctgaactgctggatatgggagatacatgacgcgaagacggatttcacatccacaggacggtcttgaagaaaataacactgtgtatattattttaaaataaaaaatagaagtttttattgagttctttaaattactactccatgcttttcttcttcttggaaaagtttttaaatcaaccactcataatttgaccaaaattttaaaaaactggtattttgtaaatgtgtcagagacacatgggacagaaccctactttttgtagaggaacttaatctgaataaagtctgagtttttcagt

SEQ ID NO: 1250 - protein, 743 aa, Homo sapiens
MEEEGLECPNSSSEKRYFPESLDSSDGDEEEVLACEDLELNPFDGLPYSSRYYKLLKEREDLPIWKEKYSFMENLLQNQIVIVSGDAKCGKSAQVPQWCAEYCLSIHYQHGGVICTQVHKQTVVQLALRVADEMDVNIGHEVGYVIPFENCCTNETILRYCTDDMLQREMMSNPFLGSYGVIILDDIHERSIATDVLLGLLKDVLLARPELKLIINSSPHLISKLNSYYGNVPVIEVKNKHPVEVVYLSEAQKDSFESILRLIFEIHHSGEKGDIVVFLACEQDIEKVCETVYQGSNLNPDLGELVVVPLYPKEKCSLFKPLDETEKRCQVYQRRVVLTTSSGEFLIWSNSVRFVIDVGVERRKVYNPRIRANSLVMQPISQSQAEIRKQILGSSSSGKFFCLYTEEFASKDMTPLKPAEMQEANLTSMVLFMKRIDIAGLGHCDFMNRPAPESLMQALEDLDYLAALDNDGNLSEFGIIMSEFPLDPQLSKSILASCEFDCVDEVLTIAAMVTAPNCFSHVPHGAEEAALTCWKTFLHPEGDHFTLISIYKAYQDTTLNSSSEYCVEKWCRDYFLNCSALRMADVIRAELLEIIKRIELPYAEPAFGSKENTLNIKKALLSGYFMQIARDVDGSGNYLMLTHKQVAQLHPLSGYSITKKMPEWVLFHKFSISENNYIRITSEISPELFMQLVPQYYFSNLPPSESKDILQQVVDHLSPVSTMNKEQQMCETCPETEQRCTLQ

SEQ ID NO: 1251 - DNA, 696 bp, Homo sapiens
atgacggggcaaagccgggcaaaaccgtgctcctggctctcgcgattcaggagacgcgccaggctcactggggacgacagcgacgacggcggcggctcgcattgctccacgcttcccgtcaggggggctcgagggaccgccccaggcccggcccatgcccgggctcggagggagcccctggtgcgagggctgcccgcagggctccgtcctcccgctgaggcgcggctcccggagcaggaggcgcggaggccgccctcggcgtttcggagtcggggcggggaacgtccacggccaactgcgggcaggggacccccaggcggctacaacagcggcggctcccgattcccgggagggcggcccagggccggcgccttacccgcgggcaggcccactcgcccgacggacgccgcgggtcggcgacagcggggaccgcgggtcggcgacgtcggggcacaggtcctgcggggccgcgggggccgccagggagggcgcgaccgcctgaccgggcttcaggagcagtgtcctcagccggtgacctggccgctaccctcgctcagtgtccccggcgacgcgcgggtcctcacgcgctccctcacttcctgcggcttttggtccctcccgctcgccgtccctttagttctgcccacttcgcctccgggttgtcagggcaaccgtagcgacgccggccctggctga

SEQ ID NO: 1252 - protein, 231 aa, Homo sapiens
MTGQSRAKPCSWLSRFRRRARLTGDDSDDGGGSHCSTLPVRGARGTAPGPAHARARREPLVRGLPAGLRPPAEARLPEQEARRPPSAFRSRGGERPRPTAGRGPPGGYNSGGSRFPGGRPRAGALPAGRPTRPTDAAGRRQRGPRVGDVGAQVLRGRGGRQGGRDRLTGLQEQCPQPVTWPLPSLSVPGDARVLTRSLTSCGFWSLPLAVPLVLPTSPPGCQGNRSDAGPG

SEQ ID NO: 1253 - DNA, 1395 bp, Homo sapiens
catttcgcctccgggttgtcagggcaaccgtagcgacgccggccctggctgagaggcgttaggagtccgggggttcgcccgcggaggccggggagcagccgaccatggagccccagagaatcatgccaccctcaaagcctcatccacctgtcgtgggcaaagtgactcatcacagcattgaattatactgggatctggaaaagaaagccaaacgccaaggacctcaagagcagtggttcaggttctcgattgaagaagaagaccccaaaatgcacacttatggtatcatttatacgggatatgcaacgaagcatgttgttgaaggtctggaaccaaggacgctgtacagatttcgcctgaaggtcaccagcccctctggggagtgtgagtacagcccactcgtctcagtgtctacaaccagagagcccataagtagtgagcacttgcaccgggctgtcagtgtgaatgatgaagatttgctggtccgaatacttcaaggaggccgtgttaaggttgatgttcccaataagtttggctttaccgctctgatggttgctgcccagaaaggatacaccaggcttgtgaaaatcctagtttctaatggcacagacgtgaatctgaagaatggaagtggcaaggacagtctaatgctggcgtgctatgcgggacacctagatgttgtgaaatatctccgaagacatggcgcttcttggcaggctagagacctgggaggctgtacagctctgcactgggctgcagatggaggccactgcagtgtgattgagtggatgataaaggatggctgtgaggtagacgtcgtggacactggttcaggatggaccccactcatgagagtctctgcggtgtcgggaaatcagagggtggcctctcttctaattgatgctggggccaatgtgaatgtgaaggacagaaatggaaagacgccccttatggtggctgtgttaaataatcatgaagagttagttcagttacttcttgacaaaggggcagatgcaagtgtaaaaaatgagttcggcaaaggtgtcctagaaatggccagagtttttgacagacagagtgtagtctccttattagaagaaaggaaaaaaaagcagaggccaaagaagtcttgtgtctgctgatgagagcaccactcatctgcgaaacgcacgtaaaacaaagtgaaccgtgactgttaaactagggatgggaaattctgcatcttggggggctgtacatttatttatttagttgaagattcactgatcccactttgaaatacatctttttacctaaaaaaaaaaaaaaaaaaaaaaaaaaaaaaaaaaaaaaaaaaaaaaaaaaaaaaaaaaaaaaaaaaaaaaaaaaaaaaaaaaaaaaaaaaaaaaaaaaaaa

SEQ ID NO: 1254 - protein, 345 aa, Homo sapiens
MEPQRIMPPSKPHPPVVGKVTHHSIELYWDLEKKAKRQGPQEQWFRFSIEEEDPKMHTYGIIYTGYATKHVVEGLEPRTLYRFRLKVTSPSGECEYSPLVSVSTTREPISSEHLHRAVSVNDEDLLVRILQGGRVKVDVPNKFGFTALMVAAQKGYTRLVKILVSNGTDVNLKNGSGKDSLMLACYAGHLDVVKYLRRHGASWQARDLGGCTALHWAADGGHCSVIEWMIKDGCEVDVVDTGSGWTPLMRVSAVSGNQRVASLLIDAGANVNVKDRNGKTPLMVAVLNNHEELVQLLLDKGADASVKNEFGKGVLEMARVFDRQSVVSLLEERKKKQRPKKSCVC

SEQ ID NO: 1255 - DNA, 3615 bp, Homo sapiens
gcggcggcctcgaggtgacaactgtctccgtcgcaggctccggcgggggcgcaggaggtcgcccggcgcgtcactgtcgggtcggcgagccacgggggccgccgcagcaccatggcgaccaccgtcagcactcagcgcgggccggtgtacatcggtgagctcccgcaggacttcctccgcatcacgcccacacagcagcagcggcaggtccagctggacgcccaggcggcccagcagctgcagtacggaggcgcagtgggcaccgtgggccgactgaacatcacggtggtacaggcaaagttggccaagaattacggcatgacccgcatggacccctactgccgactgcgcctgggctacgcggtgtacgagacgcccacggcacacaatggcgccaagaatccccgctggaataaggtcatccactgcacggtgcccccaggcgtggactctttctatctcgagatcttcgatgagagagccttctccatggacgaccgcattgcctggacccacatcaccatcccggagtccctgaggcagggcaaggtggaggacaagtggtacagcctgagcgggaggcagggggacgacaaggagggcatgatcaacctcgtcatgtcctacgcgctgcttccagctgccatggtgatgccaccccagcccgtggtcctgatgccaacagtgtaccagcagggcgttggctatgtgcccatcacagggatgcccgctgtctgtagccccggcatggtgcccgtggccctgcccccggccgccgtgaacgcccagccccgctgtagcgaggaggacctgaaagccatccaggacatgttccccaacatggaccaggaggtgatccgctccgtgctggaagcccagcgagggaacaaggatgccgccatcaactccctgctgcagatgggggaggagccatagagcctctgcctcgatgccgttttgcccccgctctttggacacgccgacccggcgctccccaaggaatgctgtcccaacaagattcccgtgaaagagcacccgtgtcgccccctcccgtggacttctgtgccgccccgtccacacctgttcttgggtgcatgtgggttttcggttcctggcggtccaggacggggcgggggctcccctcccatctcgtgctgggaggtctcagcgcgctctcctgtccctgggacgtgcgtctctccttctcatgccgttctggaaaatgctcttgctgtagagagcagctgcttctgccagggtgttggaggtggtggagcgccttccgattccattcatggcattttgtgatgtgatgtaattggaatagagctgttgatttaaggcacacacaatccctcacactgtgggttttttttagaacttcccagacgaaaactcacgcccttgccctaacgcgctttgctgtgagcctggcccctgcccagggcttgggtctggtgagctgagcagcttcctgtggatggtgtggggccggcctctggcctggctcacctggccactgtccagccagccttgtgacagactccggcctgaaggcagaatgaacccacacctggagtgaggaagggggcctggcacggttggccaggctctgcctgattgccagccagcgggcatctgaagccgggtccttcgcccgccggaggctgccgtccgtctctcctgctgcgctcgtgccagctccgtgggtgtcctcccagggagcttctcttctcaacaggccttgcgaggctggggtgagaggtgatagaggcagcactgtgcatgattccgagagggtgtggtggcactgccagccgactgctgacagcttgggagctgctgtgcccaggacgtgggttcagcgtgggcgaggaaagcctggcgagcgtggccctgtaaaagctttctgaggcgggaggcgctcacttacctctgactgcctgggcgctgcgtgtagcatcttggcctacaggacagattttaggtgacacctggttatgacagtcagaaatttgagaagcttctcacaagtgatgcactttaaataatctgcatgccattgagacacctgcatgtctggtgtttgtggttcaagtgtcttgccgccggccttcggatgtaaacccactgataacggacagaaagagaatgcccacaagtgggtcttctgtggaagatgcagaaggaggaagttagtgcttacattttagtctttttctccctcaaaaaaataggttaagtttcagtgccagctagaaaatactgctttctgccatcgattgggggtggtttttgtcaaatatactgttgataaatatttatttttgtaaacttgaagtgtgtggtggccgtgggggagggacatgctggcagcaggcgccttcttcagctgtgggtcctaaaggcctttgatcctttgaagaagaaagacatggtatttgttcagcagacgccgaccactcagacggaggggcccctgggattccctgtctcagatggcctggtcttacgcctgtgtagatttcttctccattgggaatgaaggtgtcaggcgggactggaacgttctagatggtatgttccgtgatattaacaactctaacccaggacagaccacaagccacactcagaggcctcactgtgctgggggcttcggtgtccaggcgcccaggtgtggccaccagcaccggtttctgccttcgcgttgctggggtgcagtgagactgccacacgcgtgcacatgtggctctgtgggtgtctcctagagaggacgtggcccctgctgccagcccttgagcagcccgtgtgggggcccgagggacccacacagtgggggccagcctcgctggagggagagcaaccctttgccgatgaccacgcttgccgccatctcttagttttctttttcacaagcgctttatttttttaatagacaaatcacattttgcaaggcctttaattaaataagattcttctttccttcattttatgctttatttcctgtttgaaggcttactgtagaagtggcttactgtagaagcagcttgctgagcccctccgagcggtccccagaattagctggttcacaacccccaccctcccccgcccccgcctgtgtcaggtgtggatgaggtcgtcacactcagaaggacaggcttgtctgccagctcacaaggggaggctgcagtgggtttgggagctgggtttaggcccctggtgtctgagggcccaggccttgccagcctctgctgctcctgctcctgggtttgaagatgcaggccgatcgccagctccgtggcagcggtcactaaggacagcctgactgtgccatcttggagcctcaggcggggctccggagatagaagacaggtcgccggaggctccccctcctctcctctcccctctgcagatgctccctgggcgctaccctgcagggtgccaggcaggagtggtctcagaacgtgcgcttctgattattttactggggtccattgtccagatttttctttgattgtaaaatatatttttactttttagtcttctaatttaataaatgatccatataaaaatagagaaataaagtcctttaagggaaggtttaaaaaaaaaaaa

SEQ ID NO: 1256 - protein, 274 aa, Homo sapiens
MATTVSTQRGPVYIGELPQDFLRITPTQQQRQVQLDAQAAQQLQYGGAVGTVGRLNITVVQAKLAKNYGMTRMDPYCRLRLGYAVYETPTAHNGAKNPRWNKVIHCTVPPGVDSFYLEIFDERAFSMDDRIAWTHITIPESLRQGKVEDKWYSLSGRQGDDKEGMINLVMSYALLPAAMVMPPQPVVLMPTVYQQGVGYVPITGMPAVCSPGMVPVALPPAAVNAQPRCSEEDLKAIQDMFPNMDQEVIRSVLEAQRGNKDAAINSLLQMGEEP

SEQ ID NO: 1257 - DNA, 3506 bp, Homo sapiens
gctgttcggctcagctgcacggctcggctcggctcggctcggctcggctgcgcggccgctgacgggcgtgcgctgggggcgcggggcgcggggcgcgggcctcggcggcggcggcggcggcggcggcggaagccaggtgcccccgcccgccctgtcctctcgacgaggcggaggcgtcgccgcgggccaggcctcggactgccgcgtcggagtggacgcggggggcggcggcgcgggcggacgcgggcggcgcgaagcagcggggcccgcgggggcgccccggccgggtcggcgcggacggcactcggcggacgcgggcggacgctgggcggcccctccctgcccgcgcgcccgggcgcccctggccggcgccgggccccagagcgatgacatcgacggggaaggacggcggcgcgcagcacgcgcagtatgttgggccctaccggctggagaagacgctgggcaaggggcagacaggtctggtgaagctgggggttcactgcgtcacctgccagaaggtggccatcaagatcgtcaaccgtgagaagctcagcgagtcggtgctgatgaaggtggagcgggagatcgcgatcctgaagctcattgagcacccccacgtcctaaagctgcacgacgtttatgaaaacaaaaaatatttgtacctggtgctagaacacgtgtcaggtggtgagctcttcgactacctggtgaagaaggggaggctgacgcctaaggaggctcggaagttcttccggcagatcatctctgcgctggacttctgccacagccactccatatgccacagggatctgaaacctgaaaacctcctgctggacgagaagaacaacatccgcatcgcagactttggcatggcgtccctgcaggttggcgacagcctgttggagaccagctgtgggtccccccactacgcctgccccgaggtgatccggggggagaagtatgacggccggaaggcggacgtgtggagctgcggcgtcatcctgttcgccttgctggtgggggctctgcccttcgacgatgacaacttgcgacagctgctggagaaggtgaagcggggcgtgttccacatgccgcactttatcccgcccgactgccagagtctgctacggggcatgatcgaggtggacgccgcacgccgcctcacgctagagcacattcagaaacacatatggtatatagggggcaagaatgagcccgaaccagagcagcccattcctcgcaaggtgcagatccgctcgctgcccagcctggaggacatcgaccccgacgtgctggacagcatgcactcactgggctgcttccgagaccgcaacaagctgctgcaggacctgctgtccgaggaggagaaccaggagaagatgatttacttcctcctcctggaccggaaagaaaggtacccgagccaggaggatgaggacctgcccccccggaacgagatagaccctccccggaagcgtgtggactccccgatgctgaaccggcacggcaagcggcggccagaacgcaaatccatggaggtgctcagcgtgacggacggcggctccccggtgcctgcgcggcgggccattgagatggcccagcacggccagaggtctcggtccatcagcggtgcctcctcaggcctttccaccagcccactcagcagcccccgggtgacccctcacccctcaccaaggggcagtcccctccccacccccaaggggacacctgtccacacgccaaaggagagcccggctggcacgcccaaccccacgcccccgtccagccccagcgtcggaggggtgccctggagggcgcggctcaactccatcaagaacagctttctgggctcaccccgcttccaccgccggaaactgcaagttccgacgccggaggagatgtccaacctgacaccagagtcgtccccagagctggcgaagaagtcctggtttgggaacttcatcagcctggagaaggaggagcagatcttcgtggtcatcaaagacaaacctctgagctccatcaaggctgacatcgtgcacgccttcctgtcgattcccagtctcagccacagcgtcatctcccaaacgagcttccgggccgagtacaaggccacgggggggccagccgtgttccagaagccggtcaagttccaggttgatatcacctacacggagggtggggaggcgcagaaggagaacggcatctactccgtcaccttcaccctgctctcaggccccagccgtcgcttcaagagggtggtggagaccatccaggcccagctgctgagcacacacgacccgcctgcggcccagcacttgtcagacaccactaactgtatggaaatgatgacggggcggctttccaaatgtggaattatcccgaaaagttaacatgtcacctccacgaggccatcctctgtgaccgaaggcagctgctgcggacccgccctccctccgctcctgctgttgctgccgggcagtgaggcccagcccagcgccccgtccaccccgcggcagctcctcgcctcagctccgcacggcccgtgggaggaaggccaggctcgggggagcctcctccagcccggccgacccggactcccggtcacctgacccctcagcaagaacagcctgcctggtggccttctggggccaggacccctggtgggcaacgtagccacaggaacaggccccgtccaccgcctccacgccgcacctggaggcctcctcgcaggcccgtgccccgcctccctggctgcgccgcctccgtgtagtcttggcctcctcaggctgcctcccgtcctctcgtctcacccgcgcctcccttgcctcatctggggcggctgtgggctctggcgctcctctctggctgaggtggaaacagagacaccctgcggcaccagagccttcccagcaggccaggccgctgggctgggatcagtgttatttatttgccgttttaatttatggattctccgcacctctgttcagggaagggcggcggccacatcccctgccgtctgcgtgtctcaggcagtgggggggctggggccagggcgccctctgaggacagagctggtggggcgcgggggggctggcgagctactgtaaactttaaagaattcctgcaagatatttttataaacttttttttcttggtggtttttggaaaagggtgtgggggtgggggcgccgctggggcagggccaggttttgtgttttagtcccttgctcctgcttctttctacacacacatctaaagacggtgcggctcgctctgtcatgggttccgtctctctgtggagaagcagctccacctctgggggggctcggggcagaggggcggtgtctcgtagcgggcggcagcgccagcgcccctctgtcaggctggggcaatcttggttttgtgtccaaaggtgaaggggtaggaggagggccctcagctggccctccccacacacaggacggcaggggcactgtgaggcttttcttattaaaatgaaaaaa

SEQ ID NO: 1258 - protein, 668 aa, Homo sapiens
MTSTGKDGGAQHAQYVGPYRLEKTLGKGQTGLVKLGVHCVTCQKVAIKIVNREKLSESVLMKVEREIAILKLIEHPHVLKLHDVYENKKYLYLVLEHVSGGELFDYLVKKGRLTPKEARKFFRQIISALDFCHSHSICHRDLKPENLLLDEKNNIRIADFGMASLQVGDSLLETSCGSPHYACPEVIRGEKYDGRKADVWSCGVILFALLVGALPFDDDNLRQLLEKVKRGVFHMPHFIPPDCQSLLRGMIEVDAARRLTLEHIQKHIWYIGGKNEPEPEQPIPRKVQIRSLPSLEDIDPDVLDSMHSLGCFRDRNKLLQDLLSEEENQEKMIYFLLLDRKERYPSQEDEDLPPRNEIDPPRKRVDSPMLNRHGKRRPERKSMEVLSVTDGGSPVPARRAIEMAQHGQRSRSISGASSGLSTSPLSSPRVTPHPSPRGSPLPTPKGTPVHTPKESPAGTPNPTPPSSPSVGGVPWRARLNSIKNSFLGSPRFHRRKLQVPTPEEMSNLTPESSPELAKKSWFGNFISLEKEEQIFVVIKDKPLSSIKADIVHAFLSIPSLSHSVISQTSFRAEYKATGGPAVFQKPVKFQVDITYTEGGEAQKENGIYSVTFTLLSGPSRRFKRVVETIQAQLLSTHDPPAAQHLSDTTNCMEMMTGRLSKCGIIPKS

SEQ ID NO: 1259 - DNA, 1509 bp, Homo sapiens
cgatcgcgtcgggcagcgggcgcggcggccccgcgcagccatggactggctcatggggaagtccaaagccaagcccaatggcaagaagcccgctgcggaggagaggaaggcctacctggagcctgagcacaccaaggccaggatcaccgacttccagttcaaggagctggtggtgctgccccgcgagattgaccttaacgagtggctggccagcaacaccacgacgtttttccaccacatcaacctgcagtatagcaccatctcggagttctgcacaggagagacgtgtcagacgatggccgtgtgcaacacacagtactactggtatgacgagcgggggaagaaggtcaagtgcacggccccacagtacgttgacttcgtcatgagctccgtgcagaagctggtgacggatgaggacgtgttccccacaaaatacggcagagaattccccagctcctttgagtccctggtgaggaagatctgcagacacctgttccacgtgctggcacacatctactgggcccacttcaaggagacgctggccctggagctgcacggacacttgaacacgctctacgtccacttcatcctctttgctcgggagttcaacctgctggaccccaaagagaccgccatcatggacgacctcaccgaggtgctatgcagcggggccggcggggtccacagtgggggcagtggggatggggccggcagcgggggcccgggagcacagaaccacgtgaaggagagatgagccccccgggccggacaggggcacacgtgtgcaaagagacggtggtgtgtgttctctcctgcatctgcgtgtgcacacatgtgctgggcacgcgtgtggtgaggtctgagagggccccgggctgcactggtgtgggctgcacaggcacagacgcagacggccccggccgtgtcctgtggccccctgtcggatggatgcgtgccgtttgtagagaagagcctttgggcccattcactcgttcagcagacacgcatgggactgatgctttgagttttcttctgtggggttttcctttctctggtctccgtgcagcccctgccctccctcgggtgctgctggcctcaaaggaggaactcgtggggggagggtgtgatttgcagacctgggtctctgctctgctctgggggtggggcttgctttcacagagaccctccttccctctcacccctcctctcccggcctcgccaggagtcttggctgttggcagctcagaggtgggggaggcctgtggtgtgaggtgccctgcacctgctcctgctcctgtcaccccttcctgctgcctcctccatgcccaaggaacacccatggtgcagtcctcaggcaaggccaggacggggctgaggccctgcgtggagatgctgcaccagcggaaggctgagacccgcttaccttagttcatctgttcactcgtaataaaaagaattctctctaaaaaaaaaaaaaaaaaaaaaaaaaaaaaaaaaaaaaaaaaaaaa

SEQ ID NO: 1260 - protein, 237 aa, Homo sapiens
MDWLMGKSKAKPNGKKPAAEERKAYLEPEHTKARITDFQFKELVVLPREIDLNEWLASNTTTFFHHINLQYSTISEFCTGETCQTMAVCNTQYYWYDERGKKVKCTAPQYVDFVMSSVQKLVTDEDVFPTKYGREFPSSFESLVRKICRHLFHVLAHIYWAHFKETLALELHGHLNTLYVHFILFAREFNLLDPKETAIMDDLTEVLCSGAGGVHSGGSGDGAGSGGPGAQNHVKER

SEQ ID NO: 1261 - DNA, 2377 bp, Homo sapiens
ggggagccgaggcgagcgcgagcgaggtccagcaccatgtgctaggtcactcccagcgcgaggccacacctgggccgtcggagcagcccctcctcacttcaggggtcaccctccccagcacccattgccccaccatggctggggaccggctcccgaggaaggtgatggatgccaagaagctggccagcctgctgcggggcgggcctggggggccgctggtcatcgacagccgctccttcgtggagtacaacagctggcatgtgctcagctccgtcaacatctgctgctccaagctggtgaagcggcggctgcagcagggcaaggtgaccattgcggagctcatccagccggctgcacgcagccaggtggaggctacggagccacaggacgtggtggtctatgaccagagcacgcgggacgccagcgtgctggccgcagacagcttcctctccatcctgctgagcaagctggacggctgcttcgacagcgtggccatcctcactgggggcttcgccaccttctcctcctgcttccccggcctctgcgagggcaagcctgctgccctgctacccatgagcctctcccagccctgcctgcctgtgcccagcgtgggcctgacccgcatcctgcctcacctctacctgggctcgcagaaggacgtcctaaacaaggatctgatgacgcaaaatggaataagctacgtcctcaacgccagcaactcctgccccaagcctgacttcatctgcgagagccgcttcatgcgggtccccatcaacgacaactactgtgaaaaactgctgccctggctggacaagtccatcgagttcatcgataaagccaagctctccagctgccaagtcatcgtccactgtctggctggcatctcccgctctgccaccatcgccatcgcctacatcatgaagaccatgggcatgtcctccgacgacgcctacaggttcgtgaaggacaggcgcccgtccatctcgcccaacttcaacttcctgggccagctgctggagtacgagcgcacgctgaagctgctggccgccctgcagggcgacccgggcaccccctcagggacgccggagcctccgcccagtcctgccgccggggccccgctgccacggctgccaccacctacctcagagagcgctgccacagggaatgcggctgccagggagggcggcctgagcgcgggcggggagccccccgcgccccccacgcccccggcgaccagcgcactgcagcagggcctgcgcggcctgcacctctcctcggaccgcctgcaggacactaaccgcctcaagcgctccttctccctggacatcaagtctgcctacgcccctagcaggcggcccgacggccccgggccccccgaccccggcgaggccccgaagctctgcaagctggacagcccgtcgggggccgcgctgggcctgtcctcgcccagcccggacagcccggacgccgcgcctgaggcgcgcccacggccccgccggcggccccggccccccgccggctcccccgcgcgctcccccgcgcacagcctcggcctgaacttcggcgatgcggcccggcagactccgcggcacggcctctcggccctgtcggcgcccgggctgcccggccctggccagccggccggccccggggcctgggcaccgccgcttgactccccaggcacgccgtcgcccgacgggccctggtgcttcagccccgagggcgcacagggggcgggcggggtgctgtttgcgcccttcggccgggcgggcgccccgggaccaggcggcggcagcgacctgcggcggcgggaggcagcgagggctgagccccgggacgcgcggaccggctggcccgaggagccggccccggagacgcagttcaagcgccgcagctgccagatggagttcgaggagggcatggtggaggggcgcgcgcgcggcgaggagctggccgccctgggcaagcaggcgagcttctcgggcagcgtggaggtcatcgaggtgtcctgacccctccgctgccctcggccccgccgcccgcagccaggcccgttataaatgtatattatatataatgcaaagaaaggtaaatggttttactgggatttttatcgagaagtaaatatttcgattttttatttatttaagctgttcattctggcaatgatttggcaacagtgcgggtggtcctcgagctctatttttactgtctggtatttaaactgaaacatacgtttctaagcaatacgaggccaccttcagtcgcaagctgggtgccaggcctggggccctcccagttcccccgccccaggaaacactgctgacctttgcaaaggctgccgagctttcgtgcactttttacataacaaaaaggg

SEQ ID NO: 1262 - protein, 625 aa, Homo sapiens
MAGDRLPRKVMDAKKLASLLRGGPGGPLVIDSRSFVEYNSWHVLSSVNICCSKLVKRRLQQGKVTIAELIQPAARSQVEATEPQDVVVYDQSTRDASVLAADSFLSILLSKLDGCFDSVAILTGGFATFSSCFPGLCEGKPAALLPMSLSQPCLPVPSVGLTRILPHLYLGSQKDVLNKDLMTQNGISYVLNASNSCPKPDFICESRFMRVPINDNYCEKLLPWLDKSIEFIDKAKLSSCQVIVHCLAGISRSATIAIAYIMKTMGMSSDDAYRFVKDRRPSISPNFNFLGQLLEYERTLKLLAALQGDPGTPSGTPEPPPSPAAGAPLPRLPPPTSESAATGNAAAREGGLSAGGEPPAPPTPPATSALQQGLRGLHLSSDRLQDTNRLKRSFSLDIKSAYAPSRRPDGPGPPDPGEAPKLCKLDSPSGAALGLSSPSPDSPDAAPEARPRPRRRPRPPAGSPARSPAHSLGLNFGDAARQTPRHGLSALSAPGLPGPGQPAGPGAWAPPLDSPGTPSPDGPWCFSPEGAQGAGGVLFAPFGRAGAPGPGGGSDLRRREAARAEPRDARTGWPEEPAPETQFKRRSCQMEFEEGMVEGRARGEELAALGKQASFSGSVEVIEVS

SEQ ID NO: 1263 - DNA, 1557 bp, Homo sapiens
atgactttcaaggcctcccttccaggcatctggagaccagccccccaccgccccagccacctgcagcaaatgcctatccgcaagccctgcctgctggcaccacatccagcacggacagccctgcaggacagcccaggggatgctttaagaaacgaccttggacgtcctcccggaggcgagaggagcttcaggcggccgagcctgcgccacggcctgcggacggcagagggcgcgcgcgaaccgccgggccggccccgctcggacccccacctgcacggcccggagcgcgcgtccccgccccaggctgctggacccccgcacgtccctcgccgcggccttggcgcctccccggcccctcgcaaggtcctcccgagccccagagacccccgaggcggcgtctacaggcccgggccgggactgacaccgcagccccctccctggtcgcgcctcccacccccgtccacaccttactccccacccccagccatcaccattggcaccctgagctccgtggtcctggtgcccactgagggttctgcggtcgttgcgccagcttcattttctgtggcccttcattcaaccagcggccgaagcccccttcagagccccagggacagcgaggcctcccccgccctccccctgcagcgcgagtctgacccccttgctcccgcccaacacctgccgaaggtgcaattacccgtgcgttcttcctgccccggactcgccgcgtccccgccgcacgcgcggaggtgttcccacagcggtcggcggggtgcggcccctcaacagcccgcacaggggtcgtcggggcggctttccacggaagcgggagggctgggggtcgtggggggtcggcggcgtcctggggagcccgcccccggagttcgcggatgtgtgacccgaggcagccggctcgcctctgagggtcccaggtccgcccgagtgcagggggatccggctccgtcctgcgggggtcgcggcggggcgagcacagccgctgcaggtaaaacgccgcgcctgggtctggggagggctccccggcggcggcccagcgccaacaaaggccaggagaaggggggagcggcgccggcgcctgtccgggtcggggggaggacttcgcgcccggagccgctcagctggaccgtccggggtctgtgcgacgcggccgggggcccggccgcctcagcttcaccccgagcccgggctccgctgacgtcacctgcccccgagccgcgcgcgctgattggctgcagctccttctttgggtgtggaatgggggggggacaaaaatccaggacccaccagggccgcctgagatccagcgcggatctgcgcgagcccccgacgtcccgaacgtcacccccgcgggggccagaaccggagcaggcggaccctggcccggagtcggtccgggagggacaggaatgtgctgcacagagacgctgggtgtgggagctcgtgtttgtaaggagtctgaagctgacccctcgggtactggagtcctggggttctcaggggatcctgcatacagagggcaaggacgtgcgtgtactctag

SEQ ID NO: 1264 - protein, 518 aa, Homo sapiens
MTFKASLPGIWRPAPHRPSHLQQMPIRKPCLLAPHPARTALQDSPGDALRNDLGRPPGGERSFRRPSLRHGLRTAEGAREPPGRPRSDPHLHGPERASPPQAAGPPHVPRRGLGASPAPRKVLPSPRDPRGGVYRPGPGLTPQPPPWSRLPPPSTPYSPPPAITIGTLSSVVLVPTEGSAVVAPASFSVALHSTSGRSPLQSPRDSEASPALPLQRESDPLAPAQHLPKVQLPVRSSCPGLAASPPHARRCSHSGRRGAAPQQPAQGSSGRLSTEAGGLGVVGGRRRPGEPAPGVRGCVTRGSRLASEGPRSARVQGDPAPSCGGRGGASTAAAGKTPRLGLGRAPRRRPSANKGQEKGGAAPAPVRVGGRTSRPEPLSWTVRGLCDAAGGPAASASPRARAPLTSPAPEPRALIGCSSFFGCGMGGGQKSRTHQGRLRSSADLREPPTSRTSPPRGPEPEQADPGPESVREGQECAAQRRWVWELVFVRSLKLTPRVLESWGSQGILHTEGKDVRVL

SEQ ID NO: 1265 - DNA, 942 bp, Homo sapiens
cctctacctgctccaccctcaatccaccagaaccatgggctgttgcggctgctccggaggctgtggctccagctgtgggggctgtggctccggctgtgggggctgtggctccggctgtgggggctgtggctctggctgtggaggttctggctccagctgctgtgtgcccgtctgctgctgcaagcccgtgtgctgccgtgtgccaacctgttcctgctccagctgtggcaaagggggctgtggctcttctgggggctccaaggggggctgtggctcctgtggaggctgcaaggggggctgtggctcttgtgggggatccaaggggggttgtggctcctgtgggggctccaaggggggctgtggctcttgtgggggatccaagggtggctgtggttccggctgtgggggatgtggctccagctgctgtgtgcctgtctgctgctgcaagcccatgtgctgctgtgtgccagcttgttcctgctccagctgtggcaaagggggctgtggctcctgtgggtgctccaagggggcctgtggttcttgtgggggctccaaggggggctgtggctcctgtggaggctgcaaggggggctgcggttcttgtgggggatccaaggggggttgtggctccggctgtgggggctgtggctccggctgcggtgtgcccgtgtgttgctgttcctgttccagttgtggctcttgcgcggggtctaagggaggctgcgggtcatcctgctcccagtgcagttgctgtaagccctgctgctgttcctcaggctgtgggtcatcctgttgccaatccagctgctgcaagccctgctgctcccagtccagttgctgtgtccccgtgtgctgccagtgcaagatctgatttctggctttgcaggactcttaccatggccaggcattcctgcccagcctttacctccttttcctggcacc

SEQ ID NO: 1266 - protein, 278 aa, Homo sapiens
MGCCGCSGGCGSSCGGCGSGCGGCGSGCGGCGSGCGGSGSSCCVPVCCCKPVCCRVPTCSCSSCGKGGCGSSGGSKGGCGSCGGCKGGCGSCGGSKGGCGSCGGSKGGCGSCGGSKGGCGSGCGGCGSSCCVPVCCCKPMCCCVPACSCSSCGKGGCGSCGCSKGACGSCGGSKGGCGSCGGCKGGCGSCGGSKGGCGSGCGGCGSGCGVPVCCCSCSSCGSCAGSKGGCGSSCSQCSCCKPCCCSSGCGSSCCQSSCCKPCCSQSSCCVPVCCQCKI

SEQ ID NO: 1267 - DNA, 1149 bp, Homo sapiens
ctcacctgctcctctacctgctccaccctcaatccaccagaaccatgggctgctgtggctgctccagaggctgtggctccggctgtgggggctgtggctccagctgtgggggttgtggctctggctgtgggggctgtggctccggccgtgggggctgtggctctggctgtgggggctgcagctccagctgtgggggatgtggctccagatgttatgtgcctgtctgctgctgcaagcccgtgtgctcctgggtgccagcctgttcctgcaccagctgtggctcctgtgggggctccaaggggggctgtggctcctgtgggggctccaaggggggctgtggctcctgtgggggttccaaggggggctgtggttcttgtggctgctcccagtccagctgttgtaagccctgttgctgctcctcaggctgtggatcatcctgctgccagtccagctgctgcaagccctgctgctgccagtccagctgctgtgtccccgtgtgctgccagtccagctgctgcaagccctgttgctgccagtccaactgttgtgtccctgtgtgctgccagtgtaagatctgaggctctggacccagaccttcaggtttctcctgtttggtgaaagcatttcttatggttccctgagtcagttcgtcccacacatcctccctgaggcacctgcacctgctctagctcaccatccatgcacacacctccttccatggctcagctctcctctgggccctgccttcagcctcctcactccagaaacgtgtgtttccctgatgcgggaggtgtcctcgcctggacgcaggcacccagccgactgccacgatgttccctgcacttgggtgtggaccatcttcttcttctccctgggctgactgagatgcaaggtctgaccccacaaggccaggccgacgtttctgagtgatcactaagaaccagcttctcaaccaccatcaggaccctggatcctcctgggccgctgcctgttctcctgtggcccaagtgtgaccaggaaggtctctttccttcctgttgtctccatctgtttaaaaaaaaataacaaaataatgaatgaatttccttgcaataaagcctctcatgtctgtaaatcaaaaaaaaaaaaaaaaaaaaaaaaaaaaaaaaa

SEQ ID NO: 1268 - protein, 177 aa, Homo sapiens
MGCCGCSRGCGSGCGGCGSSCGGCGSGCGGCGSGRGGCGSGCGGCSSSCGGCGSRCYVPVCCCKPVCSWVPACSCTSCGSCGGSKGGCGSCGGSKGGCGSCGGSKGGCGSCGCSQSSCCKPCCCSSGCGSSCCQSSCCKPCCCQSSCCVPVCCQSSCCKPCCCQSNCCVPVCCQCKI

SEQ ID NO: 1269 - DNA, 899 bp, Homo sapiens
gggctcagagaactccaaacctgcacacctccctctcacctgctcctctacctgctccaccctcaacccaccagaaccatgggctgctctggctgctctggaggctgtggctccagctgtgggggctgtggctccagctgtgggggctgtggctccggctatgggggctgtggctccggctgctgtgtacctgtctgctgctgcaagcccgtgtgctgctgtgtgccagcctgttcctgctccagctgtggctcctgtgggggctccaagggggtctgtggctcttgtgggggctgcaaggggggctgtggctcctgtggaggctccaaggggggctgtggctccagctgctgtgtgcccgtctgctgctcctccagctgtggctcctgtgggggttccaagggggtctgtggatttcgtgggggctccaaggggggctgcggttcttgtggctgctcccagtgcagctgctataagccctgctgctgctcctcaggctgtgggtcatcctgctgccagtccagctgctgcaagcccagctgctcccagtccagctgctgtaagccctgctgttcccagtccagctgctgtaagccctgctgctgctcctcaggctgtgggtcatcctgctgccagtccagctgctgcaaaccctgctgttcccagtccagctgctgtaagccctgctgctgctcctcaggctgtgggtcatcctgctgccagtccagctgctgcaagccctgctcctcccagtccagctgctgtgtcccaatttgctgccagtgcaagatctgaggctctgcccacaaacctcagtgggtcctacagatccgggctctccaggaatgactgcagctgtgtcctgaattcctgaagcacgtctctgaatctgtcctcct

SEQ ID NO: 1270 - protein, 238 aa, Homo sapiens
MGCSGCSGGCGSSCGGCGSSCGGCGSGYGGCGSGCCVPVCCCKPVCCCVPACSCSSCGSCGGSKGVCGSCGGCKGGCGSCGGSKGGCGSSCCVPVCCSSSCGSCGGSKGVCGFRGGSKGGCGSCGCSQCSCYKPCCCSSGCGSSCCQSSCCKPSCSQSSCCKPCCSQSSCCKPCCCSSGCGSSCCQSSCCKPCCSQSSCCKPCCCSSGCGSSCCQSSCCKPCSSQSSCCVPICCQCKI

SEQ ID NO: 1271 - DNA, 585 bp, Homo sapiens
atgggctgctgtggctgctctggaggctgtggctccggctgtgggggctgtggctccggctgtgggggctgcggctctggctgtgggggatgtggctctagccgctgtgtgcccatctgctgctgcaagcccgtgtgctgctgtgtgccagcctgttcctgctccagctgtggctcctgtgggggctccaaggggggccgtggctcctgtgggggctccaagggggactgtggctcctgtgggggctccaagggaggctgtggttcttgtggctgctcccagtgcagctgctataagccctgctgctgctcctcaggctgtgggtcatcctgctgccagtccagctgctgcaaaccctgctgttcccagtccagctgttgtaagccctgcagctgctcttcaggctgtgggtcatcctgctgccagtccagctgctgcaagccctgctgttcccagtccagctgctgtaagccctgctgctgctcttcaggctgtgggtcatcctgctgccagtccagctgctgcaagccctgctgttcccagtccagctgctgtgtcccaatttgctgccagtgcaagatctga

SEQ ID NO: 1272 - protein, 194 aa, Homo sapiens
MGCCGCSGGCGSGCGGCGSGCGGCGSGCGGCGSSRCVPICCCKPVCCCVPACSCSSCGSCGGSKGGRGSCGGSKGDCGSCGGSKGGCGSCGCSQCSCYKPCCCSSGCGSSCCQSSCCKPCCSQSSCCKPCSCSSGCGSSCCQSSCCKPCCSQSSCCKPCCCSSGCGSSCCQSSCCKPCCSQSSCCVPICCQCKI

SEQ ID NO: 1273 - DNA, 1359 bp, Homo sapiens
tctcatctgctcctctacctgctccaccctcaatccaccagaaccatgggctgctgtggctgctctggaggctgtggctccggctgtgggggctgtggctccggctgtgggggctgtggctctggctgtgggggctgtggttccggctgtgggggctgtggctccggctgtgggggctgtggctccagctgctgtgtgcccatctgctgctgcaaacctgtgtgctgctgtgtgccagcctgttcctgctccagctgtggctcctgtgggggctccaaggggggctatggctcttgtgggggttccaaggggggctgtgtctcctgtgggggttccaaggggggctgtggctcctgtgggggctccaaggggggctgtggctcctgtgggggttccaaggggggctgtggctcctgtgggggctccaaggggggctgtgtctcctgtgggggttccaaggggggctgtggctcctgtgggggttccaaggggggctgtgtctcctgtggggggtccaaggggggctgtggctcctgtgggggctccaaggggggctgtggctcctgtgggggttccaaggggggctgtggctcctgtgggggctccaaaggaggctgtggctcttgtggctgctcccagtgcagctgctgtaagccctgctgctgctcttcaggctgtgggtcatcctgctgccagtccagctgctgtaagccctgctgctcctcctcaggttgtgggtcatcctgctgccagtccagctgctgcaagccctactgctgccagtccagctgctgtaagccctgctgctcctcctcaggttgtgggtcatcctgctgccagtccagttgctgcaatccctgctgctcccagtctagttgctgtgtccctgtgtgctgccagtgtaagatctgaggctctggactcaggcctcatgtgagtcctgctaatcctgtcttccaaagctgtgacctgtccttcattgttgagccccaaatcattgctcagggtccattccctgctgtagaacgatgccatatctggctgccttttcctaagaagagtccaccctaattaatgtccattgtctctcctaacaaattctctccccaagtcaactgcaattgcagctgaatcacccctcacccactagcctcgcctttgctcatcttttcagaggcctgagctcctgaacccacttgcagtcctgtcttttccagctggagcagctgggcataagcgtcccacctgctacaaggtgggcgtttaagaggcttccttggagtggctttgcatgtccaacactctgctgtatctttttttttttttttttttttgagatggagtctcgcactgtcaccc

SEQ ID NO: 1274 - protein, 288 aa, Homo sapiens
MGCCGCSGGCGSGCGGCGSGCGGCGSGCGGCGSGCGGCGSGCGGCGSSCCVPICCCKPVCCCVPACSCSSCGSCGGSKGGYGSCGGSKGGCVSCGGSKGGCGSCGGSKGGCGSCGGSKGGCGSCGGSKGGCVSCGGSKGGCGSCGGSKGGCVSCGGSKGGCGSCGGSKGGCGSCGGSKGGCGSCGGSKGGCGSCGCSQCSCCKPCCCSSGCGSSCCQSSCCKPCCSSSGCGSSCCQSSCCKPYCCQSSCCKPCCSSSGCGSSCCQSSCCNPCCSQSSCCVPVCCQCKI

SEQ ID NO: 1275 - DNA, 1423 bp, Homo sapiens
gcccctgccaggaatgcacctttagcccaggcctgctcagtgagctccgccgacagccagccctgctcctcccgccatgaccctgcagacccctctgggcttccaagttcctgggggctgcagtgaacatgctccacctgcatggctggcaaaccatgcagggtagaaagatggggcacccaccagtctctcccagtgccccggccccagctggcaccacagctatacctgggcttattccagaccttgtcgccgggaccccctggccccgctgggctctcattgccggcgcccttgccgcgggcgtcctcctcgtctcctgcctcctctgtgctgcctgctgctgctgccgccgccacaggaagaagcccagggacaaggagtccgtgggtctgggcagtgcccgcggcaccaccaccacccacctggtgcaacctgatgtggatggcctggagtccagcccgggggatgctcagcaatgggggcgcctgcagctctccctggagttcgactttggaagccaggagatcagggtgggcctgaggcaggcagccgacctgaggcctgggggcaccgtggacccctatgcccgggtcagcgtctccacccaggccggacacagacatgagacaaaagtgcaccgaggcacgctctgccccgtgtttgacgagacctgctgcttccacatcccgcaggcggagctgccaggggccaccctgcaggtgcagcttttcaacttcaagcgcttctcggggcatgagcccctgggtgagctccgtctgccactgggcaccgtggatctgcagcatgttctggagcactggtacctgctgggcccgccggctgccactcagcccgagcaggtcggggagctgtgcttctctctccggtacgtgcccagctcaggccggctgaccgtggtggtgctggaggctcgaggcctgcgtccaggacttgcagagccctacgtgaaggtccagctcatgctgaaccagaggaagtggaagaagagaaagacagccaccaaaaagggcacggcggccccctacttcaatgaggccttcaccttcctggtgcccttcagccaggtccagaatgtggacctggtgctggctgtctgggaccgcagcctgccgctccgaactgagcccgtaggcaaggtgcacctgggtgcccgggcctcggggcagcccctgcagcactgggcagacatgctggcccacgcccggcggcccattgcccagcggcaccccctgcggccagccagggaggtggaccgcatgctggccctgcagccccgccttcgcctgcgcctgcccttgccccactcctgaatgcaccacatgcctctgtctccccgctgagcccaggcacttgcccaggccgccctgcaggaccactgcaataaacgccttctcctgcc

SEQ ID NO: 1276 - protein, 401 aa, Homo sapiens
MLHLHGWQTMQGRKMGHPPVSPSAPAPAGTTAIPGLIPDLVAGTPWPRWALIAGALAAGVLLVSCLLCAACCCCRRHRKKPRDKESVGLGSARGTTTTHLVQPDVDGLESSPGDAQQWGRLQLSLEFDFGSQEIRVGLRQAADLRPGGTVDPYARVSVSTQAGHRHETKVHRGTLCPVFDETCCFHIPQAELPGATLQVQLFNFKRFSGHEPLGELRLPLGTVDLQHVLEHWYLLGPPAATQPEQVGELCFSLRYVPSSGRLTVVVLEARGLRPGLAEPYVKVQLMLNQRKWKKRKTATKKGTAAPYFNEAFTFLVPFSQVQNVDLVLAVWDRSLPLRTEPVGKVHLGARASGQPLQHWADMLAHARRPIAQRHPLRPAREVDRMLALQPRLRLRLPLPHS

SEQ ID NO: 1277 - DNA, 700 bp, Homo sapiens
aggctccaagctcaggacctcaggatgggagatgaggagaagcggaacagggccatcacggcccgcaggcagcacctgaagagtgtgatgctgcagatagcggccacggagctggagaaggaggagagccgccgtgaggcagagaagcagaactacctggcggagcactgcccgccgctgcatatcccgggctccatgtctgaagtgcaggagctctgcaaacagctgcacgccaagatcgatgcggctgaagaggagaagtacgacatggaggtgagggtgcagaagaccagcaaggagctggaggacatgaaccagaagctatttgatctgcggggcaagttcaagcggcccccactgcggagggtgcgcatgtcggccgatgccatgctcaaggccctgctgggctcgaagcacaaggtgtgcatggacctgagggccaacctgaagcaggtcaagaaggaggacacagagaaggagcgggacctgcgagacgtgggtgactggaggaagaacatcgaggagaagtctggcatggagggccggaagaagatgtttgagtccgagtcctaggccactcgctgcccctacgcctgccccggtgcccggctcccagcagaacatactagggagatgcacccagagcctgccagggagggctggcctcaccaccaccgtcaataaaggatttgaatcccca

SEQ ID NO: 1278 - protein, 182 aa, Homo sapiens
MGDEEKRNRAITARRQHLKSVMLQIAATELEKEESRREAEKQNYLAEHCPPLHIPGSMSEVQELCKQLHAKIDAAEEEKYDMEVRVQKTSKELEDMNQKLFDLRGKFKRPPLRRVRMSADAMLKALLGSKHKVCMDLRANLKQVKKEDTEKERDLRDVGDWRKNIEEKSGMEGRKKMFESES

SEQ ID NO: 1279 - DNA, 1842 bp, Homo sapiens
gggctggaagtcggtcttcggacagagcccgtcctgcccagaagcccaggcgagccagcagcaggggtgcagggaccgagtggcccagccccctgggcagggtgtcagggccagagcccagaggacggcggttcaggcttcagtcccagccggcgaaccagagctgggcagagcggccagcaagcggcagccagggtgccctgggcactcgacccccagatgcccctgctggaaccgtaaaggggaggcaccctgaggccagagggagcatggccccggggactgagcatccggctcagagcggcttggcagaggcccactgctcagtggagcgtggaggacgaggaggaggccgtccacgagcaatgccagcatgagagagacaggcagcttcaggcccaggacgaggagggaggcggccatgtccccgagcggccgaagcaggagatgctcctcagcctgaagccctcggaggcccctgaactggatgaggacgagggctttggcgactggtcccagaggccagagcagcggcagcagcacgagggggcgcagggcgccttggacagcggagagcccccccagtgcaggagtcctgagggggagcaagaggacaggcccggcctgcatgcctacgaaaaggaggacagtgatgaagtccacctggaggagttgagtctgagcaaggaggggccaggcccagaggacactgtccaggacaacctgggggccgcaggggctgaggaggaacaggaggagcaccagaaatgtcagcagcccaggacacccagccccttggtcttggaggggaccatcgaacagagctcgcctcccctgagccctaccaccaaactcatcgacaggaccgagtccctaaaccgctccatagagaagagtaacagtgtgaagaaatcccagccagacttgcccatctccaagattgatcagtggctggaacaatacacccaggccatcgagaccgctggccggacccccaagctagcccgccaggcctccatagagctgcccagcatggctgtggccagtaccaagagtcggtgggagacgggtgaggtacaggctcagtctgcggccaagactccgtcctgcaaggatattgtggctggagacatgagcaagaaaagcctctgggagcagaagggaggctccaagacctcatcaacaattaagagcaccccatctgggaagaggtataagtttgtggccaccgggcatgggaagtatgagaaggtgcttgtggaagggggcccggctccctaggcgtcccatctcgcttcctgggtctgcaggtccagccggctggcaccctccatgtacccaggggagattccagccagacacccgccccccggccctggctaagaagttgcttcctgttgccagcatgacctaccctcgcctctttgatgccatccgctgccacctccttttgctcctggaccctttagcctctctgcccttccactctctgaccaccgcccccgccctccccacccagctccgcttcttgttacttgggggaggaaagaaactcctgatcattggccaaagggacttacccctggagaggccaagtgccttctaggaagttaggaggttgaggcacagcctgtgcagagagggtgggtcacccccccagatccaaggagaaactgcaggtcaagggctgataacggccatgcaggatgcttgatgctgcgtcccccgctgcttgccgccccccaccccgccattttgtataataaagctccctgtgtattctcaaaaaaaaaaaaaaaaaaaaaaaaaaaaaaaaaaaaaaaaaaaaaaaaaaaaaaaaaa

SEQ ID NO: 1280 - protein, 277 aa, Homo sapiens
MLLSLKPSEAPELDEDEGFGDWSQRPEQRQQHEGAQGALDSGEPPQCRSPEGEQEDRPGLHAYEKEDSDEVHLEELSLSKEGPGPEDTVQDNLGAAGAEEEQEEHQKCQQPRTPSPLVLEGTIEQSSPPLSPTTKLIDRTESLNRSIEKSNSVKKSQPDLPISKIDQWLEQYTQAIETAGRTPKLARQASIELPSMAVASTKSRWETGEVQAQSAAKTPSCKDIVAGDMSKKSLWEQKGGSKTSSTIKSTPSGKRYKFVATGHGKYEKVLVEGGPAP

SEQ ID NO: 1281 - DNA, 2072 bp, Homo sapiens
acggcaagagctctgccagggcagtcccagctggcccaggcgccgcagcgctcccgagggccgtcgagcaaaggcgggaggcgcagccgggctgtcggtggacctgtaggtatcagggctccttggtcccctcctgcgggaagcaggcaccgagtggggctgcatgtagacgcatgcgagggtgagagctgcggcggaggacgctgatcgcggagtgcaggcgagggccccagaaaggtcccgcaggtcgcctcgctcgtggcacgggctcggcagcgttgtggttagtgacacggaggaagacagaaagccatatgcacagcacgcagaacaggaggaggggggaagaaagagcaggcacggggcaggcagagccgcagccacgccgccgggatgcagcaggcagggccacccacgagcagggcggggccctaacctccgacccaggctggtcgccgcagatgggggcagagatgtgaaacagctgcagagcgggacaagggtgctgccggcacagggctgaccacagagcacatcaaaagaggcccactgctcagtggagcgtggaggacgaggaggaggccgtccacgagcaatgccagcatgagagagacaggcagcttcaggcccaggacgaggagggaggcggccatgtccccgagcggccgaagcaggagatgctcctcagcctgaagccctcggaggcccctgaactggatgaggacgagggctttggcgactggtcccagaggccagagcagcggcagcagcacgagggggcgcagggcgccttggacagcggagagcccccccagtgcaggagtcctgagggggagcaagaggacaggcccggcctgcatgcctacgaaaaggaggacagtgatgaagtccacctggaggagttgagtctgagcaaggaggggccaggcccagaggacactgtccaggacaacctgggggccgcaggggctgaggaggaacaggaggagcaccagaaatgtcagcagcccaggacacccagccccttggtcttggaggggaccatcgaacagagctcgcctcccctgagccctaccaccaaactcatcgacaggaccgagtccctaaaccgctccatagagaagagtaacagtgtgaagaaatcccagccagacttgcccatctccaagattgatcagtggctggaacaatacacccaggccatcgagaccgctggccggacccccaagctagcccgccaggcctccatagagctgcccagcatggctgtggccagtaccaagagtcggtgggagacgggtgaggtacaggctcagtctgcggccaagactccgtcctgcaaggatattgtggctggagacatgagcaagaaaagcctctgggagcagaagggaggctccaagacctcatcaacaattaagagcaccccatctgggaagaggtataagtttgtggccaccgggcatgggaagtatgagaaggtgcttgtggaagggggcccggctccctaggcgtcccatctcgcttcctgggtctgcaggtccagccggctggcaccctccatgtacccaggggagattccagccagacacccgccccccggccctggctaagaagttgcttcctgttgccagcatgacctaccctcgcctctttgatgccatccgctgccacctccttttgctcctggaccctttagcctctctgcccttccactctctgaccaccgcccccgccctccccacccagctccgcttcttgttacttgggggaggaaagaaactcctgatcattggccaaagggacttacccctggagaggccaagtgccttctaggaagttaggaggttgaggcacagcctgtgcagagagggtgggtcacccccccagatccaaggagaaactgcaggtcaagggctgataacggccatgcaggatgcttgatgctgcgtcccccgctgcttgccgccccccaccccgccattttgtataataaagctccctgtgtattctcaaaaaaaaaaaaaaaaaaaaaaaaaaaaaaaaaaaaaaaaaaaaaaaaaaaaaaaaaa

SEQ ID NO: 1282 - protein, 277 aa, Homo sapiens; identical to SEQ ID NO: 1280

SEQ ID NO: 1283 - DNA, 1578 bp, Homo sapiens
gagggccgtcgagcaaaggcgggaggcgcagccgggctgtcggtggacctgcccactgctcagtggagcgtggaggacgaggaggaggccgtccacgagcaatgccagcatgagagagacaggcagcttcaggcccaggacgaggagggaggcggccatgtccccgagcggccgaagcaggagatgctcctcagcctgaagccctcggaggcccctgaactggatgaggacgagggctttggcgactggtcccagaggccagagcagcggcagcagcacgagggggcgcagggcgccttggacagcggagagcccccccagtgcaggagtcctgagggggagcaagaggacaggcccggcctgcatgcctacgaaaaggaggacagtgatgaagtccacctggaggagttgagtctgagcaaggaggggccaggcccagaggacactgtccaggacaacctgggggccgcaggggctgaggaggaacaggaggagcaccagaaatgtcagcagcccaggacacccagccccttggtcttggaggggaccatcgaacagagctcgcctcccctgagccctaccaccaaactcatcgacaggaccgagtccctaaaccgctccatagagaagagtaacagtgtgaagaaatcccagccagacttgcccatctccaagattgatcagtggctggaacaatacacccaggccatcgagaccgctggccggacccccaagctagcccgccaggcctccatagagctgcccagcatggctgtggccagtaccaagagtcggtgggagacgggtgaggtacaggctcagtctgcggccaagactccgtcctgcaaggatattgtggctggagacatgagcaagaaaagcctctgggagcagaagggaggctccaagacctcatcaacaattaagagcaccccatctgggaagaggtataagtttgtggccaccgggcatgggaagtatgagaaggtgcttgtggaagggggcccggctccctaggcgtcccatctcgcttcctgggtctgcaggtccagccggctggcaccctccatgtacccaggggagattccagccagacacccgccccccggccctggctaagaagttgcttcctgttgccagcatgacctaccctcgcctctttgatgccatccgctgccacctccttttgctcctggaccctttagcctctctgcccttccactctctgaccaccgcccccgccctccccacccagctccgcttcttgttacttgggggaggaaagaaactcctgatcattggccaaagggacttacccctggagaggccaagtgccttctaggaagttaggaggttgaggcacagcctgtgcagagagggtgggtcacccccccagatccaaggagaaactgcaggtcaagggctgataacggccatgcaggatgcttgatgctgcgtcccccgctgcttgccgccccccaccccgccattttgtataataaagctccctgtgtattctcaaaaaaaaaaaaaaaaaaaaaaaaaaaaaaaaaaaaaaaaaaaaaaaaaaaaaaaaaa

SEQ ID NO: 1284 - protein, 277 aa, Homo sapiens; identical to SEQ ID NO: 1280

SEQ ID NO: 1285 - DNA, 1756 bp, Homo sapiens
acaccctgacccaagccgagacaggttccaaacctcaacctgcagccggaagggggaagtgaaactcggctgggggtgggggctcagaagccgccccagaaagcactgaaagccacagcacgtacacccactccagggatctgccagcaccctgtggggcccagactacaggctgatggcggaggcttcgagtgacccgggtgccgaggagcgggaagagttgctggggcccactgctcagtggagcgtggaggacgaggaggaggccgtccacgagcaatgccagcatgagagagacaggcagcttcaggcccaggacgaggagggaggcggccatgtccccgagcggccgaagcaggagatgctcctcagcctgaagccctcggaggcccctgaactggatgaggacgagggctttggcgactggtcccagaggccagagcagcggcagcagcacgagggggcgcagggcgccttggacagcggagagcccccccagtgcaggagtcctgagggggagcaagaggacaggcccggcctgcatgcctacgaaaaggaggacagtgatgaagtccacctggaggagttgagtctgagcaaggaggggccaggcccagaggacactgtccaggacaacctgggggccgcaggggctgaggaggaacaggaggagcaccagaaatgtcagcagcccaggacacccagccccttggtcttggaggggaccatcgaacagagctcgcctcccctgagccctaccaccaaactcatcgacaggaccgagtccctaaaccgctccatagagaagagtaacagtgtgaagaaatcccagccagacttgcccatctccaagattgatcagtggctggaacaatacacccaggccatcgagaccgctggccggacccccaagctagcccgccaggcctccatagagctgcccagcatggctgtggccagtaccaagagtcggtgggagacgggtgaggtacaggctcagtctgcggccaagactccgtcctgcaaggatattgtggctggagacatgagcaagaaaagcctctgggagcagaagggaggctccaagacctcatcaacaattaagagcaccccatctgggaagaggtataagtttgtggccaccgggcatgggaagtatgagaaggtgcttgtggaagggggcccggctccctaggcgtcccatctcgcttcctgggtctgcaggtccagccggctggcaccctccatgtacccaggggagattccagccagacacccgccccccggccctggctaagaagttgcttcctgttgccagcatgacctaccctcgcctctttgatgccatccgctgccacctccttttgctcctggaccctttagcctctctgcccttccactctctgaccaccgcccccgccctccccacccagctccgcttcttgttacttgggggaggaaagaaactcctgatcattggccaaagggacttacccctggagaggccaagtgccttctaggaagttaggaggttgaggcacagcctgtgcagagagggtgggtcacccccccagatccaaggagaaactgcaggtcaagggctgataacggccatgcaggatgcttgatgctgcgtcccccgctgcttgccgccccccaccccgccattttgtataataaagctccctgtgtattctcaaaaaaaaaaaaaaaaaaaaaaaaaaaaaaaaaaaaaaaaaaaaaaaaaaaaaaaaaa

SEQ ID NO: 1286 - protein, 339 aa, Homo sapiens
MAEASSDPGAEEREELLGPTAQWSVEDEEEAVHEQCQHERDRQLQAQDEEGGGHVPERPKQEMLLSLKPSEAPELDEDEGFGDWSQRPEQRQQHEGAQGALDSGEPPQCRSPEGEQEDRPGLHAYEKEDSDEVHLEELSLSKEGPGPEDTVQDNLGAAGAEEEQEEHQKCQQPRTPSPLVLEGTIEQSSPPLSPTTKLIDRTESLNRSIEKSNSVKKSQPDLPISKIDQWLEQYTQAIETAGRTPKLARQASIELPSMAVASTKSRWETGEVQAQSAAKTPSCKDIVAGDMSKKSLWEQKGGSKTSSTIKSTPSGKRYKFVATGHGKYEKVLVEGGPAP

SEQ ID NO: 1287 - DNA, 1419 bp, Homo sapiens
atggcacccgaggtgtgcggcccaagcctccagggaacccctggacccccaccgcccctgctgcccaagccagggaaggacaacttgcgtttgcagaagctcctgaggaaggcagcccggaagaagatgatgggaggcacacacctcgctccacccagggccttccgcacctccctgtcccccgtgagtgaggccagccatgaccaggaggtcacagccccgcacgctgctgagggcccgcaccccgccgaagccccacgccttcctgaagccccacgccccgccgaggctccccgcatggtggctgccctaccccgctccccgcacacccccatcatccaccacgtggcatcacccctgcagaagtccacgttctccatcggcctcacccagcgcaggattctagctgctcaattcagggccatggggccccaggttgtagcctcggccccagaacctacccggccccccagtggcttcgtccctgtctctgggggtgggggcacccacgtcacccaggtgcacatccagctggcaccatccccacacaatgggacccctgagcctcccaggacagccccagaagtgggatccaacagccaggatggagatgccaccccaagtccccccagggcccagcccctggtcccagtggctcacatccgcccactgcccaccacagtccaggctgccagtcccttgcctgaggagccccctgtaccacggccgccacccggcttccaggcctcagtgcccagagaggctagtgccagggttgtggtgcccatagccccgacctgccgctcgctggagtcctcaccgcacagcctggtccccatgggccctggcagagagcacctggaggagcccccgatggctggccccgccgctgaggccgagcgagtgtccagccctgcctgggcctcatcccctaccccaccatcaggccctcacccatgccctgtccccaaagttgcacccaagccccggctcagtggctggacgtggctcaagaagcagctgctggaggaggccccagagcctccgtgcccagagccgcggcagagcctggagccagaggtgcccacccccacagagcaggaggtgcctgcccccacagagcaggaggtgcccgccctcaccgcaccccgggcccccgcctcccggacctccaggatgtgggatgccgtgctgtaccgcatgtcagtggcggaggcccaagggcgcctggcagggcccagcggtggggagcacaccccagccagcctcacccgcctgcccttcctgtaccggcctcgcttcaacgcccggaagctgcaggaggccacccggccccctcccacagtccgctccatcctggagctgagcccccagcccaagaacttcaaccgcacagcgactggctggaggctccagtga

SEQ ID NO: 1288 - protein, 472 aa, Homo sapiens
MAPEVCGPSLQGTPGPPPPLLPKPGKDNLRLQKLLRKAARKKMMGGTHLAPPRAFRTSLSPVSEASHDQEVTAPHAAEGPHPAEAPRLPEAPRPAEAPRMVAALPRSPHTPIIHHVASPLQKSTFSIGLTQRRILAAQFRAMGPQVVASAPEPTRPPSGFVPVSGGGGTHVTQVHIQLAPSPHNGTPEPPRTAPEVGSNSQDGDATPSPPRAQPLVPVAHIRPLPTTVQAASPLPEEPPVPRPPPGFQASVPREASARVVVPIAPTCRSLESSPHSLVPMGPGREHLEEPPMAGPAAEAERVSSPAWASSPTPPSGPHPCPVPKVAPKPRLSGWTWLKKQLLEEAPEPPCPEPRQSLEPEVPTPTEQEVPAPTEQEVPALTAPRAPASRTSRMWDAVLYRMSVAEAQGRLAGPSGGEHTPASLTRLPFLYRPRFNARKLQEATRPPPTVRSILELSPQPKNFNRTATGWRLQ

SEQ ID NO: 1289 - DNA, 939 bp, Homo sapiens
atgccttctatcaatgacacccacttctatccccccttcttcctcctgctaggaataccaggactggacactttacatatctggatttctttcccattctgtattgtgtacctgattgccattgtggggaatatgaccattctctttgtgatcaaaactgaacatagtctacaccagcccatgttctacttcctggccatgttgtctatgattgatctgggtctgtccacatccactatccccaaaatgctaggaatcttctggttcaacctccaagagatcagctttgggggatgccttcttcagatgttctttattcacatgtttacaggcatggagactgttctgttggtggtcatggcttatgaccgctttgttgccatctgcaaccctctccagtacaccatgatcctcaccaataaaaccatcagtatcctagcttctgtggttgttggaagaaatttagttcttgtaaccccatttgtgtttctcattctgcgtctgccattctgtgggcataacatcgtacctcacacatactgtgagcacaggggtctggccgggttggcctgtgcacccattaagatcaacataatctatgggctcatggtgatttcttatattattgtggatgtgatcttaattgcctcttcctatgtgcttatccttagagctgtttttcgccttccctctcaagatgtccgactaaaggccttcaatacctgtggttctcatgtctgtgttatgctgtgcttttacacaccagcatttttttcttttatgacacatcgttttggccaaaacattccccactatatccatattcttttggctaacctgtatgtggttgtcccacctgcccttaaccctgtcatttatggagtcaggaccaagcagatccgagagcaaattgtgaaaatatttgtacagaaagaataa

SEQ ID NO: 1290 - protein, 312 aa, Homo sapiens
MPSINDTHFYPPFFLLLGIPGLDTLHIWISFPFCIVYLIAIVGNMTILFVIKTEHSLHQPMFYFLAMLSMIDLGLSTSTIPKMLGIFWFNLQEISFGGCLLQMFFIHMFTGMETVLLVVMAYDRFVAICNPLQYTMILTNKTISILASVVVGRNLVLVTPFVFLILRLPFCGHNIVPHTYCEHRGLAGLACAPIKINIIYGLMVISYIIVDVILIASSYVLILRAVFRLPSQDVRLKAFNTCGSHVCVMLCFYTPAFFSFMTHRFGQNIPHYIHILLANLYVVVPPALNPVIYGVRTKQIREQIVKIFVQKE

SEQ ID NO: 1291 - DNA, 948 bp, Homo sapiens
atgcttcataccaacaatacacagtttcacccttccaccttcctcgtagtgggggtcccagggctggaagatgtgcatgtatggattggcttccccttctttgcggtgtatctaacagcccttctagggaacatcattatcctgtttgtgatacagactgaacagagcctccaccaacccatgttttacttcctagccatgttggccggcactgatctgggcttgtctacagcaaccatccccaagatgctgggaattttctggtttaatcttggagagattgcatttggtgcctgcatcacacagatgtataccattcatatatgcactggcctggagtctgtggtactgacagtcacgggcatagatcgctatattgccatctgcaaccccctgagatatagcatgatccttaccaacaaggtaatagccattctgggcatagtcatcattgtcaggactttggtatttgtgactccattcacatttctcaccctgagattgcctttctgtggtgtccggattatccctcatacctattgtgaacacatgggcttggcaaagttagcttgtgccagtattaatgttatatatggattgattgccttctcagtgggatacattgacatttctgtgattggattttcctatgtccagatcctccgagctgtcttccatctcccagcctgggatgcccggcttaaggcactcagcacatgtggctctcacgtctgtgttatgttggctttctacctgccagccctcttttccttcatgacacaccgctttggccacaacatccctcattacatccacattcttctggccaatctgtatgtggtttttccccctgctcttaactctgttatctatggggtcaaaacaaaacagatacgagagcagagtctgtgtatttgcatatctgaagctgaagctcatgacgattaa

SEQ ID NO: 1292 - protein, 315 aa, Homo sapiens [sequence omitted]

SEQ ID NO: 1293 - DNA, 720 bp, Homo sapiens
atgacaacacaccgaaatgacaccctctccactgaagcttcagacttcctcttgaattgttttgtcagatcccccagctggcagcactggctgtccctgcccctcagcctccttttcctcttggccgtaggggccaacaccaccctcctgatgaccatctggctggaggcctctctgcaccagcccctgtactacctgctcagcctcctctccctgctggacatcgtgctctgcctcactgtcatccccaagccaggagttttggccattcaagcacaactccgttattgtggaagaaatgtcattgagaactgcatctgtgccaatatgtctgtttccagactctcctgcgatgatgtcaccatcaatcacctttaccaatttgctggaggctggactctgctaggatctgacctcatccttatcttcctctcctacaccttcattctgcgagctgtgctgagactcaaggcagagggtgccgtggcaaaggccctaagcacatgtggctcccacttcatgctcatcctcttcttcagcaccatccttctggtttttgtcctcacacatgtggctaagaagaaagtctcccctgatgtgccagtcttgctcaatgttctccaccatgtcattcctgcagcccttaaccccatcatttacggggtgagaacccaagaaattaagcagggaatgcagaggttgttgaagaaagggtgctaa

SEQ ID NO: 1294 - protein, 239 aa, Homo sapiens
MTTHRNDTLSTEASDFLLNCFVRSPSWQHWLSLPLSLLFLLAVGANTTLLMTIWLEASLHQPLYYLLSLLSLLDIVLCLTVIPKPGVLAIQAQLRYCGRNVIENCICANMSVSRLSCDDVTINHLYQFAGGWTLLGSDLILIFLSYTFILRAVLRLKAEGAVAKALSTCGSHFMLILFFSTILLVFVLTHVAKKKVSPDVPVLLNVLHHVIPAALNPIIYGVRTQEIKQGMQRLLKKGC

SEQ ID NO: 1295 - DNA, 942 bp, Homo sapiens
atgacattacccagcaacaactccacttccccagtctttgaattcttcctcatttgtttccccagtttccagagctggcagcactggctgtctctgcccctcagcctcctcttcctcctggccatgggggccaatgccacccttctgatcaccatctatctggaagcctctctgcaccagcccctgtactacctgctcagcctcctctccctgctggacatcgtactctgcctcaccgtcatccccaaggtcctggccatcttctggtttgacctcagatcaatcagcttccctgcctgcttccttcaggtgttcatcatgaacagttttctgactatggagtcctgcacattcatgatcatggcctatgaccgctatgtggccatctgcaagcccctacagtactcatccatcatcactgatcaatttgtcgctagggctgccatctttgttgtggccaggaatggccttcttactatgcctatccccatactttcttctcgactcagatactgtgcaggacacatcatcaagaactgcatctgtactaacgtgtctgtgtctaaactctcttgtgatgacatcaccttgaatcagagctaccagtttgttataggttggaccctgctgggctctgacctcatccttattgttctctcttacttttttatcttgaaaactgtgctaaggattaagggtgagggagatatggccaaagctctaggtacttgtggttcccacttcatcctcatcctcttcttcaccacagtcctgctggttctggtcatcactaacctggccaggaagagaattcctccggatgtccccatcctgctcaacatcctgcaccaccttattcccccagctctgaaccccattgtttatggtgtgagaaccaaggagatcaagcagggaatccagaacctgctgaggaggttgtaa

SEQ ID NO: 1296 - protein, 313 aa, Homo sapiens
MTLPSNNSTSPVFEFFLICFPSFQSWQHWLSLPLSLLFLLAMGANATLLITIYLEASLHQPLYYLLSLLSLLDIVLCLTVIPKVLAIFWFDLRSISFPACFLQVFIMNSFLTMESCTFMIMAYDRYVAICKPLQYSSIITDQFVARAAIFVVARNGLLTMPIPILSSRLRYCAGHIIKNCICTNVSVSKLSCDDITLNQSYQFVIGWTLLGSDLILIVLSYFFILKTVLRIKGEGDMAKALGTCGSHFILILFFTTVLLVLVITNLARKRIPPDVPILLNILHHLIPPALNPIVYGVRTKEIKQGIQNLLRRL

SEQ ID NO: 1297 - DNA, 990 bp, Homo sapiens
atgactttggtttcttttttctctttcctctccaagccattgataatgctccttagcaattcaagctggaggctatcccagccttcttttctcctggtagggattccaggtttagaggaaagccagcactggattgcactgcccctgggcatcctttacctccttgctttagtgggcaatgttaccattctcttcatcatctggatggacccatccttgcaccaatctatgtacctcttcctgtccatgctagctgccatcgacctggttctggcctcctccactgcacccaaagcccttgcagtgctcctggttcatgcccacgagattgggtacatcgtctgcctgatccagatgttcttcatccatgcattctcctccatggagtcaggggtacttgtggccatggctctggatcgctatgtagccatttgtcaccccttgcaccattccacaatcctgcatccaggggtcatagggcgcatcggaatggtggtgctggtgaggggattactactccttatccccttccccattttgttgggaacacttatcttctgccaagccaccatcataggccatgcctattgtgaacatatggctgttgtgaaacttgcctgctcagaaaccacagtcaatcgagcttatgggctgactatggccttgcttgtgattgggctggatgttctggccattggtgtttcctatgcccacatcctccaggcagtgctgaaggtaccagggagtgaggcccgacttaaggcgtttagcacatgtggctctcatatttgtgtcatcctggtcttctatgtccctggaattttctccttcctcactcaccgctttggtcatcatgtaccccatcatgtccatgttcttctggccacacggtatctcctcatgccacctgcgctcaatcctcttgtctatggagtgaagactcagcagatccgccagcgagtgctcagagtgtttacacaaaaggattga

SEQ ID NO: 1298 - protein, 329 aa, Homo sapiens
MTLVSFFSFLSKPLIMLLSNSSWRLSQPSFLLVGIPGLEESQHWIALPLGILYLLALVGNVTILFIIWMDPSLHQSMYLFLSMLAAIDLVLASSTAPKALAVLLVHAHEIGYIVCLIQMFFIHAFSSMESGVLVAMALDRYVAICHPLHHSTILHPGVIGRIGMVVLVRGLLLLIPFPILLGTLIFCQATIIGHAYCEHMAVVKLACSETTVNRAYGLTMALLVIGLDVLAIGVSYAHILQAVLKVPGSEARLKAFSTCGSHICVILVFYVPGIFSFLTHRFGHHVPHHVHVLLATRYLLMPPALNPLVYGVKTQQIRQRVLRVFTQKD

SEQ ID NO: 1299 - DNA, 3737 bp, Homo sapiens
ggcgtccgcgcacacctccccgcgccgccgccgccaccgcccgcactccgccgcctctgcccgcaaccgctgagccatccatgggggtcgcgggccgcaaccgtcccggggcggcctgggcggtgctgctgctgctgctgctgctgccgccactgctgctgctggcgggggccgtcccgccgggtcggggccgtgccgcggggccgcaggaggatgtagatgagtgtgcccaagggctagatgactgccatgccgacgccctgtgtcagaacacacccacctcctacaagtgctcctgcaagcctggctaccaaggggaaggcaggcagtgtgaggacatcgatgaatgtggaaatgagctcaatggaggctgtgtccatgactgtttgaatattccaggcaattatcgttgcacttgttttgatggcttcatgttggctcatgacggtcataattgtcttgatgtggacgagtgcctggagaacaatggcggctgccagcatacctgtgtcaacgtcatggggagctatgagtgctgctgcaaggaggggtttttcctgagtgacaatcagcacacctgcattcaccgctcggaagagggcctgagctgcatgaataaggatcacggctgtagtcacatctgcaaggaggccccaaggggcagcgtcgcctgtgagtgcaggcctggttttgagctggccaagaaccagagagactgcatcttgacctgtaaccatgggaacggtgggtgccagcactcctgtgacgatacagccgatggcccagagtgcagctgccatccacagtacaagatgcacacagatgggaggagctgccttgagcgagaggacactgtcctggaggtgacagagagcaacaccacatcagtggtggatggggataaacgggtgaaacggcggctgctcatggaaacgtgtgctgtcaacaatggaggctgtgaccgcacctgtaaggatacttcgacaggtgtccactgcagttgtcctgttggattcactctccagttggatgggaagacatgtaaagatattgatgagtgccagacccgcaatggaggttgtgatcatttctgcaaaaacatcgtgggcagttttgactgcggctgcaagaaaggatttaaattattaacagatgagaagtcttgccaagatgtggatgagtgctctttggataggacctgtgaccacagctgcatcaaccaccctggcacatttgcttgtgcttgcaaccgagggtacaccctgtatggcttcacccactgtggagacaccaatgagtgcagcatcaacaacggaggctgtcagcaggtctgtgtgaacacagtgggcagctatgaatgccagtgccaccctgggtacaagctccactggaataaaaaagactgtgtggaagtgaaggggctcctgcccacaagtgtgtcaccccgtgtgtccctgcactgcggtaagagtggtggaggagacgggtgcttcctcagatgtcactctggcattcacctctcttcagatgtcaccaccatcaggacaagtgtaacctttaagctaaatgaaggcaagtgtagtttgaaaaatgctgagctgtttcccgagggtctgcgaccagcactaccagagaagcacagctcagtaaaagagagcttccgctacgtaaaccttacatgcagctctggcaagcaagtcccaggagcccctggccgaccaagcacccctaaggaaatgtttatcactgttgagtttgagcttgaaactaaccaaaaggaggtgacagcttcttgtgacctgagctgcatcgtaaagcgaaccgagaagcggctccgtaaagccatccgcacgctcagaaaggccgtccacagggagcagtttcacctccagctctcaggcatgaacctcgacgtggctaaaaagcctcccagaacatctgaacgccaggcagagtcctgtggagtgggccagggtcatgcagaaaaccaatgtgtcagttgcagggctgggacctattatgatggagcacgagaacgctgcattttatgtccaaatggaaccttccaaaatgaggaaggacaaatgacttgtgaaccatgcccaagaccaggaaattctggggccctgaagaccccagaagcttggaatatgtctgaatgtggaggtctgtgtcaacctggtgaatattctgcagatggctttgcaccttgccagctctgtgccctgggcacgttccagcctgaagctggtcgaacttcctgcttcccctgtggaggaggccttgccaccaaacatcagggagctacttcctttcaggactgtgaaaccagagttcaatgttcacctggacatttctacaacaccaccactcaccgatgtattcgttgcccagtgggaacataccagcctgaatttggaaaaaataattgtgtttcttgcccaggaaatactacgactgactttgatggctccacaaacataacccagtgtaaaaacagaagatgtggaggggagctgggagatttcactgggtacattgaatccccaaactacccaggcaattacccagccaacaccgagtgtacgtggaccatcaacccaccccccaagcgccgcatcctgatcgtggtccctgagatcttcctgcccatagaggacgactgtggggactatctggtgatgcggaaaacctcttcatccaattctgtgacaacatatgaaacctgccagacctacgaacgccccatcgccttcacctccaggtcaaagaagctgtggattcagttcaagtccaatgaagggaacagcgctagagggttccaggtcccatacgtgacatatgatgaggactaccaggaactcattgaagacatagttcgagatggcaggctctatgcatctgagaaccatcaggaaatacttaaggataagaaacttatcaaggctctgtttgatgtcctggcccatccccagaactatttcaagtacacagcccaggagtcccgagagatgtttccaagatcgttcatccgattgctacgttccaaagtgtccaggtttttgagaccttacaaatgactcagcccacgtgccactcaatacaaatgttctgctatagggttggtgggacagagctgtcttccttctgcatgtcagcacagtcgggtattgctgcctcccgtatcagtgactcattagagttcaatttttatagataatacagatattttggtaaattgaacttggtttttctttcccagcatcgtggatgtagactgagaatggctttgagtggcatcagcttctcactgctgtgggcggatgtcttggatagatcacgggctggctgagctggactttggtcagcctaggtgagactcacctgtccttctggggtcttactcctcctcaaggagtctgtagtggaaaggaggccacagaataagctgcttattctgaaacttcagcttcctctagcccggccctctctaagggagccctctgcactcgtgtgcaggctctgaccaggcagaacaggcaagaggggagggaaggagacccctgcaggctccctccacccaccttgagacctgggaggactcagtttctccacagccttctccagcctgtgtgatacaagtttgatcccaggaacttgagttctaagcagtgctcgtgaaaaaaaaaagcagaaagaattagaaataaataaaaactaagcacttctggagacat

SEQ ID NO: 1300 - protein, 999 aa, Homo sapiens
MGVAGRNRPGAAWAVLLLLLLLPPLLLLAGAVPPGRGRAAGPQEDVDECAQGLDDCHADALCQNTPTSYKCSCKPGYQGEGRQCEDIDECGNELNGGCVHDCLNIPGNYRCTCFDGFMLAHDGHNCLDVDECLENNGGCQHTCVNVMGSYECCCKEGFFLSDNQHTCIHRSEEGLSCMNKDHGCSHICKEAPRGSVACECRPGFELAKNQRDCILTCNHGNGGCQHSCDDTADGPECSCHPQYKMHTDGRSCLEREDTVLEVTESNTTSVVDGDKRVKRRLLMETCAVNNGGCDRTCKDTSTGVHCSCPVGFTLQLDGKTCKDIDECQTRNGGCDHFCKNIVGSFDCGCKKGFKLLTDEKSCQDVDECSLDRTCDHSCINHPGTFACACNRGYTLYGFTHCGDTNECSINNGGCQQVCVNTVGSYECQCHPGYKLHWNKKDCVEVKGLLPTSVSPRVSLHCGKSGGGDGCFLRCHSGIHLSSDVTTIRTSVTFKLNEGKCSLKNAELFPEGLRPALPEKHSSVKESFRYVNLTCSSGKQVPGAPGRPSTPKEMFITVEFELETNQKEVTASCDLSCIVKRTEKRLRKAIRTLRKAVHREQFHLQLSGMNLDVAKKPPRTSERQAESCGVGQGHAENQCVSCRAGTYYDGARERCILCPNGTFQNEEGQMTCEPCPRPGNSGALKTPEAWNMSECGGLCQPGEYSADGFAPCQLCALGTFQPEAGRTSCFPCGGGLATKHQGATSFQDCETRVQCSPGHFYNTTTHRCIRCPVGTYQPEFGKNNCVSCPGNTTTDFDGSTNITQCKNRRCGGELGDFTGYIESPNYPGNYPANTECTWTINPPPKRRILIVVPEIFLPIEDDCGDYLVMRKTSSSNSVTTYETCQTYERPIAFTSRSKKLWIQFKSNEGNSARGFQVPYVTYDEDYQELIEDIVRDGRLYASENHQEILKDKKLIKALFDVLAHPQNYFKYTAQESREMFPRSFIRLLRSKVSRFLRPYK

SEQ ID NO: 1301 - DNA, 4965 bp, Homo sapiens
cgctctcggctagctgcagcggcggcggcgcggaggggaaggcatccaggatgcggtgcggggcggcccggtgcccccccgccccgtcacggcagccgcggcggccgaggggaccgggccagggccgggggcggcggcccgagccgcggtagcggcggcggcgggaggggcggcctgagggcggacgggcgggcgcccgggttgcgggggctcggtgccgctccgcactgcccggccggtctcggccccggcgccatgagtggcggcggcggcggagggggctcggcgcccagtcgcttcgccgactactttgtcatctgcggactggacacggagaccgggctggagccggacgagctgtcggcattatgccagtacatacaggcttctaaagccagggatggtgccagccctttcatttcaagtacgactgaaggagaaaattttgagcagacaccattgagaagaacattcaaatctaaggtccttgcacgatatcctgagaacgtagaatggaatccctttgaccaagatgcagtaggaatgctatgtatgccgaaagggctggcattcaagacccaggctgatcccagggagccccaattccatgcctttattatcacaagggaggatggctctcggacatttgggtttgccctcacattttatgaagaggtgactagcaagcagatctgcagtgcaatgcagaccctctaccacatgcacaatgctgagtatgatgtcctacatgctccccctgctgatgacagagaccagagcagcatggaggatggtgaagacactcctgtgaccaaactgcagcgcttcaactcctatgacattagccgggacactctctacgtctctaagtgcatctgcctcatcacacccatgtctttcatgaaggcatgtcggagcgtgctggagcaactccaccaggcagtcacttcacctcagccccctccactgccccttgagagctacatatacaacgtactctacgaggtgccgctcccacctcctggccggtccttgaagttttctggggtctatgggccaataatctgccagagaccaagtaccaatgagcttcccctatttgactttcctgtcaaagaggtttttgaactgctcggggtggagaatgtgtttcagctttttacttgtgcccttctggagtttcaaatcctgctctactcacagcattaccagagactgatgactgtggcggagacgattacagctctcatgtttcctttccagtggcagcatgtctatgtccctattctcccagcttctctcctgcatttcttagatgctcctgttccatacctgatgggtttgcattccaatggcctggatgaccggtcaaagctggagctgcctcaagaggctaacctctgctttgtggacattgacaaccacttcattgagttgccagaggacttgccacagttccccaacaaattggagtttgtccaggaagtctctgagattctcatggcatttggaattccccctgaagggaatcttcattgcagtgagagtgcctccaagctgaagaggctgcgggcctctgagcttgtctcggacaagaggaatgggaacattgctggctcccctttgcattcctacgagcttcttaaggagaatgaaactattgcccggctgcaagccttggtcaagagaactggggtgagcctggaaaagttggaagtgcgtgaagaccccagcagcaataaggatctcaaagttcagtgtgatgaagaagaactcaggatttaccagctaaacattcagatccgggaagtttttgcaaatcgtttcactcagatgtttgcagattatgaggtgtttgtcatccaacccagccaggataaggaatcctggtttaccaacagggagcaaatgcaaaactttgataaagcatcttttctgtcagatcagcctgagccctacctgcccttcctctcaagattcctggagacccagatgtttgcatctttcattgacaacaaaataatgtgtcatgatgatgatgataaagaccctgtactccgggtatttgattcccgagttgacaagatcaggctgttgaatgttcggacacctactctccgtacatccatgtaccagaagtgtaccactgtggatgaagcagagaaagcaattgagctgcgtctggcaaaaattgaccatactgcaattcacccacatttacttgacatgaagattggacaagggaaatatgagccgggcttcttccctaagctgcagtctgatgtactttccactgggccagccagcaacaagtggacgaaaaggaatgcccctgcccagtggaggcggaaagatcggcagaagcagcacacagaacacctgcgtttagataatgaccagagggagaagtacatccaggaagccaggactatgggcagcactatccgccagcccaaactgtccaacctctctccatcagtgattgcccagaccaattggaagtttgtagagggcctgctgaaggaatgccgcaataagaccaagaggatgctggtggaaaagatgggccgagaagctgtggagctagggcatggggaggtgaacatcacaggggtggaagagaacaccctgattgccagcctttgtgatctcctggaaaggatctggagtcatggactacaagtgaaacaggggaaatcagccttatggtcccacctgttacattatcaggacaaccggcagagaaaactcacatcaggaagcctcagtacctcaggaatacttcttgattcagaacgtaggaagtctgatgccagctcactcatgcctcccctgaggatctccctgattcaggatatgaggcacatccagaacatcggggaaatcaagactgatgtgggaaaggccagagcatgggtgcgactgtccatggaaaaaaagttactttccagacacctgaagcagctcctctcagaccatgagctcaccaaaaagttatataagcgctatgccttcctgcgctgtgatgacgagaaggagcagttcctctatcacctcctgtctttcaatgccgtcgattacttttgcttcaccaatgtcttcacaactatcctgatcccgtaccacattctgatcgtaccaagcaagaagctggggggctccatgttcactgccaacccatggatctgtatatcaggagaattgggtgagacacagatcatgcagattcccaggaatgtgctagagatgaccttcgagtgccagaacttggggaagcttactactgtccagattggccatgataactctgggctgtatgccaaatggctggtggagtatgtgatggtcaggaatgagatcacaggacatacctacaagttcccgtgtggccggtggttagggaagggcatggatgatggaagcctggagcggatcctagttggggagctgctcacatcccagcctgaggtggatgagaggccatgccggaccccgccgctgcagcagtcccccagtgtcatccggaggcttgttaccatctcacccaacaacaagcccaagctgaacactgggcagatccaggagtccatcggggaggcagtcaatggcattgtgaagcacttccataagcctgagaaagagcgaggcagtctgacgctgttgctctgtggagagtgtggccttgtctcggccttggaacaggctttccagcatggatttaaatcgccccggctcttcaaaaatgtcttcatttgggatttcctggaaaaagcacaaacctattatgagacattagagaagaatgaagtagtccctgaggaaaactggcatacaagagcccggaacttctgccgatttgtcactgcaatcaacaatactccccggaacatcggcaaggatggcaagtttcagatgctggtgtgcttgggagccagagatcacctcctacaccactggattgccctgctggctgactgccccatcactgcacacatgtatgaggatgtggcactgatcaaagaccatacacttgtcaattccttgattcgtgtgctgcagacattgcaggagttcaacatcacgctggagacgtcccttgtcaagggcatcgacatctgacctcccagcaccagccagcagcaggactgagaaagactcaccctgcagctctgaccttttttcccaaagggacttaagcgattgtgcaggagtaggagacaaaatgtacactcactgtaaaaagaaaactagaggatttttggaataaataatctattttagagtttatttgctgatttgctttttacacactttcatgtgaaagagtgatagggagagggagcgaggctggtgccgcttattttgaagctggtgccctccctcgccgtggccacatgctggaagcctgaggcctccctggactgagcctgtggcactgcgtgcgggacagttatgtttccttgccccgtcgcattaatgaggcccttccacatcatttttaaactaatgtttttctatattaacattattatggatatttggctttcataggccacacacaggtgtgctgcgcgggaagccccatgctccaatcaaagggatttttagtagtgcctctaagcaagcaccgatgagtcagtcccacgtattttcttttttgtcagtattgtttgggaaggagacatgccgggatgtgtcatcgtgccaaataccacatttcctgttggcacagtttcacagaagtaaacataagcatgttttaacaggtttttcttttcttttttcttttttaaaatgttttatttatttaacccgccattgtgtgtttttaagtattttctttttttaaggaaaggaaaagcttgtcacaatctaactggctatgttattattattaaatttatgttttgcaacttagaaaccagctacagtatggcccacttaataaaacacctgaaacaaaaa

SEQ ID NO: 1302 - protein, 1287 aa, Homo sapiens
MSGGGGGGGSAPSRFADYFVICGLDTETGLEPDELSALCQYIQASKARDGASPFISSTTEGENFEQTPLRRTFKSKVLARYPENVEWNPFDQDAVGMLCMPKGLAFKTQADPREPQFHAFIITREDGSRTFGFALTFYEEVTSKQICSAMQTLYHMHNAEYDVLHAPPADDRDQSSMEDGEDTPVTKLQRFNSYDISRDTLYVSKCICLITPMSFMKACRSVLEQLHQAVTSPQPPPLPLESYIYNVLYEVPLPPPGRSLKFSGVYGPIICQRPSTNELPLFDFPVKEVFELLGVENVFQLFTCALLEFQILLYSQHYQRLMTVAETITALMFPFQWQHVYVPILPASLLHFLDAPVPYLMGLHSNGLDDRSKLELPQEANLCFVDIDNHFIELPEDLPQFPNKLEFVQEVSEILMAFGIPPEGNLHCSESASKLKRLRASELVSDKRNGNIAGSPLHSYELLKENETIARLQALVKRTGVSLEKLEVREDPSSNKDLKVQCDEEELRIYQLNIQIREVFANRFTQMFADYEVFVIQPSQDKESWFTNREQMQNFDKASFLSDQPEPYLPFLSRFLETQMFASFIDNKIMCHDDDDKDPVLRVFDSRVDKIRLLNVRTPTLRTSMYQKCTTVDEAEKAIELRLAKIDHTAIHPHLLDMKIGQGKYEPGFFPKLQSDVLSTGPASNKWTKRNAPAQWRRKDRQKQHTEHLRLDNDQREKYIQEARTMGSTIRQPKLSNLSPSVIAQTNWKFVEGLLKECRNKTKRMLVEKMGREAVELGHGEVNITGVEENTLIASLCDLLERIWSHGLQVKQGKSALWSHLLHYQDNRQRKLTSGSLSTSGILLDSERRKSDASSLMPPLRISLIQDMRHIQNIGEIKTDVGKARAWVRLSMEKKLLSRHLKQLLSDHELTKKLYKRYAFLRCDDEKEQFLYHLLSFNAVDYFCFTNVFTTILIPYHILIVPSKKLGGSMFTANPWICISGELGETQIMQIPRNVLEMTFECQNLGKLTTVQIGHDNSGLYAKWLVEYVMVRNEITGHTYKFPCGRWLGKGMDDGSLERILVGELLTSQPEVDERPCRTPPLQQSPSVIRRLVTISPNNKPKLNTGQIQESIGEAVNGIVKHFHKPEKERGSLTLLLCGECGLVSALEQAFQHGFKSPRLFKNVFIWDFLEKAQTYYETLEKNEVVPEENWHTRARNFCRFVTAINNTPRNIGKDGKFQMLVCLGARDHLLHHWIALLADCPITAHMYEDVALIKDHTLVNSLIRVLQTLQEFNITLETSLVKGIDI

SEQ ID NO: 1303 - DNA, 2757 bp, Homo sapiens
ggaaagtaggttagtggtgcgacatttagggaaggcagaaagtaggtcagggacggaggtgcctgtttacccgcgccggactcaccgccgccgccgccgcgggatccgagtgcgggcgcgggcgcgggcgctcccggcgagccacggtggtgctggctagagtgtatacgtttggacccaagcttaacttttccaatgtggaatcctgggccttcattggtttttggaagaagctgaccgcctgaaaagaaattataaaacatgaaaatcgctttgaggtgaccaagtccagaggcccctaactcctcccaagctggatctggggtgtaagaactgtgacttcagatcatccaatggcagaccagagaatggacatttcttcaaccatcagtgatttcatgtccccgggccccaccgacctgctttccagctctcttggtaccagtggtgtggattgcaaccgcaaacggaaaggcagctccactgactaccaagaaagcatggacacagacaaagatgaccctcatggaaggttagaatatacagaacaccaaggaaggataaaaaatgcaagggaagctcacagtcagattgaaaagcggcgtcgggataaaatgaacagttttatagatgaattggcttctttggtaccaacatgcaacgcaatgtccaggaaattagataaacttactgtgctaaggatggctgttcagcacatgaaaacattaagaggtgccaccaatccatacacagaagcaaactacaaaccaacttttctatcagacgatgaattgaaacacctcattctcagggcagcagatggatttttgtttgtcgtaggatgtgaccgagggaagatactctttgtctcagagtctgtcttcaagatcctcaactacagccagaatgatctgattggtcagagtttgtttgactacctgcatcctaaagatattgccaaagtcaaggagcagctctcctcctctgacaccgcaccccgggagcggctcatagatgcaaaaactggacttccagttaaaacagatataacccctgggccatctcgattatgttctggagcacgacgttctttcttctgtaggatgaagtgtaacaggccttcagtaaaggttgaagacaaggacttcccctctacctgctcaaagaaaaaagatcgaaaaagcttctgcacaatccacagcacaggctatttgaaaagctggccacccacaaagatggggctggatgaagacaacgaaccagacaatgaggggtgtaacctcagctgcctcgtcgcaattggacgactgcattctcatgtagttccacaaccagtgaacggggaaatcagggtgaaatctatggaatatgtttctcggcacgcgatagatggaaagtttgtttttgtagaccagagggcaacagctattttggcatatttaccacaagaacttctaggcacatcgtgttatgaatattttcaccaagatgacataggacatcttgcagaatgtcataggcaagttttacagacgagagaaaaaattacaactaattgctataaatttaaaatcaaagatggttcttttatcacactacggagtcgatggttcagtttcatgaacccttggaccaaggaagtagaatatattgtctcaactaacactgttgttttagccaacgtcctggaaggcggggacccaaccttcccacagctcacagcatccccccacagcatggacagcatgctgccctctggagaaggtggcccaaagaggacccaccccactgttccagggattccagggggaacccgggctggggcaggaaaaataggccgaatgattgctgaggaaatcatggaaatccacaggataagagggtcatcgccttctagctgtggctccagcccattgaacatcacgagtacgcctccccctgatgcctcttctccaggaggcaagaagattttaaatggagggactccagacattccttccagtggcctactatcaggccaggctcaggagaacccaggttatccatattctgatagttcttctattcttggtgagaacccccacataggtatagacatgattgacaacgaccaaggatcaagtagtcccagtaatgatgaggcagcaatggctgtcatcatgagcctcttggaagcagatgctggactgggtggccctgttgactttagtgacttgccatggccgctgtaaacactacatgttgctttggcaacagctatagtatcaaagtgcattactggtggagttttacagtctgtgaagcttactggataaggagagaatagcttttatgtactgacttcataaaagccatctcagagccattgatacaagtcaatcttactatatgtaacttcagacaaagtggaactaagcctgctccagtgtttcctcatcattgattattgggctagctgtggatagcttgcattaattgtatattttggattctgtttgtgttgaattttttaatcattgtgcacagaagcatcattggtagcttttatatgcaaatggtcatttcagatgtatggtgtttttacactacaaagaagtcccccatgtggatatttcttatactaattgtatcataaagccgtttattcttccttgtaagaatcctttactataaatatgggttaaagtataatgtactagacagttaaatatttttaataaatgtttcccttgttctataaaaaaaaaaaaaaaaaaa

SEQ ID NO: 1304 - protein, 625 aa, Homo sapiens
MADQRMDISSTISDFMSPGPTDLLSSSLGTSGVDCNRKRKGSSTDYQESMDTDKDDPHGRLEYTEHQGRIKNAREAHSQIEKRRRDKMNSFIDELASLVPTCNAMSRKLDKLTVLRMAVQHMKTLRGATNPYTEANYKPTFLSDDELKHLILRAADGFLFVVGCDRGKILFVSESVFKILNYSQNDLIGQSLFDYLHPKDIAKVKEQLSSSDTAPRERLIDAKTGLPVKTDITPGPSRLCSGARRSFFCRMKCNRPSVKVEDKDFPSTCSKKKDRKSFCTIHSTGYLKSWPPTKMGLDEDNEPDNEGCNLSCLVAIGRLHSHVVPQPVNGEIRVKSMEYVSRHAIDGKFVFVDQRATAILAYLPQELLGTSCYEYFHQDDIGHLAECHRQVLQTREKITTNCYKFKIKDGSFITLRSRWFSFMNPWTKEVEYIVSTNTVVLANVLEGGDPTFPQLTASPHSMDSMLPSGEGGPKRTHPTVPGIPGGTRAGAGKIGRMIAEEIMEIHRIRGSSPSSCGSSPLNITSTPPPDASSPGGKKILNGGTPDIPSSGLLSGQAQENPGYPYSDSSSILGENPHIGIDMIDNDQGSSSPSNDEAAMAVIMSLLEADAGLGGPVDFSDLPWPL

SEQ ID NO: 1305 - DNA, 2828 bp, Homo sapiens
ggaaagtaggttagtggtgcgacatttagggaaggcagaaagtaggtcagggacggaggtgcctgtttacccgcgccggactcaccgccgccgccgccgcgggatccgagtgcgggcgcgggcgcgggcgctcccggcgagccacggtggtgctggctagagtgtatacgtttggacccaagcttaacttttccaatgtggaatcctgggccttcattggtttttggaagaagctgaccgcctgaaaagaaattataaaacatgaaaatcgctttgaggtgaccaagtccagaggcccctaactcctcccaagctggatctggggtgtaagaactgtgacttcagatcatccaatggcagaccagagaatggacatttcttcaaccatcagtgatttcatgtccccgggccccaccgacctgctttccagctctcttggtaccagtggtgtggattgcaaccgcaaacggaaaggcagctccactgactaccattcacaggtcgaatttggggagcacaatggctggaggtcagatgcccactaggagatgctatgattaatatagaaagcatggacacagacaaagatgaccctcatggaaggttagaatatacagaacaccaaggaaggataaaaaatgcaagggaagctcacagtcagattgaaaagcggcgtcgggataaaatgaacagttttatagatgaattggcttctttggtaccaacatgcaacgcaatgtccaggaaattagataaacttactgtgctaaggatggctgttcagcacatgaaaacattaagaggtgccaccaatccatacacagaagcaaactacaaaccaacttttctatcagacgatgaattgaaacacctcattctcagggcagcagatggatttttgtttgtcgtaggatgtgaccgagggaagatactctttgtctcagagtctgtcttcaagatcctcaactacagccagaatgatctgattggtcagagtttgtttgactacctgcatcctaaagatattgccaaagtcaaggagcagctctcctcctctgacaccgcaccccgggagcggctcatagatgcaaaaactggacttccagttaaaacagatataacccctgggccatctcgattatgttctggagcacgacgttctttcttctgtaggatgaagtgtaacaggccttcagtaaaggttgaagacaaggacttcccctctacctgctcaaagaaaaaagatcgaaaaagcttctgcacaatccacagcacaggctatttgaaaagctggccacccacaaagatggggctggatgaagacaacgaaccagacaatgaggggtgtaacctcagctgcctcgtcgcaattggacgactgcattctcatgtagttccacaaccagtgaacggggaaatcagggtgaaatctatggaatatgtttctcggcacgcgatagatggaaagtttgtttttgtagaccagagggcaacagctattttggcatatttaccacaagaacttctaggcacatcgtgttatgaatattttcaccaagatgacataggacatcttgcagaatgtcataggcaagttttacagacgagagaaaaaattacaactaattgctataaatttaaaatcaaagatggttcttttatcacactacggagtcgatggttcagtttcatgaacccttggaccaaggaagtagaatatattgtctcaactaacactgttgttttagccaacgtcctggaaggcggggacccaaccttcccacagctcacagcatccccccacagcatggacagcatgctgccctctggagaaggtggcccaaagaggacccaccccactgttccagggattccagggggaacccgggctggggcaggaaaaataggccgaatgattgctgaggaaatcatggaaatccacaggataagagggtcatcgccttctagctgtggctccagcccattgaacatcacgagtacgcctccccctgatgcctcttctccaggaggcaagaagattttaaatggagggactccagacattccttccagtggcctactatcaggccaggctcaggagaacccaggttatccatattctgatagttcttctattcttggtgagaacccccacataggtatagacatgattgacaacgaccaaggatcaagtagtcccagtaatgatgaggcagcaatggctgtcatcatgagcctcttggaagcagatgctggactgggtggccctgttgactttagtgacttgccatggccgctgtaaacactacatgttgctttggcaacagctatagtatcaaagtgcattactggtggagttttacagtctgtgaagcttactggataaggagagaatagcttttatgtactgacttcataaaagccatctcagagccattgatacaagtcaatcttactatatgtaacttcagacaaagtggaactaagcctgctccagtgtttcctcatcattgattattgggctagctgtggatagcttgcattaattgtatattttggattctgtttgtgttgaattttttaatcattgtgcacagaagcatcattggtagcttttatatgcaaatggtcatttcagatgtatggtgtttttacactacaaagaagtcccccatgtggatatttcttatactaattgtatcataaagccgtttattcttccttgtaagaatcctttactataaatatgggttaaagtataatgtactagacagttaaatatttttaataaatgtttcccttgttctataaaaaaaaaaaaaaaaaaa

SEQ ID NO: 1306 - protein, 582 aa, Homo sapiens
MINIESMDTDKDDPHGRLEYTEHQGRIKNAREAHSQIEKRRRDKMNSFIDELASLVPTCNAMSRKLDKLTVLRMAVQHMKTLRGATNPYTEANYKPTFLSDDELKHLILRAADGFLFVVGCDRGKILFVSESVFKILNYSQNDLIGQSLFDYLHPKDIAKVKEQLSSSDTAPRERLIDAKTGLPVKTDITPGPSRLCSGARRSFFCRMKCNRPSVKVEDKDFPSTCSKKKDRKSFCTIHSTGYLKSWPPTKMGLDEDNEPDNEGCNLSCLVAIGRLHSHVVPQPVNGEIRVKSMEYVSRHAIDGKFVFVDQRATAILAYLPQELLGTSCYEYFHQDDIGHLAECHRQVLQTREKITTNCYKFKIKDGSFITLRSRWFSFMNPWTKEVEYIVSTNTVVLANVLEGGDPTFPQLTASPHSMDSMLPSGEGGPKRTHPTVPGIPGGTRAGAGKIGRMIAEEIMEIHRIRGSSPSSCGSSPLNITSTPPPDASSPGGKKILNGGTPDIPSSGLLSGQAQENPGYPYSDSSSILGENPHIGIDMIDNDQGSSSPSNDEAAMAVIMSLLEADAGLGGPVDFSDLPWPL

SEQ ID NO: 1307 - DNA, 2812 bp, Homo sapiens
ggaaagtaggttagtggtgcgacatttagggaaggcagaaagtaggtcagggacggaggtgcctgtttacccgcgccggactcaccgccgccgccgccgcgggatccgagtgcgggcgcgggcgcgggcgctcccggcgagccacggtggtgctggctagagtgtatacgtttggacccaagcttaacttttccaatgtggaatcctgggccttcattggttccgatgtcataggaatctacgctagagggcttcctgtgtgccgggcactgtggtttttggaagaagctgaccgcctgaaaagaaattataaaacatgaaaatcgctttgaggtgaccaagtccagaggcccctaactcctcccaagctggatctggggtgtaagaactgtgacttcagatcatccaatggcagaccagagaatggacatttcttcaaccatcagtgatttcatgtccccgggccccaccgacctgctttccagctctcttggtaccagtggtgtggattgcaaccgcaaacggaaaggcagctccactgactaccaagaaagcatggacacagacaaagatgaccctcatggaaggttagaatatacagaacaccaaggaaggataaaaaatgcaagggaagctcacagtcagattgaaaagcggcgtcgggataaaatgaacagttttatagatgaattggcttctttggtaccaacatgcaacgcaatgtccaggaaattagataaacttactgtgctaaggatggctgttcagcacatgaaaacattaagaggtgccaccaatccatacacagaagcaaactacaaaccaacttttctatcagacgatgaattgaaacacctcattctcagggcagcagatggatttttgtttgtcgtaggatgtgaccgagggaagatactctttgtctcagagtctgtcttcaagatcctcaactacagccagaatgatctgattggtcagagtttgtttgactacctgcatcctaaagatattgccaaagtcaaggagcagctctcctcctctgacaccgcaccccgggagcggctcatagatgcaaaaactggacttccagttaaaacagatataacccctgggccatctcgattatgttctggagcacgacgttctttcttctgtaggatgaagtgtaacaggccttcagtaaaggttgaagacaaggacttcccctctacctgctcaaagaaaaaagatcgaaaaagcttctgcacaatccacagcacaggctatttgaaaagctggccacccacaaagatggggctggatgaagacaacgaaccagacaatgaggggtgtaacctcagctgcctcgtcgcaattggacgactgcattctcatgtagttccacaaccagtgaacggggaaatcagggtgaaatctatggaatatgtttctcggcacgcgatagatggaaagtttgtttttgtagaccagagggcaacagctattttggcatatttaccacaagaacttctaggcacatcgtgttatgaatattttcaccaagatgacataggacatcttgcagaatgtcataggcaagttttacagacgagagaaaaaattacaactaattgctataaatttaaaatcaaagatggttcttttatcacactacggagtcgatggttcagtttcatgaacccttggaccaaggaagtagaatatattgtctcaactaacactgttgttttagccaacgtcctggaaggcggggacccaaccttcccacagctcacagcatccccccacagcatggacagcatgctgccctctggagaaggtggcccaaagaggacccaccccactgttccagggattccagggggaacccgggctggggcaggaaaaataggccgaatgattgctgaggaaatcatggaaatccacaggataagagggtcatcgccttctagctgtggctccagcccattgaacatcacgagtacgcctccccctgatgcctcttctccaggaggcaagaagattttaaatggagggactccagacattccttccagtggcctactatcaggccaggctcaggagaacccaggttatccatattctgatagttcttctattcttggtgagaacccccacataggtatagacatgattgacaacgaccaaggatcaagtagtcccagtaatgatgaggcagcaatggctgtcatcatgagcctcttggaagcagatgctggactgggtggccctgttgactttagtgacttgccatggccgctgtaaacactacatgttgctttggcaacagctatagtatcaaagtgcattactggtggagttttacagtctgtgaagcttactggataaggagagaatagcttttatgtactgacttcataaaagccatctcagagccattgatacaagtcaatcttactatatgtaacttcagacaaagtggaactaagcctgctccagtgtttcctcatcattgattattgggctagctgtggatagcttgcattaattgtatattttggattctgtttgtgttgaattttttaatcattgtgcacagaagcatcattggtagcttttatatgcaaatggtcatttcagatgtatggtgtttttacactacaaagaagtcccccatgtggatatttcttatactaattgtatcataaagccgtttattcttccttgtaagaatcctttactataaatatgggttaaagtataatgtactagacagttaaatatttttaataaatgtttcccttgttctataaaaaaaaaaaaaaaaaaa

SEQ ID NO: 1308 - protein, 625 aa, Homo sapiens; identical to SEQ ID NO: 1304

SEQ ID NO: 1309 - DNA, 3379 bp, Homo sapiens
ctggcctgggcctgaagtgagtgagaggcacatgaagagaagtattcaagtatttatacagataggaatcaagataatcaacaatgtctgtcactgaggaagacctgtgccaccatatgaaagtagtagttcgtgtacgtccggaaaacactaaagaaaaagcagctggatttcataaagtggttcatgttgtggataaacatatcctagtttttgatcccaaacaagaagaagtcagttttttccatggaaagaaaactacaaatcaaaatgttataaagaaacaaaataaggatcttaaatttgtatttgatgctgtttttgatgaaacgtcaactcagtcagaagtttttgaacacactactaagccaattcttcgtagttttttgaatggatataattgcacagtacttgcctatggtgccactggtgctgggaagacccacactatgctaggatcagctgatgaacctggagtgatgtatctaacaatgttacacctttacaaatgcatggatgagattaaagaagagaaaatatgtagtactgcagtttcatatctggaggtatataatgaacagattcgtgatctcttagtaaattcagggccacttgctgtccgggaagatacccaaaaaggggtggtcgttcatggacttactttacaccagcccaaatcctcagaagaaattttacatttattggataatggaaacaaaaacaggacacaacatcccactgatatgaatgccacatcttctcgttctcatgctgttttccaaatttacttgcgacaacaagacaaaacagcaagtatcaatcaaaatgtccgtattgccaagatgtcactcattgacctggcaggatctgagcgagcaagtacttccggtgctaaggggacccgatttgtagaaggcacaaatattaatagatcacttttagctcttgggaatgtcatcaatgccttagcagattcaaagagaaagaatcagcatatcccttacagaaatagtaagcttactcgcttgttaaaggattctcttggaggaaactgtcaaactataatgatagctgctgttagtccttcctctgtattctacgatgacacatataacactcttaagtatgctaaccgggcaaaggacattaaatcttctttgaagagcaatgttcttaatgtcaataatcatataactcaatatgtaaagatctgtaatgagcagaaggcagagattttattgttaaaagaaaaactaaaagcctatgaagaacagaaagccttcactaatgaaaatgaccaagcaaagttaatgatttcaaaccctcaggaaaaagaaatcgaaaggtttcaagaaatcctgaactgcttgttccagaatcgagaagaaattagacaagaatatctgaagttggaaatgttacttaaagaaaatgaacttaaatcattctaccaacaacagtgccataaacaaatagaaatgatgtgttctgaagacaaagtagaaaaggccactggaaaacgagatcatagacttgcaatgttgaaaactcgtcgctcctacctggagaaaaggagggaggaggaattgaagcaatttgatgagaatactaattggctccatcgtgtcgaaaaagaaatgggactcttaagtcaaaacggtcatattccaaaggaactcaagaaagatcttcattgtcaccatttgcacctccagaacaaagatttgaaagcacaaattagacatatgatggatctagcttgtcttcaggaacagcaacacaggcagactgaagcagtattgaatgctttacttccaaccctaagaaaacaatattgcacattaaaagaagccggcctgtcaaatgctgcttttgaatctgacttcaaagagatcgaacatttggtagagaggaaaaaagtggtagtttgggctgaccaaactggcgaacaaccaaagcaaaacgatctacccgggatttctgttcttatgaccttttcacaacttggaccagttcagcctattccttgttgctcatcttcaggtggaactaatctggttaagattcctacagaaaaaagaactcggagaaaactaatgccatctcccttgaaaggacagcatactctaaagtctccaccatctcaaagtgtgcagctcaatgattctcttagcaaagaacttcagcctattgtatatacaccagaagactgtagaaaagcttttcaaaatccgtctacagtaaccttaatgaaaccatcatcatttactacaagttttcaggctatcagctcaaacataaacagtgataattgtctgaaaatgttgtgtgaagtagctatccctcataatagaagaaaagaatgtggacaggaggacttggactctacatttactatatgtgaagacatcaagagctcgaagtgtaaattacccgaacaagaatcactaccaaatgataacaaagacattttacaacggcttgatccttcttcattctcaactaagcattctatgcctgtaccaagcatggtgccatcctacatggcaatgactactgctgccaaaaggaaacggaaattaacaagttctacatcaaacagttcgttaactgcagacgtaaattctggatttgccaaacgtgttcgacaagataattcaagtgagaagcacttacaagaaaacaaaccaacaatggaacataaaagaaacatctgtaaaataaatccaagcatggttagaaaatttggaagaaatatttcaaaaggaaatctaagataaatcacttcaaaaccaagcaaaatgaagttgatcaaatctgcttttcaaagtttatccaataccctttcaaaaatatatttaaaatctttgaaagaagacccatcttaaagctaagtttacccaagtactttcagcaagcagaaaaatgaaactctttgttttcttcttttgtgttctaaaaaaataaaatttcaaaagaaaaggttgtcttttaagttttttaaatatttgttgccttttaaaatccctgagtgtaagttaccatggtggcagcttagttttactatgccacaacaagttgactaggacattttagtaaatggtagtgagttaaattatctttattattttttaaaaataagaatttagaagtggtaaaattatggcccaagatgtatttggttctctattatgttttgatacattattttaatcatatatatgactttccttttcaaaaatactttaatgtacaagtgtaaatatatgtgcccataaaatcattgtaaatattatttagtcatcacaaataaaatattgtcccttgctacttgatatattaaagatgtagattttaaagtgaaaaaaaaaaaaaaaaa

SEQ ID NO: 1310 - protein, 898 aa, Homo sapiens
MSVTEEDLCHHMKVVVRVRPENTKEKAAGFHKVVHVVDKHILVFDPKQEEVSFFHGKKTTNQNVIKKQNKDLKFVFDAVFDETSTQSEVFEHTTKPILRSFLNGYNCTVLAYGATGAGKTHTMLGSADEPGVMYLTMLHLYKCMDEIKEEKICSTAVSYLEVYNEQIRDLLVNSGPLAVREDTQKGVVVHGLTLHQPKSSEEILHLLDNGNKNRTQHPTDMNATSSRSHAVFQIYLRQQDKTASINQNVRIAKMSLIDLAGSERASTSGAKGTRFVEGTNINRSLLALGNVINALADSKRKNQHIPYRNSKLTRLLKDSLGGNCQTIMIAAVSPSSVFYDDTYNTLKYANRAKDIKSSLKSNVLNVNNHITQYVKICNEQKAEILLLKEKLKAYEEQKAFTNENDQAKLMISNPQEKEIERFQEILNCLFQNREEIRQEYLKLEMLLKENELKSFYQQQCHKQIEMMCSEDKVEKATGKRDHRLAMLKTRRSYLEKRREEELKQFDENTNWLHRVEKEMGLLSQNGHIPKELKKDLHCHHLHLQNKDLKAQIRHMMDLACLQEQQHRQTEAVLNALLPTLRKQYCTLKEAGLSNAAFESDFKEIEHLVERKKVVVWADQTGEQPKQNDLPGISVLMTFSQLGPVQPIPCCSSSGGTNLVKIPTEKRTRRKLMPSPLKGQHTLKSPPSQSVQLNDSLSKELQPIVYTPEDCRKAFQNPSTVTLMKPSSFTTSFQAISSNINSDNCLKMLCEVAIPHNRRKECGQEDLDSTFTICEDIKSSKCKLPEQESLPNDNKDILQRLDPSSFSTKHSMPVPSMVPSYMAMTTAAKRKRKLTSSTSNSSLTADVNSGFAKRVRQDNSSEKHLQENKPTMEHKRNICKINPSMVRKFGRNISKGNLR

SEQ ID NO: 1311 - DNA, 3959 bp, Homo sapiens
ctagacgcgcggcgcattcaggttctcctggaccgtagtggtagtcgctggcccgagttagaggccagctgagaagtcttcgtgcttcagatttgtttacctacaaaatgcttcggtatccatatttttgtagaatgtataaagaatgcctttcatgttggttggaatctggcatacctaatttaggtgtctggccaaaaagaatacatactacagcagaaaaatatagagaatatgaagcccgggagcaaacagatcaaactcaagcccaggagttacacagatctcaagatagagattttgaaactatggctaaattacatattccagtaatggtggatgaagttgttcattgtttgtcaccacaaaaaggacagatttttctagatatgacatttggttcgggagggcacacaaaagccattctgcagaaggagtcagatattgttctctatgccttggacagagacccaacagcttatgcattagctgaacatctttcagagttgtatcctaaacaaatccgagctatgctgggccagttcagccaggcagaagccttattaatgaaagctggagtgcagccaggaacttttgatggagttcttatggatcttgggtgttcctccatgcaacttgatactcctgaaagaggtttttcccttcggaaagatggccctttggacgtgagaatggatggtggcaggtaccctgacatgcccactgctgctgatgttgtgaatgctttagatcaacaggcacttgcatctatcctaagaacatacggggaggagaagcatgccaagaaaatcgcttcagcaattgttcaggcacgcagcatctaccccatcaccagaacccagcagcttgccagcatcgttgcagaatactctgaaacatatttcccagtggcccaaactctttattaggaaaatggacgaattgaatagcaaatggagcatttcctccctctgctatttatacacggaaagacttactacagcgatctacccatattgccaccaagactttccaggctcttcgcatatttgtgaacaatgagctcaatgaactctacacgggactgaagacagctcagaagtttctgagacctggtggtcgtcttgttgccctctccttccattcactagaggatcgcatcgtcaaaagatttttgcttggaataagcatgacagaaagatttaacctaagtgttagacaacaagtgatgaaaacatctcaattgggttcagatcacgaaaacacggaagaagtctctatgagaagagctcctttaatgtgggaattgatacacaagaaggtacttagtccacaagatcaggatgtacaagataaccccagagggcgctcagccaagcttagagcagctatcaaattataagttatcatcatcttattcttcaaatttttttctcacaatttctctaatctttactcatgttatgtccctgaatgtcttggtataggtttaagtgtgggacagtctgaaaattgatagcatttagcatttcttttttctcaaaaagaaactgtaggaaatacatgacagagaaagttacactcagggagcagcagcacctccagactggaaaaatgtgttaatctttgcatcatattggactcttgaaggcaatccttcctctggccaggaaattttttaaaaaataatactgtgttgtgtttatctaaatacgtaaactcaagctaccaaagagaaagatgttgtaatcatatctgcatgtcctaaattttgaatttagatattccaatttgcatcagtctttctgtggctcaaataatgatgattatggaatgaattttaatgtccctacttgtgaataattagctttctcaaatgtaggctttttacaaattttaaattttaaaatattagtttaaatgtgtgttatactgataaaatttcatctttcaaattatagtctattattttaaagggatttttcagtatgatatgggccattttgttcatctatcgcaaagtaaaaatgtaaaatccttacagagaattgtttcacaaaacttatatttcatgtcaattgtatttattttaataatagctcacaatgcctttagtaagtaataaagtctcttattagaatcttgtattttttaattgagctaatcaaaataattcagccaagtctatttgaaatagaaaactgtctatttaatatagtaaaatcaatgctcccttaatgttgttacaaagatatggtaactgtaatatgggtaaaagtttattcaagaaaagagtacttggtagaagattctttaacaaattgaggagattgattcataattcacatgtcaattttttatagtaatatgtacttctaatttattatttatacttaaattgtgacctgaaagatgagttggagataattagtcaaagggcacatggagtatggaagggggcatgttgattaaccatacatagaaataaatattctcttagttatccttgaaatcatatttatactattaatttgctcagtgcacttttttcaaatacagaaaaaagattctccattatagttacaaattttaggttggtgaatccaagtgaatgaaatatcagcataactatgtgggcaaaatagatagaattaaatgcatgaattttcctcagacttattttatctgcctctgtaatatttaactttagtacccaggcttgttcactacttctgctttacaggctttatttaaatctgaacaatcctacagggaaatcagaattaggaaaaaaatctggagaacaatatggttgaaatagaaacaagagaatgcacctaggttaattccctgaatcctacttgaacattgtataaatttctctttgcatataatacatatttgtgaatgagacatattcccaaaaaattcttatctctgtatgtgattggaaaagaaaagatcacatttgtatattcaacaatctttcacctatttcataagtcattttttcaccctgtatagtatgggaattattttttatgttaaatagaaactgaatgtactgggttgaatggtgtcctctccaaaattcatgtacttcctggagcctcagtatgtgaccttatttggaaatactgtggttgtggttgtaagtagctaagatgaggtcatactggagcagggcaggcccttaatccaatatgactggtgttccttataagagaagatagggcgggcatggtggctcacgcctgtaatcccagcactgtgggaggccaagccaggcaaatcgcttgaggctgaggagttcaagaccagcctggccaacatggcgaaaacccatctctactaaaaataaaattagccatgcgtggtgcttgtaatgtcagctacccaggagtctgaggcacaagaatcactcgaacctgggaggtggaggttgcgagatcacaccactgcactccagtgtgagcaacagaacgagactctgtctcaaaaaaaaaaaaaaaaaagggaagaaagagaagatagagacacaggggagaatgccacatgaagctggaggcagagattggagtgatacattgtgggaaccctcagaagataggaaaaaagcatggaatagattctccctcagagttccagtagttgccaaccctgctaacatggttttgcacatctagcatccagaacagtgagaatgtatttctgctgttttaaggtacccagttcatggtaatttgttacagcaatcctaggaagctaatactctgacagaaaaaaatcttggataatatgcatgagaaaaatccttcaataaacacaaaattggtttcaaaatgttttcatgtaaaaataaattaacttttctgtaattagattgtgttttatagtaattcttgcctgcttcttagtctttgttgtaggatgcataataaaatacatgaatgagtttt

SEQ ID NO: 1312 - protein, 273 aa, Homo sapiens
MLRYPYFCRMYKECLSCWLESGIPNLGVWPKRIHTTAEKYREYEAREQTDQTQAQELHRSQDRDFETMAKLHIPVMVDEVVHCLSPQKGQIFLDMTFGSGGHTKAILQKESDIVLYALDRDPTAYALAEHLSELYPKQIRAMLGQFSQAEALLMKAGVQPGTFDGVLMDLGCSSMQLDTPERGFSLRKDGPLDVRMDGGRYPDMPTAADVVNALDQQALASILRTYGEEKHAKKIASAIVQARSIYPITRTQQLASIVAEYSETYFPVAQTLY

SEQ ID NO: 1313 - DNA, 495 bp, Homo sapiens
atggagactggtgttctcaaacccagcatagtggtcacttttgcttcagtcaatgttaaaactgaagtaaagtctattgaaatgcaccatgaagctccgagtgaagatcttcctggggataatgtgggcttcaatgtcaaaaatatgcctgttgaagatgttcattgtggcaatgttgctggtgacagcaaaaatgacccaccagtggaaacagctggcctcactgctcaggtgattatcctgaaccaaccaggccaaatcagtgctcactgtgaatctgtactggattgtcacacaactcaaattgcttgcaaggttgctgagctgaaggaaaagattgattgcaattctggtaagaagttggaagatgatcctaaattattaaatgctgatgatgctgccatcctttatatggttcctggcaagcccatgtgtgttgagaacttctctgactggcctcctctgggttgttttgctgtttgtgatatgagatag

SEQ ID NO: 1314 - protein, 164 aa, Homo sapiens [sequence omitted]

SEQ ID NO: 1315 - DNA, 5108 bp, Homo sapiens
gggaaggtgagcggctgcgggacccagcccctcgccgggagcgggcaccatggtgctgtcggtgcctgtgatcgcgctgggcgccacgctgggcacagccaccagcatcctcgcgttgtgcggggtcacctgcctgtgtcggcacatgcaccccaagaaggggctgctgccgcgggaccaggaccccgacctggagaaggcgaagcccagcttgctcgggtctgcacaacagttcaatgttaaaaagtccacggaacctgttcagccccgtgccctcctcaagttcccagacatctatggacccaggccagctgtgacggctccagaggtcatcaactatgcagactattcactgaggtctacggaggagcccactgcacctgccagcccccaacccccgaatgacagtcgcctcaagaggcaggtcacagaggagctgttcatcctccctcagaatggtgtggtggaggatgtctgtgtcatggagacctggaacccagagaaggctgccagttggaaccaggcccccaaactccactactgcctggactatgactgtcagaaggcagaattgtttgtgactcgcctggaagctgtgaccagcaaccacgacggaggctgtgactgctacgtccaagggagtgtggccaataggaccggctctgtggaggctcagacagccctaaagaagcggcagctgcacaccacctgggaggagggcctggtgctccccctggcggaggaggagctccccacagccaccctgacgctgaccttgaggacctgcgaccgcttctcccgtcacagcgtggccggggagctccgcctgggcctggacgggacatctgtgcctctaggggctgcccagtggggcgagctgaagacttcagcgaaggagccatctgcaggagctggagaggtcctactatccatcagctacctcccggctgccaaccgcctcctggtggtgctgattaaagccaagaacctccactctaaccagtccaaggagctcctggggaaggatgtctctgtcaaggtgaccttgaagcaccaggctcggaagctgaagaagaagcagactaaacgagctaagcacaagatcaaccccgtgtggaacgagatgatcatgtttgagctgcctgacgacctgctgcaggcctccagtgtggagctggaagtgctgggccaggacgattcagggcagagctgtgcgcttggccactgcagcctgggcctgcacacctcgggctctgagcgcagccactgggaggagatgctcaaaaaccctcgccggcagattgccatgtggcaccagctgcacctgtaaccagctgcccagctgcctcccttcttggacagccctgacccgtcctctgcaacctcctttctgtgcccctttcctcattctgacacccagaagacagtgacagatgtgtttgcaaggctgggatggctctctcatcatactcttgtttcttagaaataagcaagacagagcaggaaatggaatatgcgggtcacactgaggaatgcattttgctcatctgtgttattgaaggaggtgcttattaaatacagttcctatgcctgttttataggtggggttaggccagatgcagagaaagctaaatgtgggaatcatggatgcaaagaagaatttggctttttgaaaaacaagcatttcaaaaatgatgaaggaagtgaaagtatcctggatcaactcctagagttagagattgcccaggtggaaagaaaccttagccagcgttcaatcaagctcaccatgcagggcagtcacccggcagttctcaaactttagcatgtgaagagtcaccagcagattcctgggctcgcctggagacattcctagtcggtattcctggtcgaagcccaggagccttcctttttaacaagctgatgtagagggtggagcactgtatgtggagaaattccttctacaatattccacacaggtttttggccacagtccttgatggagtcccaaaaccatggtgcagccagttccaatgctggacacctcaaccatcagggtgaaatctggggcctcagctttttaatttaattattttaattcttaatactttaatttgtgcatttcataagccccctgctcttggactgaattttgtgctttttattgaagaattttattgtttttatcttaaaatcagtttctattatccttggggagaccatccctaacaaagtacaggtgggatctcctgtgagtcattggctgggttctgattgctagatgtcacacccaccagcatcaccaaagtgactctgagatagaccggtcccttctcagcgttccagtcacttcaggaggaatttagttattgacttagtctatgacatctggctacatgtaggtagagaagaaagacaattttaaaaaggaaatcaggtcttttgcaactgtgcctccctctgtctgttttcacttgaatgggtaaataaccagcagctaggttttgaattcctaccttgttattctaaacagatgtccacattgttaattaaatctaaattatgagccttgctgagtggatacggtacttacacctgaaccaggattcctgggttctgttgttgacattgcccttcagcacctgtttggccagctgtataagataggactaatgactaggaagcctaccccaatgaatgatatactagatgaaatagtgttcaaaacctgtaggcactctctggctaaaaacaaactctgaggccaccagcagatcatctttaagctaagttactatttttcacctttttttttagacggagttttgctctttgttgcccaggctggagtgcagtggcacgatctcggctcactgcaacctccgcctcccaagttcaagcgattctcctgtctcagcctcctgggtagctgggattacaggtgcccaccaacatgcctggctaatttttgtacttttagtagagatggggtttcaccatgttggccaggctggtcttcaactccagatctcaggtgatctaccctcctcggcctcccaaagtactgggattacaggcctgagccaccgcgcccggcctatttttcactttaatttggcagctgagaatgcccaaaaagtgccagaagcatcgtggcatttccagaaccatggattctgcctttggacccctctctattaatattaaaactctgggccttcagatgtcaccctaatccactgccctaagacagaatttctggacaagatgggtaagggcttcattccttcaacaagtcaagtcatacttggcctctccctgagaatctgagcaggagccttataacctgtggtcattattttttctttctgtacagaaatagaaaagcattagaaataacttctaaccatcctctgaaaaaacagaaaaaatatcgaatccctctttcatgagaagtcttttggataattggaaaccttcatcactgaggttggccagcccctgccaagtgttgtgtaggcaaagcacttgttagtggcttcctatgaaatgttttagagatctcttcaccatactggtttcttctctttggttggtgtgggtaaaagaaaacaaaacatttcctataagctgaaagctgaccagcattctcttcttggtaacatctactactccaacctagaaaatttggattctagaccaaaaatcaggaaacatggctccttataaatctgtgcagctgccttatagtaccatcaaaggaatttcaggtgggctgggcggggccccgatcccagaattatcaactccacccatcatcatttggtcatgaagcatcctttcattcttcttcttcttttttttggggggggcggggcgggggagggatctcaaagttttagtcttccagaatccaaattaaaggttgcccctgatgggggccaggttccgccacagaacatcttagatgtcagccttgacctcacttagcagggattacagaaatgagatacattttgaaggagagttgtctgttatgttcactgtattctaagtgcctgggataaagctgtctcatgggtgctccatatatattcatatatatttgttgagtgaattaatgaattaagagtggctggcagagtaggcagaaaaagacactgcaaatggcataaaaattaaagtcctagctgagttctcaatggtaaaggcatcagatgtcttagcagtcaagctagaaattcatgacaatgagtattactatttgcctaatgacaactcattgctctccatgtaaatgtaatcaacagatgaagagaatataattgctctgcttttccactaaaactccatcttagtgaattttaaattatccagagatgtcaaactgccaaataaaaatatttcagtagtctttgcatcagcttaccttgtaccagaaacatttccaatttactatcaaattatagtaactgagcctgtgtgaagtatctcatcattttcgaaaggaacaccttgtgtgatgccagtgagcatttctaaaaagggtgtgaggtagaggtaaaaataaggtgagagaccatttcagaatgcactgttgctcaaaaaggtgatctggttctttcttcagagatttctacggggatagaaaatcgggagtctgccctcattaatctgtgactccacctcttgcatcaaatcaatatctatttgttgagcacttattgattaagaccttgcatatgtctgtccattttgatttgagatacaactttttgtgtgggttgaatgacaaatcactccaaacaaaactgggcacagagaatcagctaggagaccagttattcagggtccatttctcttggatgtaaaggagtcctgggtaaaatgtggctgtaacctaaaccaactagtccttgtgatttgtttctgccctctgtgtttcctgttgtcaaatgctaagtgtgtgttttgcagtcatgaactaaagcacaaaaagatgcatgagacattgtagtcatatgtctggtgtgacactttggagcaaaaaccttgcagtggtaaataaaaaatttccaacagggaaaaaaaaaaaaaaaaaaaaaaaaaaa

SEQ ID NO: 1316 - protein, 426 aa, Homo sapiens
MVLSVPVIALGATLGTATSILALCGVTCLCRHMHPKKGLLPRDQDPDLEKAKPSLLGSAQQFNVKKSTEPVQPRALLKFPDIYGPRPAVTAPEVINYADYSLRSTEEPTAPASPQPPNDSRLKRQVTEELFILPQNGVVEDVCVMETWNPEKAASWNQAPKLHYCLDYDCQKAELFVTRLEAVTSNHDGGCDCYVQGSVANRTGSVEAQTALKKRQLHTTWEEGLVLPLAEEELPTATLTLTLRTCDRFSRHSVAGELRLGLDGTSVPLGAAQWGELKTSAKEPSAGAGEVLLSISYLPAANRLLVVLIKAKNLHSNQSKELLGKDVSVKVTLKHQARKLKKKQTKRAKHKINPVWNEMIMFELPDDLLQASSVELEVLGQDDSGQSCALGHCSLGLHTSGSERSHWEEMLKNPRRQIAMWHQLHL

SEQ ID NO: 1317 - DNA, 1364 bp, Homo sapiens
aaaatcaggaacttgtgctggccctgcaatgtcaagggagggggctcacccagggctcctgtagctcagggggcaggcctgagccctgcacccgccccacgaccgtccagcccctgacgggcaccccatcctgaggggctctgcattggcccccaccgaggcaggggatctgaccgactcggagcccggctggatgttacaggcgtgcaaaatggaagggtttcccctcgtcccccctccatcagaagacctggtgccctatgacacggatctataccaacgccaaacgcacgagtattacccctatctcagcagtgatggggagagccatagcgaccattactgggacttccacccccaccacgtgcacagcgagttcgagagcttcgccgagaacaacttcacggagctccagagcgtgcagcccccgcagctgcagcagctctaccgccacatggagctggagcagatgcacgtcctcgatacccccatggtgccaccccatcccagtcttggccaccaggtctcctacctgccccggatgtgcctccagtacccatccctgtccccagcccagcccagctcagatgaggaggagggcgagcggcagagccccccactggaggtgtctgacggcgaggcggatggcctggagcccgggcctgggctcctgcctggggagacaggcagcaagaagaagatccgcctgtaccagttcctgttggacctgctccgcagcggcgacatgaaggacagcatctggtgggtggacaaggacaagggcaccttccagttctcgtccaagcacaaggaggcgctggcgcaccgctggggcatccagaagggcaaccgcaagaagatgacctaccagaagatggcgcgcgcgctgcgcaactacggcaagacgggcgaggtcaagaaggtgaagaagaagctcacctaccagttcagcggcgaagtgctgggccgcgggggcctggccgagcggcgccacccgccccactgagcccgcagcccccgccggccccgccaggcctccccgctggccatagcattaagccctcgcccggcccggacacagggaggacgctcccggggcccagaggcaggactgtggcgggccgggctccgtcacccgcccctccccccactccaggccccctccacatcccgcttcgcctccctccaggactccaccccggctcccgacgccagctgggcgtcagacccaccggcaaccttgcagaggacgacccggggtactgccttgggagtctcaagtccgtatgtaaatcagatctcccctctcacccctcccacccattaacctcctcccaaaaaacaagtaaagttattctcaatcc

SEQ ID NO: 1318 - protein, 264 aa, Homo sapiens
MEGFPLVPPPSEDLVPYDTDLYQRQTHEYYPYLSSDGESHSDHYWDFHPHHVHSEFESFAENNFTELQSVQPPQLQQLYRHMELEQMHVLDTPMVPPHPSLGHQVSYLPRMCLQYPSLSPAQPSSDEEEGERQSPPLEVSDGEADGLEPGPGLLPGETGSKKKIRLYQFLLDLLRSGDMKDSIWWVDKDKGTFQFSSKHKEALAHRWGIQKGNRKKMTYQKMARALRNYGKTGEVKKVKKKLTYQFSGEVLGRGGLAERRHPPH

SEQ ID NO: 1319 - DNA, 471 bp, Homo sapiens
atggggcgtggggcgcggagcgatgggggagaggaggccgaagcgggcgagcctgactcccgggtcctgggagccggcccaggtctgatgaggaccagtcggacggggcgagggatcggccgggtccatcacgcccggggcgcgggccccgagggtcctgctggcactcaccgtgcggcggcggcggcggcgatccgggcggccccagccatccagctgcgggctgcgggccggaggggagggtcggtcggaagtgagagagccacacgcaccgcgctcagccaggctgggcagggacggaagcggcggctctgcggggaccgcgatcgaccaggctgcggggcttgcggatctggccgccgcttcccgtccagggccgcagtctgcccgtggccgcacgggggcgcgcccggccgccagaccacgccgcccaggtcgggctgggaggactactgtgcgctcctgctctga

SEQ ID NO: 1320 - protein, 156 aa, Homo sapiens
MGRGARSDGGEEAEAGEPDSRVLGAGPGLMRTSRTGRGIGRVHHARGAGPEGPAGTHRAAAAAAIRAAPAIQLRAAGRRGGSVGSERATRTALSQAGQGRKRRLCGDRDRPGCGACGSGRRFPSRAAVCPWPHGGAPGRQTTPPRSGWEDYCALLL

SEQ ID NO: 1321 - DNA, 2339 bp, Homo sapiens
gccgcccggatcgccgccgccgccgccgcacggtggccttttgtgtttttcagtacgtggcatgcctggatgtccctgccctggctgtggcatggcgggcccaaggctcctcttcctcactgcccttgccctggagctcttgggaagggctgggggttcccagccggccctccggagccgggggactgcgacggcctgtcgcctggacaacaaggaaagcgagtcctggggggctctgctgagcggagagcggctggacacctggatctgctccctcctgggttccctcatggtggggctcagtggggtcttcccgttgcttgtcattcccctagagatggggaccatgctgcgctcagaagctggggcctggcgcctgaagcagctgctcagcttcgccctggggggactcttgggcaatgtgtttctgcatctgctgcccgaagcctgggcctacacgtgcagcgccagccctggtggtgaggggcagagcctgcagcagcagcaacagctggggctgtgggtcattgctggcatcctgaccttcctggcgttggagaagatgttcctggacagcaaggaggaggggaccagccaggcccccaacaaagaccccactgctgctgccgccgcactcaatggaggccactgtctggcccagccggctgcagagcccggcctcggtgccgtggtccggagcatcaaagtcagcggctacctcaacctgctggccaacaccatcgataacttcacccacgggctggctgtggctgccagcttccttgtgagcaagaagatcgggctcctgacaaccatggccatcctcctgcatgagatcccccatgaggtgggcgactttgccatcctgctccgggccggctttgaccgatggagcgcagccaagctgcaactctcaacagcgctggggggcctactgggcgctggcttcgccatctgtacccagtcccccaagggagtagaggagacggcagcctgggtcctgcccttcacctctggcggctttctctacatcgccttggtgaacgtgctccctgacctcttggaagaagaggacccgtggcgctccctgcagcagctgcttctgctctgtgcgggcatcgtggtaatggtgctgttctcgctcttcgtggattaactttccctgatgccgacgcccctgccccctgcagcaataagatgctcggattcactctgtggccgcatatgtgagaggcagagagggcgagtggctgcgagagagaatgagcctcccgccagacaggagggaggtgcgtgtggatgtatgtggtgtgcacatgtggccagaggtgtgtgcgcgagaccgacactgtgatccctgtgctgggtccggggcccagtgtagcgcctgtccccagccatgctgtggttacctctccttgccgccctgtcaccttcacctcctggagtaagcagcgaggaagagcagcactggtcccaagcagaggccttgccctgctgggaccccgggagtgagagcagcccaaggatcccagggtgcagggaactccagagctgcccacctcccactgccccctcagcacacacacagtccccaggcggcctaggggccaaggctggggcggctttggtcccttttcctggcccttccttccccacttctaagccaaagaaaggagaggcaggtgctcctgtaccccagccccactcagcactgacagtccccagctcctagtagtgagctgggaggcgcttcctaagaccctttcctcagggctgccctgggagctcattcctggccaacacgccctggcagcaccagcagctcttgccacctccagctgccaaacagcagcctgccgggcagggagcagccccaggccagagaggcctcccggtccagctcagggatgctcctgccagcacaggggccagggactcctggagcaggcacatagtgagcccgggcagccctgcccagctcaggcccctttccttccccattgaggttggggtaggtgggggcggtgagggctccacgttgtcagcgctcaggaatgtgctccggcagagtgctgaagccataatccccaaccatttcccttggctgacgcccaggtactcagctggcccactccacagccaggcctggccctgcccttcaccgtggatgttttcagaagtggccatcgagaggtctggatggttttatagcaactttgctgtgattccgtttgtatctgtaaatatttgttctatagataagatacaaataaatattatccacataaaaaaaaaaaaaaaaaaaaaaaaaaaaaaaaaaaaaaaaaaaaaaaaaa

SEQ ID NO: 1322 - protein, 364 aa, Homo sapiens
MPGCPCPGCGMAGPRLLFLTALALELLGRAGGSQPALRSRGTATACRLDNKESESWGALLSGERLDTWICSLLGSLMVGLSGVFPLLVIPLEMGTMLRSEAGAWRLKQLLSFALGGLLGNVFLHLLPEAWAYTCSASPGGEGQSLQQQQQLGLWVIAGILTFLALEKMFLDSKEEGTSQAPNKDPTAAAAALNGGHCLAQPAAEPGLGAVVRSIKVSGYLNLLANTIDNFTHGLAVAASFLVSKKIGLLTTMAILLHEIPHEVGDFAILLRAGFDRWSAAKLQLSTALGGLLGAGFAICTQSPKGVEETAAWVLPFTSGGFLYIALVNVLPDLLEEEDPWRSLQQLLLLCAGIVVMVLFSLFVD

SEQ ID NO: 1323 - DNA, 1583 bp, Homo sapiens
gattcgctgctccgcagcacggccggagctggtcgggtcaagagtcgggatttgtggggagaggttttccactggtcaagagaaggctttaagaaagacggtattaatctcccgttgcggctcccgcctggtcccatcttctgcccgctcctccaggaaatgaatctgctgccgaatattgagagtccagtgactcggcaggagaagatggcgaccgtgtgggatgaggccgagcaagatggaattggggaggaggtgctcaagatgtccacggaggagatcatccagcgcacacggctgctggacagtgagatcaagatcatgaagagtgaagtgttgagagtcacccatgagctccaagccatgaaggacaagataaaagagaacagtgagaaaatcaaagtgaacaagaccctgccgtaccttgtctccaacgtcatcgagctcctggatgttgatcctaatgaccaagaggaggatggtgccaatattgacctggactcccagaggaagggcaagtgtgctgtgatcaaaacctctacacgacagacgtacttccttcctgtgattgggttggtggatgctgaaaagctaaagccaggagacctggtgggtgtgaacaaagactcctatctgatcctggagacgctgcccacagagtatgactcgcgggtgaaggccatggaggtagacgagaggcccacggagcaatacagtgacattgggggtttggacaagcagatccaggagctggtggaggccattgtcttgccaatgaaccacaaggagaagtttgagaacttggggatccaacctccaaaaggggtgctgatgtatgggcccccagggacggggaagaccctcctggcccgggcctgtgccgcacagactaaggccaccttcctaaagctggctggcccccagctggtgcagatgttcattggagatggtgccaagctagtccgggatgcctttgccctggccaaggagaaagcgccctctatcatcttcattgatgagttggatgccatcggcaccaagcgctttgacagtgagaaggctggggaccgggaggtgcagaggacaatgctggagcttctgaaccagctggatggcttccagcccaacacccaagttaaggtaattgcagccacaaacagggtggacatcctggaccccgccctcctccgctcgggccgccttgaccgcaagatagagttcccgatgcccaatgaggaggcccgggccagaatcatgcagatccactcccgaaagatgaatgtcagtcctgacgtgaactacgaggagctggcccgctgcacagatgacttcaatggggcccagtgcaaggctgtgtgtgtggaggcgggcatgatcgcactgcgcaggggtgccacggagctcacccacgaggactacatggaaggcatcctggaggtgcaggccaagaagaaagccaacctacaatactacgcctagggcacacaggccagccccagtctcacggctgaagtgcgcaataaaagatggtttagggtccctgccaaaaaaaaaaaaaaaaaaaaaaaaaaaaaaaaaaaaaa

SEQ ID NO: 1324 - protein, 439 aa, Homo sapiens
MNLLPNIESPVTRQEKMATVWDEAEQDGIGEEVLKMSTEEIIQRTRLLDSEIKIMKSEVLRVTHELQAMKDKIKENSEKIKVNKTLPYLVSNVIELLDVDPNDQEEDGANIDLDSQRKGKCAVIKTSTRQTYFLPVIGLVDAEKLKPGDLVGVNKDSYLILETLPTEYDSRVKAMEVDERPTEQYSDIGGLDKQIQELVEAIVLPMNHKEKFENLGIQPPKGVLMYGPPGTGKTLLARACAAQTKATFLKLAGPQLVQMFIGDGAKLVRDAFALAKEKAPSIIFIDELDAIGTKRFDSEKAGDREVQRTMLELLNQLDGFQPNTQVKVIAATNRVDILDPALLRSGRLDRKIEFPMPNEEARARIMQIHSRKMNVSPDVNYEELARCTDDFNGAQCKAVCVEAGMIALRRGATELTHEDYMEGILEVQAKKKANLQYYA

SEQ ID NO: 1325 - DNA, 1664 bp, Homo sapiens
cccaactggcagcgacagctgcagacgggctgaaccagctttgttcccagggtggcgcctgctctccatccaggccccattccggctcccacccgacgctgcttttgttcccacgtttcggggggcagctggcactgtgattcctgccccatgagtgcctagaggcacggagccaccagggatcaccccacgtgggacacagggcttggggaggatggggcaggaccagaccaagcagcagatcgagaaggggctccagctgtaccagtccaaccagacagagaaggcattgcaggtgtggacaaaggtgctggagaagagctcggacctcatggggcgcttccgcgtgctgggctgcctggtcacagcccactcggagatgggccgctacaaggagatgctgaagttcgctgtggtccagatcgacacggcccgggagctggaggatgccgacttcctcctggagagctacctgaacctggcacgcagcaacgagaagctgtgcgagtttcacaagaccatctcctactgcaagacctgccttgggctgcctggtaccagggcaggtgcccagctcggaggccaggtcagcctgagcatgggcaatgccttcctgggcctcagcgtcttccagaaggccctggagagcttcgagaaggccctgcgctatgcccacaacaatgatgacgccatgctcgagtgccgcgtgtgctgcagcctgggcagcttctatgcccaggtcaaggactacgagaaagccctgttcttcccctgcaaggcggcagagcttgtcaacaactatggcaaaggctggagcctgaagtaccgggccatgagccagtaccacatggccgtggcctatcgcctgctgggccgcctgggcagtgccatggagtgttgtgaggagtctatgaagatcgcgctgcagcacggggaccggccactgcaggcgctctgcctgctctgcttcgctgacatccaccggagccgtggggacctggagacagccttccccaggtacgactccgccatgagcatcatgaccgagatcggaaaccgcctggggcaggtgcaggcgctgctgggtgtggccaagtgctgggtggccaggaaggcgctggacaaggctctggatgccatcgagagagcccaggatctggccgaggaggtggggaacaagctgagccagctcaagctgcactgtctgagcgagagcatttaccgcagcaaagggctgcagcgggaactgcgggcgcacgttgtgaggttccacgagtgcgtggaggagacggagctctactgcggcctgtgcggcgagtccataggcgagaagaacagccggctgcaggccctaccttgctcccacatcttccacctcaggtgcctgcagaacaacgggacccggagctgtcccaactgccgccgctcatccatgaagcctggctttgtatgactcctggcagcaggcgtgggcttcctcctcgccactcctgctctttctccactgcacgccagaggcccatttactcctggggcagctgccaggtcgtcctcaccatagccaaggccttggggcctgcccagggctgctcccctgggcccagctcccctccctgcctctttgtactttgctctttatagaaaaataaactgtttgtacctgg

SEQ ID NO: 1326 - protein, 412 aa, Homo sapiens
MGQDQTKQQIEKGLQLYQSNQTEKALQVWTKVLEKSSDLMGRFRVLGCLVTAHSEMGRYKEMLKFAVVQIDTARELEDADFLLESYLNLARSNEKLCEFHKTISYCKTCLGLPGTRAGAQLGGQVSLSMGNAFLGLSVFQKALESFEKALRYAHNNDDAMLECRVCCSLGSFYAQVKDYEKALFFPCKAAELVNNYGKGWSLKYRAMSQYHMAVAYRLLGRLGSAMECCEESMKIALQHGDRPLQALCLLCFADIHRSRGDLETAFPRYDSAMSIMTEIGNRLGQVQALLGVAKCWVARKALDKALDAIERAQDLAEEVGNKLSQLKLHCLSESIYRSKGLQRELRAHVVRFHECVEETELYCGLCGESIGEKNSRLQALPCSHIFHLRCLQNNGTRSCPNCRRSSMKPGFV

SEQ ID NO: 1327 - DNA, 1541 bp, Homo sapiens
cccaactggcagcgacagctgcagacgggctgaaccagctttgttcccagggtggcgcctgctctccatccaggccccattccggctcccacccgacgctgcttttgttcccacgtttcggggggcagctggcactgtgattcctgccccatgagtgcctagaggcacggagccaccagggatcaccccacgtgggacacagggcttggggaggatggggcaggaccagaccaagcagcagatcgagaaggggctccagctgtaccagtccaaccagacagagaaggcattgcaggtgtggacaaaggtgctggagaagagctcggacctcatggggcgcttccgcgtgctgggctgcctggtcacagcccactcggagatgggccgctacaaggagatgctgaagttcgctgtggtccagatcgacacggcccgggagctggaggatgccgacttcctcctggagagctacctgaacctggcacgcagcaacgagaagctgtgcgagtttcacaagaccatctcctactgcaagacctgccttgggctgcctggtaccagggcaggtgcccagctcggaggccaggtcagcctgagcatgggcaatgccttcctgggcctcagcgtcttccagaaggccctggagagcttcgagaaggccctgcgctatgcccacaacaatgatgacgccatgctcgagtgccgcgtgtgctgcagcctgggcagcttctatgcccaggtcaaggactacgagaaagccctgttcttcccctgcaaggcggcagagcttgtcaacaactatggcaaaggctggagcctgaagtaccgggccatgagccagtaccacatggccgtggcctatcgcctgctgggccgcctgggcagtgccatggagtgttgtgaggagtctatgaagatcgcgctgcagcacggggaccggccactgcaggcgctctgcctgctctgcttcgctgacatccaccggagccgtggggacctggagctgagccagctcaagctgcactgtctgagcgagagcatttaccgcagcaaagggctgcagcgggaactgcgggcgcacgttgtgaggttccacgagtgcgtggaggagacggagctctactgcggcctgtgcggcgagtccataggcgagaagaacagccggctgcaggccctaccttgctcccacatcttccacctcaggtgcctgcagaacaacgggacccggagctgtcccaactgccgccgctcatccatgaagcctggctttgtatgactcctggcagcaggcgtgggcttcctcctcgccactcctgctctttctccactgcacgccagaggcccatttactcctggggcagctgccaggtcgtcctcaccatagccaaggccttggggcctgcccagggctgctcccctgggcccagctcccctccctgcctctttgtactttgctctttatagaaaaataaactgtttgtacctggaaaaaaaaaaaaaaaaaaaaaaaaaaaaaaaaaaaaaaaaaaaaaaaaaaaaaa

SEQ ID NO: 1328 - protein, 353 aa, Homo sapiens
MGQDQTKQQIEKGLQLYQSNQTEKALQVWTKVLEKSSDLMGRFRVLGCLVTAHSEMGRYKEMLKFAVVQIDTARELEDADFLLESYLNLARSNEKLCEFHKTISYCKTCLGLPGTRAGAQLGGQVSLSMGNAFLGLSVFQKALESFEKALRYAHNNDDAMLECRVCCSLGSFYAQVKDYEKALFFPCKAAELVNNYGKGWSLKYRAMSQYHMAVAYRLLGRLGSAMECCEESMKIALQHGDRPLQALCLLCFADIHRSRGDLELSQLKLHCLSESIYRSKGLQRELRAHVVRFHECVEETELYCGLCGESIGEKNSRLQALPCSHIFHLRCLQNNGTRSCPNCRRSSMKPGFV

SEQ ID NO: 1329 - DNA, 2024 bp, Homo sapiens
ctcaaagaaaatgaacggcaccctggaccacccagaccaaccagatcttgatgctatcaagatgtttgtgggccaggttccaaggacctggtctgaaaaggacttgcgggaactcttcgaacagtatggtgctgtgtatgaaatcaacgtcctaagggataggagccaaaacccgcctcagagcaaagggtgctgttttgttacattttacacccgtaaagctgcattagaagctcagaatgctcttcacaacatgaaagtcctcccagggatgcatcaccctatacagatgaaacctgctgacagtgagaagaacaatgcagtggaagacaggaagctgtttattggtatgatttccaagaagtgcactgaaaatgacatccgagtcatgttctcttcgtttggacagattgaagaatgccggatattgcggggacctgatggcctgagccgaggttgtgcatttgtgacttttacaacaagagccatggcacagacggctatcaaggcaatgcaccaagcacagaccatggagggttgctcatcacccatggtggtaaaatttgctgatacacagaaggacaaagaacagaagagaatggcccagcagctccagcagcagatgcagcaaatcagcgcagcatctgtgtggggaaaccttgctggtctaaatactcttggaccccagtatttagcactttatttgcagctccttcagcagactgcctcctctgggaacctcaacaccctgagcagcctccacccaatgggagggttgaatgcaatgcagttacagaatttggctgcactagctgctgcagctagtgcagctcagaacacaccaagtggtaccaatgctctcactacatccagcagtcccctcagcgtgctcactagttcagggtcctcacctagctctagcagcagtaattctgtcaaccccatagcctcacttggagccctgcagacattagctggagcaacggctggcctcaatgttggctctttggcaggaatggctgctttaaatggtggcctgggcagcagtggcctttccaatggcaccgggagcaccatggaggccctcactcaggcctactcgggtatccagcaatatgctgctgctgcgctccccactctgtacaaccagaatcttctgacacagcagagtattggtgctgctggaagccagaaggaaggtccagagggagccaacctgttcatctaccacctgccccaggagtttggtgatcaggacctgctgcagatgtttatgccctttgggaatgtcgtgtctgccaaggttttcatagacaagcagacaaacctgagcaagtgttttggttttgtaagttacgacaatcctgtttcggcccaagctgccatccagtccatgaacggctttcagattggcatgaagcggcttaaagtgcagctcaaacgttcgaagaatgacagcaagccctactgagcgtgctcccctctgagactggagtgagagggtcttctgattcctgccgtttgttcatcgttgtgcctaaagcatgtcgatgtggcgtcaagtacatcgtccaaatccctgtctcttcagcttctctgatgcttgaactctcacctttgaccttgtgttgacctttgatgctgatgtgtatttttattatgtttgtttctttcttcgtttttttttctttttttctttcctttttttttccttttgtgctgccaaattggttttgctagaacgactgctgaaggggaaatatttaaacttgcatttgaatataaaaaaaatctatttttctagaacttcataagataaccacttgattttgtgattccaattctttgtaattgtcttcagagcagccctactagcacataccgcgtggtgtttgtatttctgtgaacacacagccagtccgtttctaggctttgtttctctgtgtgcttagttttaaagacaactttgaagtaaacaatgaaataaaagatgtcactaaaacctctgaaaaaaaaaaaaaaaa

SEQ ID NO: 1330 - protein, 486 aa, Homo sapiens
MNGTLDHPDQPDLDAIKMFVGQVPRTWSEKDLRELFEQYGAVYEINVLRDRSQNPPQSKGCCFVTFYTRKAALEAQNALHNMKVLPGMHHPIQMKPADSEKNNAVEDRKLFIGMISKKCTENDIRVMFSSFGQIEECRILRGPDGLSRGCAFVTFTTRAMAQTAIKAMHQAQTMEGCSSPMVVKFADTQKDKEQKRMAQQLQQQMQQISAASVWGNLAGLNTLGPQYLALYLQLLQQTASSGNLNTLSSLHPMGGLNAMQLQNLAALAAAASAAQNTPSGTNALTTSSSPLSVLTSSGSSPSSSSSNSVNPIASLGALQTLAGATAGLNVGSLAGMAALNGGLGSSGLSNGTGSTMEALTQAYSGIQQYAAAALPTLYNQNLLTQQSIGAAGSQKEGPEGANLFIYHLPQEFGDQDLLQMFMPFGNVVSAKVFIDKQTNLSKCFGFVSYDNPVSAQAAIQSMNGFQIGMKRLKVQLKRSKNDSKPY

SEQ ID NO: 1331 - DNA, 2157 bp, Homo sapiens
tggggtgttctgctctggcggcagcggcagcggcggcgggacgcggaggctcccccgggattcggcctcagcagcgaggcggcggcggcggctgcggaggcgcaggcagcaactgaggcagcggcaggctcaggtgcagccgctgctcaaagaaaatgaacggcaccctggaccacccagaccaaccagatcttgatgctatcaagatgtttgtgggccaggttccaaggacctggtctgaaaaggacttgcgggaactcttcgaacagtatggtgctgtgtatgaaatcaacgtcctaagggataggagccaaaacccgcctcagagcaaagggtgctgttttgttacattttacacccgtaaagctgcattagaagctcagaatgctcttcacaacatgaaagtcctcccagggatgcatcaccctatacagatgaaacctgctgacagtgagaagaacaatgcagtggaagacaggaagctgtttattggtatgatttccaagaagtgcactgaaaatgacatccgagtcatgttctcttcgtttggacagattgaagaatgccggatattgcggggacctgatggcctgagccgaggttgtgcatttgtgacttttacaacaagagccatggcacagacggctatcaaggcaatgcaccaagcacagaccatggagggttgctcatcacccatggtggtaaaatttgctgatacacagaaggacaaagaacagaagagaatggcccagcagctccagcagcagatgcagcaaatcagcgcagcatctgtgtggggaaaccttgctggtctaaatactcttggaccccagtatttagcactccttcagcagactgcctcctctgggaacctcaacaccctgagcagcctccacccaatgggagggttgaatgcaatgcagttacagaatttggctgcactagctgctgcagctagtgcagctcagaacacaccaagtggtaccaatgctctcactacatccagcagtcccctcagcgtgctcactagttcagggtcctcacctagctctagcagcagtaattctgtcaaccccatagcctcacttggagccctgcagacattagctggagcaacggctggcctcaatgttggctctttggcaggaatggctgctttaaatggtggcctgggcagcagtggcctttccaatggcaccgggagcaccatggaggccctcactcaggcctactcgggtatccagcaatatgctgctgctgcgctccccactctgtacaaccagaatcttctgacacagcagagtattggtgctgctggaagccagaaggaaggtccagagggagccaacctgttcatctaccacctgccccaggagtttggtgatcaggacctgctgcagatgtttatgccctttgggaatgtcgtgtctgccaaggttttcatagacaagcagacaaacctgagcaagtgttttggttttgtaagttacgacaatcctgtttcggcccaagctgccatccagtccatgaacggctttcagattggcatgaagcggcttaaagtgcagctcaaacgttcgaagaatgacagcaagccctactgagcgtgctcccctctgagactggagtgagagggtcttctgattcctgccgtttgttcatcgttgtgcctaaagcatgtcgatgtggcgtcaagtacatcgtccaaatccctgtctcttcagcttctctgatgcttgaactctcacctttgaccttgtgttgacctttgatgctgatgtgtatttttattatgtttgtttctttcttcgtttttttttctttttttctttcctttttttttccttttgtgctgccaaattggttttgctagaacgactgctgaaggggaaatatttaaacttgcatttgaatataaaaaaaatctatttttctagaacttcataagataaccacttgattttgtgattccaattctttgtaattgtcttcagagcagccctactagcacataccgcgtggtgtttgtatttctgtgaacacacagccagtccgtttctaggctttgtttctctgtgtgcttagttttaaagacaactttgaagtaaacaatgaaataaaagatgtcactaaaacctctgaaaaaaaaaaaaaaaa

SEQ ID NO: 1332 - protein, 482 aa, Homo sapiens
MNGTLDHPDQPDLDAIKMFVGQVPRTWSEKDLRELFEQYGAVYEINVLRDRSQNPPQSKGCCFVTFYTRKAALEAQNALHNMKVLPGMHHPIQMKPADSEKNNAVEDRKLFIGMISKKCTENDIRVMFSSFGQIEECRILRGPDGLSRGCAFVTFTTRAMAQTAIKAMHQAQTMEGCSSPMVVKFADTQKDKEQKRMAQQLQQQMQQISAASVWGNLAGLNTLGPQYLALLQQTASSGNLNTLSSLHPMGGLNAMQLQNLAALAAAASAAQNTPSGTNALTTSSSPLSVLTSSGSSPSSSSSNSVNPIASLGALQTLAGATAGLNVGSLAGMAALNGGLGSSGLSNGTGSTMEALTQAYSGIQQYAAAALPTLYNQNLLTQQSIGAAGSQKEGPEGANLFIYHLPQEFGDQDLLQMFMPFGNVVSAKVFIDKQTNLSKCFGFVSYDNPVSAQAAIQSMNGFQIGMKRLKVQLKRSKNDSKPY

SEQ ID NO: 1333 - DNA, 2206 bp, Homo sapiens
atactttgaaaataacagctcttttttgttccctcgtgtgtctcttcccaattgtatccctattgtattttctcatagtatgtttcagcagaaatcaaggtagacgaagtaacctcttgtcctgaattttcatagttgctcattcttaataatggcagcagaagcaacaatgagagtaactacctcctcagctcaaagaaaatgaacggcaccctggaccacccagaccaaccagatcttgatgctatcaagatgtttgtgggccaggttccaaggacctggtctgaaaaggacttgcgggaactcttcgaacagtatggtgctgtgtatgaaatcaacgtcctaagggataggagccaaaacccgcctcagagcaaagggtgctgttttgttacattttacacccgtaaagctgcattagaagctcagaatgctcttcacaacatgaaagtcctcccagggatgcatcaccctatacagatgaaacctgctgacagtgagaagaacaatgcagtggaagacaggaagctgtttattggtatgatttccaagaagtgcactgaaaatgacatccgagtcatgttctcttcgtttggacagattgaagaatgccggatattgcggggacctgatggcctgagccgaggttgtgcatttgtgacttttacaacaagagccatggcacagacggctatcaaggcaatgcaccaagcacagaccatggagggttgctcatcacccatggtggtaaaatttgctgatacacagaaggacaaagaacagaagagaatggcccagcagctccagcagcagatgcagcaaatcagcgcagcatctgtgtggggaaaccttgctggtctaaatactcttggaccccagtatttagcactccttcagcagactgcctcctctgggaacctcaacaccctgagcagcctccacccaatgggagggttgaatgcaatgcagttacagaatttggctgcactagctgctgcagctagtgcagctcagaacacaccaagtggtaccaatgctctcactacatccagcagtcccctcagcgtgctcactagttcagcagggtcctcacctagctctagcagcagtaattctgtcaaccccatagcctcacttggagccctgcagacattagctggagcaacggctggcctcaatgttggctctttggcaggaatggctgctttaaatggtggcctgggcagcagtggcctttccaatggcaccgggagcaccatggaggccctcactcaggcctactcgggtatccagcaatatgctgctgctgcgctccccactctgtacaaccagaatcttctgacacagcagagtattggtgctgctggaagccagaaggaaggtccagagggagccaacctgttcatctaccacctgccccaggagtttggtgatcaggacctgctgcagatgtttatgccctttgggaatgtcgtgtctgccaaggttttcatagacaagcagacaaacctgagcaagtgttttggttttgtaagttacgacaatcctgtttcggcccaagctgccatccagtccatgaacggctttcagattggcatgaagcggcttaaagtgcagctcaaacgttcgaagaatgacagcaagccctactgagcgtgctcccctctgagactggagtgagagggtcttctgattcctgccgtttgttcatcgttgtgcctaaagcatgtcgatgtggcgtcaagtacatcgtccaaatccctgtctcttcagcttctctgatgcttgaactctcacctttgaccttgtgttgacctttgatgctgatgtgtatttttattatgtttgtttctttcttcgtttttttttctttttttctttcctttttttttccttttgtgctgccaaattggttttgctagaacgactgctgaaggggaaatatttaaacttgcatttgaatataaaaaaaatctatttttctagaacttcataagataaccacttgattttgtgattccaattctttgtaattgtcttcagagcagccctactagcacataccgcgtggtgtttgtatttctgtgaacacacagccagtccgtttctaggctttgtttctctgtgtgcttagttttaaagacaactttgaagtaaacaatgaaataaaagatgtcactaaaacctctgaaaaaaaaaaaaaaaa

SEQ ID NO: 1334 - protein, 483 aa, Homo sapiens
MNGTLDHPDQPDLDAIKMFVGQVPRTWSEKDLRELFEQYGAVYEINVLRDRSQNPPQSKGCCFVTFYTRKAALEAQNALHNMKVLPGMHHPIQMKPADSEKNNAVEDRKLFIGMISKKCTENDIRVMFSSFGQIEECRILRGPDGLSRGCAFVTFTTRAMAQTAIKAMHQAQTMEGCSSPMVVKFADTQKDKEQKRMAQQLQQQMQQISAASVWGNLAGLNTLGPQYLALLQQTASSGNLNTLSSLHPMGGLNAMQLQNLAALAAAASAAQNTPSGTNALTTSSSPLSVLTSSAGSSPSSSSSNSVNPIASLGALQTLAGATAGLNVGSLAGMAALNGGLGSSGLSNGTGSTMEALTQAYSGIQQYAAAALPTLYNQNLLTQQSIGAAGSQKEGPEGANLFIYHLPQEFGDQDLLQMFMPFGNVVSAKVFIDKQTNLSKCFGFVSYDNPVSAQAAIQSMNGFQIGMKRLKVQLKRSKNDSKPY

SEQ ID NO: 1335 - DNA, 2442 bp, Homo sapiens
gtgaaaggagggaacgcaggtgagaaagcgagacaggcaggtagggaaatcgtgaggtgagcgtgatcctagctccttgtggcagagcctagagagaaggcgaggacgctgaagaaccaggcggacagctggcagagagagaagttggctagcatggaatcaccagaggagcctggagcatccatggatgagaactactttgtgaactacactttcaaagatcggtcacattcaggccgtgtggctcaaggcatcatgaaactgtgtctagaggaggagctctttgctgatgtcaccatttcggtggaaggccgggagtttcagctccatcggctggtcctctcagctcagagctgcttcttccgatccatgttcacttccaacctgaaggaggcccacaaccgggtgattgtgctgcaggatgtcagcgagtctgttttccagctcctggttgattatatctaccatgggactgtgaaacttcgagctgaggagttgcaggaaatttatgaggtgtcagacatgtatcagctgacatctctctttgaggaatgctctcggtttttggcccgcacagtgcaagtgggaaactgccttcaggtgatgtggctggcagatcggcacagtgatcctgagctctatacggctgccaagcactgtgccaagacccacctggcccagctgcagaatacagaggaatttctccacttgccccaccgcttactcacagatatcatctcggatggagttccgtgttctcagaacccaacagaggcaatagaagcctggatcaactttaataaagaggaaagagaggcttttgcagagtcactcaggacaagcttgaaggaaattggggagaatgtgcacatttacctgattgggaaagagtcatctcgtacccactcgttggctgtgtccttgcactgtgcagaagatgactccatcagtgtaagtggccaaaacagtttgtgccaccagatcactgcggcctgcaagcatggtggagacttgtatgtggtgggagggtccatcccacggcgcatgtggaagtgcaacaatgccaccgttgactgggagtggtgtgctcctttgcctcgggaccggctccagcacaccctggtgtctgtgcccgggaaagatgccatatattcactgggtggcaagacactgcaagataccctctccaacgcagtcatttattatcgcgtaggtgataatgtgtggacagagacaactcagctagaggtggctgtgtcaggggctgctggtgccaacctcaacgggatcatctacttactagggggggaggagaatgatctggacttctttaccaaaccttcccgactcatccagtgctttgacacagagacagacaaatgccatgtgaagccctatgtgctgccctttgcaggccgcatgcacgcagctgtgcataaagatctggtgttcatcgtggctgaaggggactccctggtgtgctacaatcccttgctagacagcttcacccggctttgccttcctgaggcctggagctctgccccatccctctggaagattgccagctgtaacgggagcatctatgtcttccgggaccgatataaaaagggggatgccaacacctacaagcttgaccctgccacttcagccataactgtcacaagaggtattaaggtgctgcttaccaatttgcagtttgtgttggcctaaggctgtggggaggggaggagaactgctcactccttttccctccccatacaaactcaaagtcccctgggccccaattcagagttatgttttttttggcacatactagaaaggcagtgcctcagcccttccctgaatccatggaggtgttctgtttggggctttttagactgctgctgctcagctggttgcttgaactgacagtaggccagcctgttctctgccattccctagtcatcctgtgcctcaccacagcttgcttagagcaagccttttctcagaccttaggcacagcctctcctctttacctgatcaatgttaaatgtaagcacccctgatcccaggacataaggaaagatgcccaattgtacttttgttctatagcctgtgaaatggctagttgatcatttttccacaaagaattaggtgttaagagttttccttcaggctttacttaggagaatggactaagctgaaggtgtacttcaccagcaagagtcaactctagaattcaggatgttccttctattgttttcttagccatctgtcaggaaatgtaactttggttttatttttggcttattccaaggggtaagccagaaaatagaaatgattatttctgattaatagcagaaactttttcaatctcaaatatataaggtgtctgctcttttaaaagctctaagctaagtcaagagctaggaactgttgatacaaataaaagtttttgaaggg

SEQ ID NO: 1336 - protein, 518 aa, Homo sapiens
MESPEEPGASMDENYFVNYTFKDRSHSGRVAQGIMKLCLEEELFADVTISVEGREFQLHRLVLSAQSCFFRSMFTSNLKEAHNRVIVLQDVSESVFQLLVDYIYHGTVKLRAEELQEIYEVSDMYQLTSLFEECSRFLARTVQVGNCLQVMWLADRHSDPELYTAAKHCAKTHLAQLQNTEEFLHLPHRLLTDIISDGVPCSQNPTEAIEAWINFNKEEREAFAESLRTSLKEIGENVHIYLIGKESSRTHSLAVSLHCAEDDSISVSGQNSLCHQITAACKHGGDLYVVGGSIPRRMWKCNNATVDWEWCAPLPRDRLQHTLVSVPGKDAIYSLGGKTLQDTLSNAVIYYRVGDNVWTETTQLEVAVSGAAGANLNGIIYLLGGEENDLDFFTKPSRLIQCFDTETDKCHVKPYVLPFAGRMHAAVHKDLVFIVAEGDSLVCYNPLLDSFTRLCLPEAWSSAPSLWKIASCNGSIYVFRDRYKKGDANTYKLDPATSAITVTRGIKVLLTNLQFVLA

SEQ ID NO: 1337 - DNA, 2355 bp, Homo sapiens
agcggaggttccgggctccgggatgaaaggagggaacgcagctggcagagagagaagttggctagcatggaatcaccagaggagcctggagcatccatggatgagaactactttgtgaactacactttcaaagatcggtcacattcaggccgtgtggctcaaggcatcatgaaactgtgtctagaggaggagctctttgctgatgtcaccatttcggtggaaggccgggagtttcagctccatcggctggtcctctcagctcagagctgcttcttccgatccatgttcacttccaacctgaaggaggcccacaaccgggtgattgtgctgcaggatgtcagcgagtctgttttccagctcctggttgattatatctaccatgggactgtgaaacttcgagctgaggagttgcaggaaatttatgaggtgtcagacatgtatcagctgacatctctctttgaggaatgctctcggtttttggcccgcacagtgcaagtgggaaactgccttcaggtgatgtggctggcagatcggcacagtgatcctgagctctatacggctgccaagcactgtgccaagacccacctggcccagctgcagaatacagaggaatttctccacttgccccaccgcttactcacagatatcacctcggatggagttccgtgttctcagaacccaacagaggcaatagaagcctggatcaactttaataaagaggaaagagaggcttttgcagagtcactcaggacaagcttgaaggaaattggggagaatgtgcacatttacctgattgggaaagagtcatctcgtacccactcgttgggtgtgtccttgcactgtgcagaagatgactccatcagtgtaagtggccaaaacagtttgtgccaccagatcactgcggcctgcaagcatggtggagacttgtatgtggtgggagggtccatcccacggcgcatgtggaagtgcaacaatgccaccgttgactgggagtggtgtgctcctttgcctcgggaccggctccagcacaccctggtgtctgtgcccgggaaagatgccatatattcactgggtggcaagacactgcaagataccctctccaacgcagtcatttattatcgcgtaggtgataatgtgtggacagagacaactcagctagaggtggctgtgtcaggggctgctggtgccaacctcaacgggatcatctacttactagggggggaggagaatgatctggacttctttaccaaaccttcccgactcatccagtgctttgacacagagacagacaaatgccatgtgaagccctatgtgctgccctttgcaggccgcatgcacgcagctgtgcataaagatctggtgttcatcgtggctgaaggggactccctggtgcgctacaatcccttgctagacagcttcacccggctttgccttcctgaggcctggagctctgccccatccctctggaagattgccagctgtaacgggagcatctatgtcttccgggaccgatataaaaagggggatgccaacacctacaagcttgaccctgccacttcagccataactgtcacaagaggtattaaggtgctgcttaccaatttgcagtttgtgttggcctaaggctgtggggaggggaggagaactgctcactccttttccctccccatacaaactcaaagtcccctgggccccaattcagagttatgttttttttggcacatactagaaaggcagtgcctcagcccttccctgaatccatggaggtgttctgtttggggctttttagactgctgctgctcagctggttgcttgaactgacagtaggccagcctgttctctgccattccctagtcatcctgtgcctcaccacagcttgcttagagcaagccttttctcagaccttaggcacagcctctcctctttacctgatcaatgttaaatgtaagcacccctgatcccaggacataaggaaagatgcccaattgtacttttgttctatagcctgtgaaatggctagttgatcatttttccacaaagaattaggtgttaagagttttccttcaggctttacttaggagaatggactaagctgaaggtgtacttcaccagcaagagtcaactctagaattcaggatgttccttctattgttttcttagccatctgtcaggaaatgtaactttggttttatttttggcttattccaaggggtaagccagaaaatagaaatgattatttctgattaatagcagaaactttttcaatctcaaatatataaggtgtctgctcttttaaaagctctaagctaagtcaagagctaggaactgttgatacaaataaaagtttttgaaggg

SEQ ID NO: 1338 - protein, 518 aa, Homo sapiens
MESPEEPGASMDENYFVNYTFKDRSHSGRVAQGIMKLCLEEELFADVTISVEGREFQLHRLVLSAQSCFFRSMFTSNLKEAHNRVIVLQDVSESVFQLLVDYIYHGTVKLRAEELQEIYEVSDMYQLTSLFEECSRFLARTVQVGNCLQVMWLADRHSDPELYTAAKHCAKTHLAQLQNTEEFLHLPHRLLTDITSDGVPCSQNPTEAIEAWINFNKEEREAFAESLRTSLKEIGENVHIYLIGKESSRTHSLGVSLHCAEDDSISVSGQNSLCHQITAACKHGGDLYVVGGSIPRRMWKCNNATVDWEWCAPLPRDRLQHTLVSVPGKDAIYSLGGKTLQDTLSNAVIYYRVGDNVWTETTQLEVAVSGAAGANLNGIIYLLGGEENDLDFFTKPSRLIQCFDTETDKCHVKPYVLPFAGRMHAAVHKDLVFIVAEGDSLVRYNPLLDSFTRLCLPEAWSSAPSLWKIASCNGSIYVFRDRYKKGDANTYKLDPATSAITVTRGIKVLLTNLQFVLA

SEQ ID NO: 1339 - DNA, 899 bp, Homo sapiens
catctgagtaacatggcggcggcggcggtagccaggctgtggtggcgcgggatcttgggggcctcggcgctgaccagggggactgggcgaccctccgttctgttgctgccggtgaggcgggagagcgccggggccgacacgcgccccactgtcagaccacggaatgatgtggcccacaagcagctctcagcttttggagagtatgtggctgaaatcttgcccaagtatgtccaacaagttcaggtgtcctgcttcaatgagttagaggtctgtatccatcctgatggcgtcatcccagtgctgactttcctcagggatcacaccaatgcacagttcaaatctctggttgacttgacagcagtggacgtcccaactcggcaaaaccgttttgagattgtctacaacctgttgtctctgcgcttcaactcacggatccgtgtgaagacctacacagatgagctgacgcccattgagtctgctgtctctgtgttcaaggcagccaactggtatgaaagggagatctgggacatgtttggagtcttctttgctaaccaccctgatctaagaaggatcctgacagattatggcttcgagggacatcctttccggaaagactttcctctatctggctatgttgagttacgttatgatgatgaagtgaagcgggtggtggcagagccggtggagttggcccaagagttccgcaaatttgacctgaacagcccctgggaggctttcccagtctatcgccaacccccggagagtctcaagcttgaagccggagacaagaagcctgatgccaagtagctccagggaacgcatgtggatcctagacagcgccttatctatgattgagtgtccgtgtaaataaattcctacttagacttaaaaaaaaaaaa

SEQ ID NO: 1340 - protein, 264 aa, Homo sapiens
MAAAAVARLWWRGILGASALTRGTGRPSVLLLPVRRESAGADTRPTVRPRNDVAHKQLSAFGEYVAEILPKYVQQVQVSCFNELEVCIHPDGVIPVLTFLRDHTNAQFKSLVDLTAVDVPTRQNRFEIVYNLLSLRFNSRIRVKTYTDELTPIESAVSVFKAANWYEREIWDMFGVFFANHPDLRRILTDYGFEGHPFRKDFPLSGYVELRYDDEVKRVVAEPVELAQEFRKFDLNSPWEAFPVYRQPPESLKLEAGDKKPDAK

SEQ ID NO: 1341 - DNA, 1435 bp, Homo sapiens
atgacacgcattacagagctctggagcagcccgcagtggaaagttggagctgaggtgtgtggcaggcagatgagggagcagagaactgctgaacagagtgagactcagaggacgtggttgagcatggctgcgaccctgcagttcctggtttgcctggtggtagccatttgtctcctctctggtgtgactacaacccagccccatgcagggcagcccatggacagcaccagcgtgggaggtggcctgcaggagccagaggccccggaagtgatgtttgagctgctctgggctgggctggagctggatgtcatggggcagctgcacatccaggatgaggaactagcgtccacacacccaggccgccgactcagactcctcctgcagcaccacgtgcccagtgacttggagggcactgagcagtggctgcagcagctccaggacctgcggaaggggcctcctcttagcacttgggactttgaacatctgctcctcacaggcctgtcctgcgtctaccggctccacgcagctagtgaggctgaggaacggggccgctgggcccaggtcttcgctctcctggcacaggaaacactctgggacctgtgcaaaggtttctgcccccaggaccggcccccttccctggggtcctgggcctccatccttgaccccttcccctgaccctcctcttttgttctttcacctgccattaccccctcccatctcctcctcaaccccccaggcagacccatcttgcgcaggggcttctgtctggcatctgattcttttcaccgtgttcagatctctgggcttggcttgcaccctggacaccccctctctgcttaccccgaccagatcttgtttcctagatcttgagaggctaagaacccaggctctgggtcgcaaggagtgcgcaaggagtgggcacagagctaagggcacgacttgcaggcagtgtgtgtgtgagtgtgtgtgtgtgtgtgtgtgtgtgtgtgtgtgtgtggagatcaggggtcagggttgagaagtgtgttcaagagatgctgaagggaagctgccccaagtaaggcctggtcagaccttccaactcctaccctggcagtctgtgacaggtcctgtggaattcacaggaatcctctaggtgctgagcatccccttttaggcacaaccaaggatttggggtctctgagcctccaagttcccatctgggttgggagaatcgactttttgagttctgtcagttggaagagtggagggaagcagggggagggaggaacattatctcttttggggtagggaggcaatatctcaacaagcgtcgggtgaatacctcagaggggggagtaaggctgggagaccaaggagagacaagcggaggtgggctggagcaggtgtggccctgattctgtgttgctcttctcataaaatgttctgtttcggc

SEQ ID NO: 1342 - protein, 224 aa, Homo sapiens
MTRITELWSSPQWKVGAEVCGRQMREQRTAEQSETQRTWLSMAATLQFLVCLVVAICLLSGVTTTQPHAGQPMDSTSVGGGLQEPEAPEVMFELLWAGLELDVMGQLHIQDEELASTHPGRRLRLLLQHHVPSDLEGTEQWLQQLQDLRKGPPLSTWDFEHLLLTGLSCVYRLHAASEAEERGRWAQVFALLAQETLWDLCKGFCPQDRPPSLGSWASILDPFP

SEQ ID NO: 1343 - DNA, 1393 bp, Homo sapiens
gaattcggcacgaggcgcccggcccctggccccagcaccctgtccgctgccgcctcagagccgggaaaagcagccggagcccccgccgcccctgccgcagcgcgggcggtcagcgcgcagcccggcacccgcagcctgcagcctgcagcccgcagcccgcagcccggagccagatcgcgggctcagaccgaacccgactcgaccgccgcccccagccaggcgccatgctgccgcttctgctgggcctgctgggcccagcggcctgctgggccctgggcccgacccccggcccgggatcctctgagctgcgctcggccttctcggcggcacgcaccacccccctggagggcacgtcggagatggcggtgaccttcgacaaggtgtacgtgaacatcgggggcgacttcgatgtggccaccggccagtttcgctgccgcgtgcccggcgcctacttcttctccttcacggctggcaaggccccgcacaagagcctgtcggtgatgctggtgcgaaaccgcgacgaggtgcaggcgctggccttcgacgagcagcggcggccaggcgcgcggcgcgcagccagccagagcgccatgctgcagctcgactacggcgacacagtgtggctgcggctgcatggcgccccgcactacgcgctaggcgcgcccggcgccaccttcagcggctacctagtctacgccgacgccgacgctgacgcgcctgcgcgcgggccgcccgcgccccccgagccgcgctcggccttctcggcggcgcgcacgcgcagcttggtgggctcggacgctggccccgggccgcggcaccaaccactcgccttcgacaccgagttcgtcaacattggcggcgacttcgacgcggcggccggcgtgttccgctgccgtctgcccggcgcctacttcttctccttcacgctgggcaagctgccgcgtaagacgctgtcggttaagctgatgaagaaccgcgacgaggtgcaggccatgatttacgacgacggcgcgtcgcggcgccgcgagatgcagagccagagcgtgatgctggccctgcggcgcggcgacgccgtctggctgctcagccacgaccacgacggctacggcgcctacagcaaccacggcaagtacatcaccttctccggcttcctggtgtaccccgacctcgcccccgccgccccgccgggcctcggggcctcggagctactgtgagccccgggccagagaagagcccgggagggccaggggcgtgcatgccaggccgggcccgaggctcgaaagtcccgcgcgagcgccacggcctccgggcgcgcctggactctgccaataaagcggaaagcgggcacgcgcagcgcccggcagcccaggcaaaaaaaaaaaaaaaaaaaaaa

SEQ ID NO: 1344 - protein, 329 aa, Homo sapiens
MLPLLLGLLGPAACWALGPTPGPGSSELRSAFSAARTTPLEGTSEMAVTFDKVYVNIGGDFDVATGQFRCRVPGAYFFSFTAGKAPHKSLSVMLVRNRDEVQALAFDEQRRPGARRAASQSAMLQLDYGDTVWLRLHGAPHYALGAPGATFSGYLVYADADADAPARGPPAPPEPRSAFSAARTRSLVGSDAGPGPRHQPLAFDTEFVNIGGDFDAAAGVFRCRLPGAYFFSFTLGKLPRKTLSVKLMKNRDEVQAMIYDDGASRRREMQSQSVMLALRRGDAVWLLSHDHDGYGAYSNHGKYITFSGFLVYPDLAPAAPPGLGASELL

SEQ ID NO: 1345 - DNA, 2524 bp, Homo sapiens
tcgcttggtggctccgtctgtctgtccgtccgcccgcgggtgccatcatggcggacgcggccagtcaggtgctcctgggctccggtctcaccatcctgtcccagccgctcatgtacgtgaaagtgctcatccaggtgggatatgagcctcttcctccaacaataggacgaaatatttttgggcggcaagtgtgtcagcttcctggtctctttagttatgctcagcacattgccagtatcgatgggaggcgcgggttgttcacaggcttaactccaagactgtgttcgggagtccttggaactgtggtccatggtaaagttttacagcattaccaggagagtgacaagggtgaggagttaggacctggaaatgtacagaaagaagtctcatcttcctttgaccacgttatcaaggagacaactcgagagatgatcgctcgttctgctgctaccctcatcacacatcccttccatgtgatcactctgagatctatggtacagttcattggcagagaatccaagtactgtggactttgtgattccataataaccatctatcgggaagagggcattctaggatttttcgcgggtcttgttcctcgccttctaggtgacatcctttctttgtggctgtgtaactcactggcctacctcgtcaatacctatgcactggacagtggggtttctaccatgaatgaaatgaagagttattctcaagctgtcacaggattttttgcgagtatgttgacctatccctttgtgcttgtctccaatcttatggctgtcaacaactgtggtcttgctggtggatgccctccttactccccaatatatacgtcttggatagactgttggtgcatgctacaaaaagaggggaatatgagccgaggaaatagcttatttttccggaaggtcccctttgggaagacttattgttgtgacctgaaaatgttaatttgaagatgtggggcagggacagtgacatttctgtagtcccagatgcacagaattatgggagagaatgttgatttctatacagtgtggcgcgcttttttaataatcatttaatcttgggaaaattcaggtgtttggtgtctgccttttttgttcttttttccagcacaacataacttaccactgatactccccctttagttattctgaattaggatatttttgctccaaattcttattttacttaaccagaagggaaaaaaagttgtattttcctgaagctacaggcactttgtcatgtgatttttgagtctcaatttaaggctttgtaaaatgaagagtagaattccaagaaaaatgagaaataattttgtaaaacttaacaaaatcactaaattaaactatatgggaggttatgaattactttttcttgggtagaccctaaaatgtcagtagcatgcaccagaatctgactcccattatgcttctaagcacatttcattgaccttgtctctcatacttcaagaaaaggacagtacattgctacattaccctagaaagtctgtgtgaggatctgccccttcagtctgttattgcaaagtaataaaatgtcacctacagggagcctctgagcctactctagttcaagaggctacctgaaaaaaaataaataagataaagggtcagcaacaacaaagaaaaagacaattacagaaaataagcaagatttggaaaggaagtataatggcacttttttcctcaaaggaagttcttgttttcctcaaaggaagttcttgttttcacataaaatatgaaaagcagatcctgcaggagtaacccccttctttaagagccaagtatttgccagtgcttaaattacaccataccgttctaattatatataatcttttgttcttcagttttttgttttgtttcctttttgttattgttgccgaaggtgagtagttttgcatttctgatgacagccttggaaagtatatttgtaactccatgtctggtaatgccaacccaagtcgacatgggtcttaggacactgaccacctcacatgccataccctcagttaagcatgttaacatttataggaggaaaaaaatcactttgggagaaaataaaattcaactcaagcataaagcttctgtttactcaggccttctaaaaagcaggttaaaatgctctaaaatgagaaagcctgtggtttcacttatttatataactcactgggacattgccaaatgagtaagcacttaattcgctgcttctgagacttctctgtcaaaacagccccactgataatattagacagaacgagaatgcaggggtctcttccctcccctggggtttaggaagctcatgaggagctcggcttaaaatgtctttgatgtctcttcctttgtctcaaaaagtaatgtcaattttatatactatttcaatattactatctgcatttgttttaatataaaaatgtttgctgcctacctttttctcccaaaaaatctttaagtaaagatgatctgggaaaatgtaaaaaaaaaaaaaaaaataaaaaaaa

SEQ ID NO: 1346 - protein, 303 aa, Homo sapiens
MADAASQVLLGSGLTILSQPLMYVKVLIQVGYEPLPPTIGRNIFGRQVCQLPGLFSYAQHIASIDGRRGLFTGLTPRLCSGVLGTVVHGKVLQHYQESDKGEELGPGNVQKEVSSSFDHVIKETTREMIARSAATLITHPFHVITLRSMVQFIGRESKYCGLCDSIITIYREEGILGFFAGLVPRLLGDILSLWLCNSLAYLVNTYALDSGVSTMNEMKSYSQAVTGFFASMLTYPFVLVSNLMAVNNCGLAGGCPPYSPIYTSWIDCWCMLQKEGNMSRGNSLFFRKVPFGKTYCCDLKMLI

SEQ ID NO: 1347 - DNA, 3411 bp, Homo sapiens
cttctcttgtgtaatcagctgcctatttggaaattgggcagggtttgcgactggatgctaatgtcactgactagttttcagcctaccatccagaagtaacatgttcccagctttggaaacgcacctaaagcagactattcctgatccttatgaagactttatgtaccgtcacctccaatattatggctactttaaagctcagagaggcagtttaccaaactctgctacgcatcagcatgttcggaagaataaccctcaatgcctgttgaatggctctcttggggaaaaagatgatttgataccagacaccctgcaaaaggagaagcttctatggcctatcagtttatcttcagctgtgcacagacagatagaagccatcaacagagactttcactcttgcctgggctggatgcagtggcgcggcctcagctcactgcaacctccacctcccagattcaaggattctcctgcctcagctttccgagtagctgggattacagattcacatatgctgagtttaccacatcttaggagcagacagcttctttatgatgagttggatgaagtaaacccacgtcttcgagaaccccaagagctcttttccattttgtctaccaagaggccactgcaggctccaagatggccaattgaatgtgaggtcatcaaggaaaacatccatcatattgagtgggctccacctcaaccagaatatttctatcagcctaaaggaaatgaaaaggtaccagagattgtaggagagaaaaaaggaacagttgtctatcaattagattcagtgcctatagaaggttcctattttaccagttccagagtgggaggcaaacgaggaattgtcaaggaacttgctgtcacgttgcaaggaccagaagataatactctactgtttgaatcaaggtttgagagtgggaatctgcaaaaagctgtcagagtagacacctatgagtatgaactcaccttgcgaactgacctctacactaacaaacacactcagtggttttattttcgtgttcagaacaccagaaaagatgctacctatcgcttcaccattgtcaacttgctaaaacccaagagtctttatactgtagggatgaagccactcttgtactcccaattggatgccaacacccgcaatattggctggaggagagaaggaaatgaaatcaagtactacaagaacaacacggatgatgggcagcagcccttctactgtctcacgtggaccattcagtttccatatgaccaggacacttgcttctttgcacacttctacccatatacatacactgatttgcaatgctacctcctgtcagtggcaaacaaccctatccagtctcagttctgcaagctccaaactttatgcaggagcctagcaggaaataccgtttacttgctcaccatcaccaacccatcccagacccctcaagaggcagctgcaaagaaagctgtggtcttgagtgccagagttcaccctggagaaagtaatggctcctgggttatgaaaggctttttggacttcatccttagcaactccccagatgcccagctcctcagagatatttttgtcttcaaggtgcttcccatgttaaatccagatggtgtgattgtggggaattatcggtgttccttggccggaagggatttgaacaggcattataaaaccattctgaaggagtctttcccttgtatttggtacaccaggaacatgatcaaaagacttcttgaagaaagagaggttctgttgtattgtgatttccatggccacagtcgtaagaataatatcttcctgtatggctgtaataacaacaatcgcaaatactggcttcatgaacgagtctttcctttaatgttatgcaaaaatgcaccagataagttctcttttcacagttgtaattttaaggtccaaaaatgcaaagaaggaacaggacgagttgttatgtggcggatgggaatcctaaacagctacaccatggagtctacctttggcgggtccaccctgggtaataaaagagacacccactttaccatcgaagatctgaagtccttaggttatcatgtctgtgacacccttctggacttttgtgatcctgaccaaatgaagttcactcagtgtctagcagagcttaaggagcttttacgacaggaaatccacaagaaattccatgaacttggacaagatgtagatttagaaggaagttggagtgacatctctttgtctgacattgaatccagcaccagtggctctgacagttctctctcagatggtcttcctgttcacctagcaaacatagcagatgagctgactcagaaaaagaagatgtttaagaagaaaaaaaagaagtcacttcagactaggaaacagcgaaatgagcagtatcagaaaaaaaatttgatgcagaagttaaagttaacagaagatacctcagaaaaggcaggatttgcttctactctgcaaaagcagccaacctttttcaaaaactcagagaattccagttttttaccaatgaaaaatgaaaacccaaggttaaatgagacaaatttaaatagaagagacaaagacacccccctggacccatcaatggccaccctgattctgcctaagaataaagggagaatgcagaataagaagccaggctttacagtatcatgctctccaaagagaaccataaactccagccaagagccagctccaggtatgaagccaaactggcctaggagcagatatcctgccacaaagagaggctgtgctgccatggcggcatacccatccttgcacatatacacatacccgtaggtgagcctgggctgtgccacacaagcacttcatcgggggttttgagattagacacattttataatgggggagatgtatgactgggaactgcatttacttgtggtatactgtgttgtgcactcatgcactgaccttacactttgtacttacactgtgggcatgtggtcaagatgcatacctcatgaattcaactattttttcataaaatgaaattttattatgatgtgtaaaaatgctttatcagaaactgaagtgtgttctcatggcacacttcatggcagcacagatatacctcattttaaccaatagatattctctctaaaattatgtgcaaatcaatttttaaaaatcaaaatctatgttaaacacattttggcagtgtgctataataaaaaaaagtgttgtgtcaaagctttctagtgacggtcagtcctactgctgtatgtcaggtttgctcacaatgaggtattcccacatagaaataacaatgcatgtattacccagaatttaatgttgcgtaccttatgttcaatgaggttttgtaatttttttaggctgatgattaaaattctttctctctaaaaaaaaaaaaaaaaaaaaaa

SEQ ID NO: 1348 - protein, 902 aa, Homo sapiens
MFPALETHLKQTIPDPYEDFMYRHLQYYGYFKAQRGSLPNSATHQHVRKNNPQCLLNGSLGEKDDLIPDTLQKEKLLWPISLSSAVHRQIEAINRDFHSCLGWMQWRGLSSLQPPPPRFKDSPASAFRVAGITDSHMLSLPHLRSRQLLYDELDEVNPRLREPQELFSILSTKRPLQAPRWPIECEVIKENIHHIEWAPPQPEYFYQPKGNEKVPEIVGEKKGTVVYQLDSVPIEGSYFTSSRVGGKRGIVKELAVTLQGPEDNTLLFESRFESGNLQKAVRVDTYEYELTLRTDLYTNKHTQWFYFRVQNTRKDATYRFTIVNLLKPKSLYTVGMKPLLYSQLDANTRNIGWRREGNEIKYYKNNTDDGQQPFYCLTWTIQFPYDQDTCFFAHFYPYTYTDLQCYLLSVANNPIQSQFCKLQTLCRSLAGNTVYLLTITNPSQTPQEAAAKKAVVLSARVHPGESNGSWVMKGFLDFILSNSPDAQLLRDIFVFKVLPMLNPDGVIVGNYRCSLAGRDLNRHYKTILKESFPCIWYTRNMIKRLLEEREVLLYCDFHGHSRKNNIFLYGCNNNNRKYWLHERVFPLMLCKNAPDKFSFHSCNFKVQKCKEGTGRVVMWRMGILNSYTMESTFGGSTLGNKRDTHFTIEDLKSLGYHVCDTLLDFCDPDQMKFTQCLAELKELLRQEIHKKFHELGQDVDLEGSWSDISLSDIESSTSGSDSSLSDGLPVHLANIADELTQKKKMFKKKKKKSLQTRKQRNEQYQKKNLMQKLKLTEDTSEKAGFASTLQKQPTFFKNSENSSFLPMKNENPRLNETNLNRRDKDTPLDPSMATLILPKNKGRMQNKKPGFTVSCSPKRTINSSQEPAPGMKPNWPRSRYPATKRGCAAMAAYPSLHIYTYP

SEQ ID NO: 1349 - DNA, 3995 bp, Homo sapiens
cgctctctgctcgcgcttgggctcgcgatggggaagaagtcccgggcggtacccggccgtaggcccatcctgcaactctctccgccgggtcctcggggcagcacgccgggccgggacccggagccggaacccgacactgagccggactcaaccgcggcggtccccagccagcccgccccgtcggcggcgacgaccaccgcggtgactgccgccgcggcctcggacgactcgccttcagaagatgaacaggaagcggtgcaggaggttcctagagttgttcagaatcctccaaaaccagtcatgaccactagacccacagctgttaaagcaacaggcggtctatgcttgcttggtgcttatgctgacagtgatgacgatgacaatgatgtttccgaaaaactagcacaatccaaagagacaaatggaaaccagtcaactgatattgatagtacattggccaacttcctagcggagatcgatgccataacagctcctcagcctgcagctcctgtaggagcttctgctccacctccaactccacctcgaccagagccaaaggaagcagcaacatctaccctttcttcttctacttcaaatggaacagactccacccaaacatctggttggcaatatgatactcagtgttcactggcaggagtcggaattgagatgggcgattggcaggaagtctgggatgagaacacgggatgttattattattggaatacacaaacaaatgaagtgacttgggagttaccccaatatcttgccacacaggtacagggattacagcattaccagcccagttctgtgccaggtgctgaaactagttttgtggtaaatacagacatatattctaaggagaaaacgatttctgtttccagtagtaaaagtggaccagtcatagccaagcgagaagttaaaaaggaagtaaatgaaggaattcaggctctctcaaatagtgaggaggagaagaaaggggtggcagcatcgctgcttgctcctttattgcctgagggaataaaagaagaagaagagagatggagaagaaaagtaatttgtaaagaggagccagtttcagaagtaaaagaaacaagtacaacagtagaagaagcaacaacaatagtaaagccacaggaaattatgttggacaatatagaagacccttctcaggaggatctttgcagtgttgtccaatctggagaaagtgaggaggaagaggaacaagatacccttgaactggagctagttttggaaaggaaaaaagcagagttgcgagccttggaggaaggagatggtagtgtgtcagggtctagtccacgttctgatatcagccagccagcatctcaagatggaatgcgtaggcttatgtctaaaagaggaaaatggaagatgtttgttcgagctaccagtccagaatctaccagtaggagttctagtaaaactggacgagatactccagaaaatggagaaactgcaattggtgctgaaaattcagaaaaaatagatgagaattcagataaagagatggaagtagaagaatctccagagaaaataaaagtacagacaacaccaaaagtagaagaagaacaggatttgaaatttcagattggagaactggcaaataccctgacaagtaaattcgagtttctaggcattaatagacaatccatctccaactttcatgtgctgctcttacagactgagactcgaattgcagactggcgggaaggggctcttaatggaaactaccttaaacgaaaacttcaggatgcagcagaacaactaaaacagtatgaaataaacgccactcctaaaggctggtcctgccactgggacagggatcatagacggtatttctatgtaaacgaacagtcgggcgagtctcagtgggagtttccagatggtgaagaggaagaagaagaaagccaagcacaagaaaatagagatgagactcttgccaaacagaccttgaaagacaaaactggcactgattcaaattcaacagaatcctctgaaacttccacaggttctctttgtaaagaatccttttctggtcaagtttcttcttcatcactcatgccacttactccattctggaccctccttcagtcaaatgttcctgtgcttcaacctccattacccttggaaatgccaccacccccacctccacctccagaatcacctccaccccctcctccaccacctcctcctgcggaagatggtgagatccaggaggtagagatggaggatgagggaagtgaggagccccctgccccaggaacagaggaagatacccctttgaaaccttcagcacaaaccacagttgtaactagccagagttcagttgattccaccatctctagttcttcttccactaaaggaataaagaggaaagctacagaaattagcactgcagtggttcagaggtcagctaccattggcagttctccagttctctatagccagtcagctatagctacaggtcaccaggcagcagggattggaaaccaggcaacaggaattggacatcagacaataccagttagccttccagcagcaggaatgggtcatcaggccagaggaatgagcctgcagtcaaattaccttggactagcggcagcacctgcaattatgagttatgcagaatgttctgtcccaattggagtgactgctccctcattgcagccagttcaggcccgaggtgctgtgcctaccgctaccattatagaaccaccaccaccacctcctcctcctcctcctccaccaccaccagctcccaaaatgccaccacctgaaaagacaaaaaaaggaaggaaagacaaggcaaagaagagtaagaccaaaatgccatctttggtaaaaaagtggcagagtatccagcgtgagttagatgaagaggacaattctagttccagtgaagaggatcgggaatcaactgcacagaagcgaattgaagagtggaaacagcagcagctggttagtggcatggcagagagaaatgctaattttgaagcccttcctgaggattggagagcaaggctgaagagaaggaaaatggctccaaacacatagtttttaagtttttaaaacttttttgtattattgtttgttttgtgttcagttcaaagtcttaaccagttttattgtcaaataaactataaatgttatgggggagatcttataaatttcctgggcaagagtgtatgcatacaaagttttcacttttgtgaaatgtaatttttctgtttttgcaaagggatgaggtgattggaattgctttgaccatgctgcctttattctcaaactggcaaacttagcatgttaggtgtattaacctcatcagtcttgaagaacatgtggctcatgagtataacacttctgtagaggactccctgacaaaagtgaagaattaacttctcctccagaacaagtgcaattcagaaggcagctctgcattctaccttgcttgactggaattgtctgaagctttttctggcctcttttctctagtcggccacccctgaagtgctgaggtctaagtggtttacctcgtgctgatagatggccacactctttagagtagttctcataagttctagaactggtagctcggtcgtttcgcacactaggtggcatacaggcagcagcaggtgttcatatccttgattttgagaatttcccctcaagtatgtggcagtaaatacaacaagacactctatgtattaatgtctccattgtcttaaccctgttccaaaacaaaattcacctcctttctttatgtgaatgtattctccataaaattccagtatttaaaaagcagtttactgttctgtactttctgttgtatcacaatcaggtaaaagtcactttaaactgaggaaacggcaaattgtgttttaaagctctttgtatttctccagtttctgaccttgtaaatttgtatatatgcactaataaagctttttttataatcctgaaaaaaaaaaaaaaaa

SEQ ID NO: 1350 - protein, 1015 aa, Homo sapiens
MGKKSRAVPGRRPILQLSPPGPRGSTPGRDPEPEPDTEPDSTAAVPSQPAPSAATTTAVTAAAASDDSPSEDEQEAVQEVPRVVQNPPKPVMTTRPTAVKATGGLCLLGAYADSDDDDNDVSEKLAQSKETNGNQSTDIDSTLANFLAEIDAITAPQPAAPVGASAPPPTPPRPEPKEAATSTLSSSTSNGTDSTQTSGWQYDTQCSLAGVGIEMGDWQEVWDENTGCYYYWNTQTNEVTWELPQYLATQVQGLQHYQPSSVPGAETSFVVNTDIYSKEKTISVSSSKSGPVIAKREVKKEVNEGIQALSNSEEEKKGVAASLLAPLLPEGIKEEEERWRRKVICKEEPVSEVKETSTTVEEATTIVKPQEIMLDNIEDPSQEDLCSVVQSGESEEEEEQDTLELELVLERKKAELRALEEGDGSVSGSSPRSDISQPASQDGMRRLMSKRGKWKMFVRATSPESTSRSSSKTGRDTPENGETAIGAENSEKIDENSDKEMEVEESPEKIKVQTTPKVEEEQDLKFQIGELANTLTSKFEFLGINRQSISNFHVLLLQTETRIADWREGALNGNYLKRKLQDAAEQLKQYEINATPKGWSCHWDRDHRRYFYVNEQSGESQWEFPDGEEEEEESQAQENRDETLAKQTLKDKTGTDSNSTESSETSTGSLCKESFSGQVSSSSLMPLTPFWTLLQSNVPVLQPPLPLEMPPPPPPPPESPPPPPPPPPPAEDGEIQEVEMEDEGSEEPPAPGTEEDTPLKPSAQTTVVTSQSSVDSTISSSSSTKGIKRKATEISTAVVQRSATIGSSPVLYSQSAIATGHQAAGIGNQATGIGHQTIPVSLPAAGMGHQARGMSLQSNYLGLAAAPAIMSYAECSVPIGVTAPSLQPVQARGAVPTATIIEPPPPPPPPPPPPPPAPKMPPPEKTKKGRKDKAKKSKTKMPSLVKKWQSIQRELDEEDNSSSSEEDRESTAQKRIEEWKQQQLVSGMAERNANFEALPEDWRARLKRRKMAPNT

SEQ ID NO: 1351 - DNA, 5383 bp, Homo sapiens
ctcttctggattcctcgctgcccaccctcattctcccggtggaagcctcgcaacgaagggccggagccgcctttctgctcccggaatgcttcacctgtccgcagctccgcccgccccacccccggaagtgacggcgaccgcgcggccctgcctttgttccgttgggcgtcgcggcgacggcgggaagatggcggcggcgggagccctggaacggagcttcgtggagctaagcggagctgagcgcgaaaggccgaggcactttcgggaattcacagtctgcagcattgggactgcaaatgccgtggctggcgccgtaaaatacagtgaaagcgcgggaggcttttactacgtggagagtggcaagttgttctccgtaaccagaaacaggttcattcattggaagacctctggagatacattggagctgatggaggagtcactggacataaatctgttgaataatgccattcgcctaaaattccaaaattgcagtgttttacctggaggggtttatgtctctgagactcagaatcgtgtgataatcttgatgttaaccaatcaaacagtgcacaggttacttttaccacacccctcccggatgtataggagtgagttggtagttgacagtcagatgcagtcaatattcactgacattggaaaagttgatttcacagatccttgcaactatcagttaattccagcagtacctggaatatctcctaattccaccgcctctacagcctggctcagcagtgatggggaggccctgtttgccttaccatgtgcttctgggggaatctttgttcttaagctacctccttatgacatacctggtatggtgtcagtcgtggaactgaaacagagttcagtaatgcaacgattgcttacaggctggatgccaacagctatcaggggtgaccagtcgccttcagatcgtcccctcagtcttgctgttcattgtgtggagcatgatgccttcatctttgctttgtgtcaggatcataaactacgaatgtggtcttacaaggagcaaatgtgcctaatggtagctgacatgctggagtatgtccctgtgaagaaagaccttcggcttactgctggaactggacacaaattacggcttgcttattcccccaccatgggactctacctggggatatacatgcatgcaccaaaacgaggacagttctgcattttccagttggtgagcactgagagtaatcgctatagtctcgatcatatttcttcactgttcacttctcaggagacactgattgactttgccttaacttccacggatatctgggccctgtggcatgatgctgagaaccaaacagtagtgaaatacatcaactttgaacataatgttgcaggtcagtggaatccagtttttatgcagcctctgccagaggaagagattgtcatcagagatgatcaagaccccagagagatgtatctgcaaagtctttttacaccaggacaattcacaaatgaagctttatgtaaggctttacagattttctgccgaggaactgagaggaatttggatctttcctggagtgaactgaagaaagaagttactttagctgttgaaaatgagcttcaaggaagtgtaacagagtatgaattctcccaggaggagtttcgaaatttacaacaagaattctggtgcaagttctatgcctgttgtcttcagtatcaagaagccctctctcaccctcttgccctacatttgaatccacacacaaacatggtgtgcctgctgaaaaaagggtacctgtctttccttattccctcatccttagtggatcatttgtatctcctgccttatgagaaccttttgacagaagatgagacaaccatatctgatgatgtggatatcgctcgggatgtcatatgtcttataaaatgcctccggctgattgaagagtcagtaactgtggatatgtcagttataatggaaatgagttgttataacctacagtctccggaaaaggctgcagagcagattctggaagatatgatcactattgatgtagaaaatgtgatggaggatatttgtagtaaactgcaagagattaggaacccaatccatgcaattggactacttatacgggaaatggattatgaaacagaagtggaaatggaaaagggattcaatccagctcagcctttgaatattcgaatgaatcttacccagctctatggtagtaacacagcagggtatattgtgtgcagaggggtgcataaaatcgccagtactcgtttcctgatctgcagagatcttttgatcttacagcagctgttaatgaggcttggagatgctgtgatttggggaactggtcagctctttcaagctcagcaagacctactacatcgaacagctcccctactcttatcttattacctcattaaatggggaagtgagtgcttggcaactgatgttccacttgacacactggagtctaatctccaacacttatcagtactggaattaacagactctggtgctttaatggcaaataggtttgtatctagtcctcagactattgtggagttattcttccaagaagttgcaagaaaacacattatatctcacctcttctctcagccaaaggcacctctgagccaaactggattgaattggcctgaaatgattactgcaattaccagttatttattgcagcttttatggcctagcaatcctggttgtctctttctagaatgtttgatgggaaattgccaatatgtacaattgcaggattatattcaactgctacatccctggtgtcaagtcaatgttggttcctgtcgatttatgctgggaaggtgttacctagttacaggagaaggacagaaggctctggaatgtttttgtcaggcagcatctgaagtaggcaaagaggaattcttggatcgcttgattcgctcagaggatggggagatcgtgtctacccccaggctgcagtattatgacaaggttttacgactactagatgtcattggtttgcctgaactggttattcagttggctacatcagccataactgaagcaggtgatgactggaaaagtcaggctactctaaggacatgtattttcaaacatcatttggatttgggtcacaatagccaagcatatgaagccttaacccaaattcctgattccagcaggcaattagattgtttacggcagttggtggtagttctttgtgaacgctcacagctacaggatcttgtagagtttccctatgtgaatctgcataatgaggttgtgggaataattgagtcacgtgctagagctgtggaccttatgactcacaattactatgaacttctgtatgcctttcacatctatcgccacaattaccgcaaggctggcacagtgatgtttgagtatggaatgcggcttggcagagaagttcgaactctccggggacttgagaaacaaggcaactgttatctggctgctctcaattgtttacgacttattcgtccagaatatgcgtggattgtgcagccagtgtctggtgcagtgtatgatcgccctggagcatcccctaagaggaatcatgatggagaatgcacagctgcccccacaaatcgacaaattgaaatcctggaactggaagatctggagaaagagtgttccttggctcgcatccgcctcactttggctcagcatgatccatcagcggttgcagttgctggaagttcatcagcagaggaaatggtcactctcttggttcaggcgggcctctttgacactgccatatcactctgtcagacttttaagcttcccttaacgccagtctttgaagggcttgccttcaaatgcatcaaattgcaatttggaggagaggcagcacaagcagaagcctgggcctggctagcagccaatcagctctcatctgtcatcactactaaggagtctagtgctacagatgaagcatggcgactattatccacttacctggagaggtacaaagtccagaataacttgtatcaccactgtgtaatcaacaagctcttgtctcatggagtgcctctgcctaattggcttataaacagttacaagaaggttgatgctgctgaattgcttcgtttatacttaaactatgaccttttagaagaagctgtggatttggtgtcagaatatgtggatgctgtattgggaaaaggacatcaatacttcggaattgagtttccactgtccgcaacagccccaatggtgtggcttccatactcctctattgatcagcttctccaagctctgggagagaacagtgccaacagtcacaacatcgcactgtcccagaaaatacttgacaaattggaggactaccagcaaaaagttgataaggcaacacgggatttattatatcgtcggaccttgtgatttggattgtcacctagcctttgtaaccgcttggtgcctcttaggacttaagactaccctacaggaaccctgtactcaaggccgatttttgtaactgtaaatgatgtgtacaacattcaagtctgcattctgcacaagataggagggcggaagagtcagaggaccctgtgcttgctggtggtgctaacacaatttctggtgttcaaccttggtctcaaatagctgcttttgtatatgattcacgagcttttttagagtttatatttttttaaactaccgaagacattcattatctgcaaattaagactcaccttcactttccaaaatagctgagggttgttggcttgttgtagctgaccaccaaaagcagtcactgcaaatcttttaattcttccctatcaccttttgtattttaatgcaattattttggtccagaactgacctgtattttctgtattgtacacaaaagctaataattttgtgtactttttatttattttggaggttttatatgatcttcaattgagtattaaataatttgcctagattaagcctaaaatgatgaccagctaattaaagaagatattttgaatctggttctgagctaaagttgagtaaattcttagctaagaaaaaattggaaatccatcatctatattagcaacagattctcagagtaaattgttaacttctatgatttatgataatcaagctggacttgatcatacaagttagtctcataatgtattggaccaaaatgtaaacttcattggtcagatttagaagcattcatgctcacaagttttgggaaagtgaaaaataataaaatcatcttggattttattctgtatattaaaatttatcttttaaggaaacaatctgtatactacttgcttgtatagccttttgacccttcttgagtttttcagaagcctttaatttttatactttcaataccatatttacattatatactttaattaacaa

SEQ ID NO: 1352 - protein, 1436 aa, Homo sapiens
MLHLSAAPPAPPPEVTATARPCLCSVGRRGDGGKMAAAGALERSFVELSGAERERPRHFREFTVCSIGTANAVAGAVKYSESAGGFYYVESGKLFSVTRNRFIHWKTSGDTLELMEESLDINLLNNAIRLKFQNCSVLPGGVYVSETQNRVIILMLTNQTVHRLLLPHPSRMYRSELVVDSQMQSIFTDIGKVDFTDPCNYQLIPAVPGISPNSTASTAWLSSDGEALFALPCASGGIFVLKLPPYDIPGMVSVVELKQSSVMQRLLTGWMPTAIRGDQSPSDRPLSLAVHCVEHDAFIFALCQDHKLRMWSYKEQMCLMVADMLEYVPVKKDLRLTAGTGHKLRLAYSPTMGLYLGIYMHAPKRGQFCIFQLVSTESNRYSLDHISSLFTSQETLIDFALTSTDIWALWHDAENQTVVKYINFEHNVAGQWNPVFMQPLPEEEIVIRDDQDPREMYLQSLFTPGQFTNEALCKALQIFCRGTERNLDLSWSELKKEVTLAVENELQGSVTEYEFSQEEFRNLQQEFWCKFYACCLQYQEALSHPLALHLNPHTNMVCLLKKGYLSFLIPSSLVDHLYLLPYENLLTEDETTISDDVDIARDVICLIKCLRLIEESVTVDMSVIMEMSCYNLQSPEKAAEQILEDMITIDVENVMEDICSKLQEIRNPIHAIGLLIREMDYETEVEMEKGFNPAQPLNIRMNLTQLYGSNTAGYIVCRGVHKIASTRFLICRDLLILQQLLMRLGDAVIWGTGQLFQAQQDLLHRTAPLLLSYYLIKWGSECLATDVPLDTLESNLQHLSVLELTDSGALMANRFVSSPQTIVELFFQEVARKHIISHLFSQPKAPLSQTGLNWPEMITAITSYLLQLLWPSNPGCLFLECLMGNCQYVQLQDYIQLLHPWCQVNVGSCRFMLGRCYLVTGEGQKALECFCQAASEVGKEEFLDRLIRSEDGEIVSTPRLQYYDKVLRLLDVIGLPELVIQLATSAITEAGDDWKSQATLRTCIFKHHLDLGHNSQAYEALTQIPDSSRQLDCLRQLVVVLCERSQLQDLVEFPYVNLHNEVVGIIESRARAVDLMTHNYYELLYAFHIYRHNYRKAGTVMFEYGMRLGREVRTLRGLEKQGNCYLAALNCLRLIRPEYAWIVQPVSGAVYDRPGASPKRNHDGECTAAPTNRQIEILELEDLEKECSLARIRLTLAQHDPSAVAVAGSSSAEEMVTLLVQAGLFDTAISLCQTFKLPLTPVFEGLAFKCIKLQFGGEAAQAEAWAWLAANQLSSVITTKESSATDEAWRLLSTYLERYKVQNNLYHHCVINKLLSHGVPLPNWLINSYKKVDAAELLRLYLNYDLLEEAVDLVSEYVDAVLGKGHQYFGIEFPLSATAPMVWLPYSSIDQLLQALGENSANSHNIALSQKILDKLEDYQQKVDKATRDLLYRRTL

SEQ ID NO: 1353 - DNA, 1939 bp, Homo sapiens
ggggcgcttcctggggccgcgcgtccagggagctgtgccgtccgcccgtccgtctgcccgcaggcattgcccgagccagccgagccgccagagccgcgggccgcgggggtgtcgcgggcccaaccccaggatgctcccctgcgcctcctgcctacccgggtctctactgctctgggcgctgctactgttgctcttgggatcagcttctcctcaggattctgaagagcccgacagctacacggaatgcacagatggctatgagtgggacccagacagccagcactgccgggatgtcaacgagtgtctgaccatccctgaggcctgcaagggggaaatgaagtgcatcaaccactacgggggctacttgtgcctgccccgctccgctgccgtcatcaacgacctacacggcgagggacccccgccaccagtgcctcccgctcaacaccccaacccctgcccaccaggctatgagcccgacgatcaggacagctgtgtggatgtggacgagtgtgcccaggccctgcacgactgtcgccccagccaggactgccataacttgcctggctcctatcagtgcacctgccctgatggttaccgcaagatcgggcccgagtgtgtggacatagacgagtgccgctaccgctactgccagcaccgctgcgtgaacctgcctggctccttccgctgccagtgcgagccgggcttccagctggggcctaacaaccgctcctgtgttgatgtgaacgagtgtgacatgggggccccatgcgagcagcgctgcttcaactcctatgggaccttcctgtgtcgctgccaccagggctatgagctgcatcgggatggcttctcctgcagtgatattgatgagtgtagctactccagctacctctgtcagtaccgctgcatcaacgagccaggccgtttctcctgccactgcccacagggttaccagctgctggccacacgcctctgccaagacattgatgagtgtgagtctggtgcgcaccagtgctccgaggcccaaacctgtgtcaacttccatgggggctaccgctgcgtggacaccaaccgctgcgtggagccctacatccaggtctctgagaaccgctgtctctgcccggcctccaaccctctatgtcgagagcagccttcatccattgtgcaccgctacatgaccatcacctcggagcggagcgtgcccgctgacgtgttccagatccaggcgacctccgtctaccccggtgcctacaatgcctttcagatccgtgctggaaactcgcagggggacttttacattaggcaaatcaacaacgtcagcgccatgctggtcctcgcccggccggtgacgggcccccgggagtacgtgctggacctggagatggtcaccatgaattccctcatgagctaccgggccagctctgtactgaggctcaccgtctttgtaggggcctacaccttctgaggagcaggagggagccaccctccctgcagctaccctagctgaggagcctgttgtgaggggcagaatgagaaaggcaataaagggagaaagaaagtcctggtggctgaggtgggcgggtcacactgcaggaagcctcaggctggggcagggtggcacttgggggggcaggccaagttcacctaaatgggggtctctatatgttcaggcccaggggcccccattgacaggagctgggagctctgcaccacgagcttcagtcaccccgagaggagaggaggtaacgaggagggcggactccaggccccggcccagagatttggacttggctggcttgcaggggtcctaagaaactccactctggacagcgccaggaggccctgggttccattcctaactctgcctcaaactgtacatttggataagccctagtagttccctgggcctgtttttctataaaacgaggcaactggactgtta

SEQ ID NO: 1354 - protein, 443 aa, Homo sapiens
MLPCASCLPGSLLLWALLLLLLGSASPQDSEEPDSYTECTDGYEWDPDSQHCRDVNECLTIPEACKGEMKCINHYGGYLCLPRSAAVINDLHGEGPPPPVPPAQHPNPCPPGYEPDDQDSCVDVDECAQALHDCRPSQDCHNLPGSYQCTCPDGYRKIGPECVDIDECRYRYCQHRCVNLPGSFRCQCEPGFQLGPNNRSCVDVNECDMGAPCEQRCFNSYGTFLCRCHQGYELHRDGFSCSDIDECSYSSYLCQYRCINEPGRFSCHCPQGYQLLATRLCQDIDECESGAHQCSEAQTCVNFHGGYRCVDTNRCVEPYIQVSENRCLCPASNPLCREQPSSIVHRYMTITSERSVPADVFQIQATSVYPGAYNAFQIRAGNSQGDFYIRQINNVSAMLVLARPVTGPREYVLDLEMVTMNSLMSYRASSVLRLTVFVGAYTF

SEQ ID NO: 1355 - DNA, 1292 bp, Homo sapiens
tgcgcggcttcctgcctccatgccactccagactgcaccggcatggcactgactgcccacccctcctgcctcctggccctgttggtggcaggcctagcccaaggcatcagaggcccccttagggcccaggacctaggtccccagccgctagagctgaaagaggccttcaagttgttccagatccagttcaaccggagttacctgagcccagaagagcatgctcaccgcctggacatctttgcccacaacctggcccaggctcagaggctgcaggaggaggacttgggcacagctgagtttggggtgactccattcagtgacctcacagaggaggagtttggccagctctatggctatcggagggcagctggaggggtccccagcatgggcagagaaataaggtctgaagagccagaggagtcagtacctttcagctgtgactggcggaaggtggccggcgccatctcacccatcaaggaccagaaaaactgcaactgctgctgggccatggcagcggcaggcaacatagagaccctgtggcgcatcagtttctgggattttgtggacgtctccgtgcaggaactgctggactgtggccgctgtggggatggctgccacggtggcttcgtctgggacgcgttcataactgtcctcaacaacagcggcctggccagtgaaaaggactacccgttccagggcaaagtcagagcccacaggtgccaccccaagaagtaccagaaggtggcctggatccaggacttcatcatgctgcagaacaacgagcacagaattgcgcagtacctggccacttatggccccatcaccgtgaccatcaacatgaagccccttcagctataccggaaaggtgtgatcaaggccacacccaccacctgtgacccccagcttgtggaccactctgtcctgctggtgggttttggcagcgtcaagtcagaggaggggatatgggcagagacagtctcatcgcagtctcagcctcagcctccacaccccaccccatactggatcctgaagaactcctggggggcccaatggggagagaagggctatttccggctgcaccgagggagcaatacctgtggcatcaccaagttcccgctcactgcccgtgtgcagaaaccggatatgaagccccgagtctcctgccctccctgaccacctggccccctcagctctgtcctgttaggccaactgcctccttgccagccccacccccaggtttttgcccatcctcccaatctcaatacagcctgaataaaccaagacaagacctc

SEQ ID NO: 1356 - protein, 376 aa, Homo sapiens
MALTAHPSCLLALLVAGLAQGIRGPLRAQDLGPQPLELKEAFKLFQIQFNRSYLSPEEHAHRLDIFAHNLAQAQRLQEEDLGTAEFGVTPFSDLTEEEFGQLYGYRRAAGGVPSMGREIRSEEPEESVPFSCDWRKVAGAISPIKDQKNCNCCWAMAAAGNIETLWRISFWDFVDVSVQELLDCGRCGDGCHGGFVWDAFITVLNNSGLASEKDYPFQGKVRAHRCHPKKYQKVAWIQDFIMLQNNEHRIAQYLATYGPITVTINMKPLQLYRKGVIKATPTTCDPQLVDHSVLLVGFGSVKSEEGIWAETVSSQSQPQPPHPTPYWILKNSWGAQWGEKGYFRLHRGSNTCGITKFPLTARVQKPDMKPRVSCPP

SEQ ID NO: 1357 - DNA, 1429 bp, Homo sapiens
ataagctgggtcccgatgccgcgagcggaatctcggcgctcccggaagtggcctgaaggcggcgcgccagtcccgagcagtgctcgctcctgctcggggcgctgcggccccgggcgtcgccatgaccagtgagctggacatcttcgtggggaacacgacccttatcgacgaggacgtgtatcgcctctggctcgatggttactcggtgaccgacgcggtggccctgcgggtgcgctcgggaatcctggagcagactggcgccacggcagcggtgctgcagagcgacaccatggaccattaccgcaccttccacatgctcgagcggctgctgcatgcgccgcccaagctactgcaccagctcatcttccagattccgccctcccggcaggcactactcatcgagaggtactatgcctttgatgaggcctttgttcgggaggtgctgggcaagaagctgtccaaaggcaccaagaaagacctggatgacatcagcaccaaaacaggcatcaccctcaagagctgccggagacagtttgacaactttaaacgggtcttcaaggtggtagaggaaatgcggggctccctggtggacaatattcagcaacacttcctcctctctgaccggttggccagggactatgcagccatcgtcttctttgctaacaaccgctttgagacagggaagaaaaaactgcagtatctgagcttcggtgactttgccttctgcgctgagctcatgatccaaaactggacccttggagccgtcgactcacagatggatgacatggacatggacttagacaaggaatttctccaggacttgaaggagctcaaggtgctagtggctgacaaggaccttctggacctgcacaagagcctggtgtgcactgctctccggggaaagctgggcgtcttctctgagatggaagccaacttcaagaacctgtcccgggggctggtgaacgtggccgccaagctgacccacaataaagatgtcagagacctgtttgtggacctcgtggagaagtttgtggaaccctgccgctccgaccactggccactcagcgacgtgcggttcttcctgaatcagtattcagcgtctgtccactccctcgatggcttccgacaccaggccctctgggaccgctacatgggcaccctccgcggctgcctcctgcgcctgtatcatgactgaggtgcctcccaacgctccgcccacgctgacaataaagttgctctgagtttggagactggtcctcgctccggggagcaagtggggggcgtgcagatgtgcctgtgtctgtctctgagcacctggtgtccgtgtacaaggatggatgtgtacagtggctccttgggaactgagacatatctcagggaatggtgtctgtgctcagcccatccaccagaagagtctgctcacaagcca

SEQ ID NO: 1358 - protein, 357 aa, Homo sapiens
MTSELDIFVGNTTLIDEDVYRLWLDGYSVTDAVALRVRSGILEQTGATAAVLQSDTMDHYRTFHMLERLLHAPPKLLHQLIFQIPPSRQALLIERYYAFDEAFVREVLGKKLSKGTKKDLDDISTKTGITLKSCRRQFDNFKRVFKVVEEMRGSLVDNIQQHFLLSDRLARDYAAIVFFANNRFETGKKKLQYLSFGDFAFCAELMIQNWTLGAVDSQMDDMDMDLDKEFLQDLKELKVLVADKDLLDLHKSLVCTALRGKLGVFSEMEANFKNLSRGLVNVAAKLTHNKDVRDLFVDLVEKFVEPCRSDHWPLSDVRFFLNQYSASVHSLDGFRHQALWDRYMGTLRGCLLRLYHD

SEQ ID NO: 1359 - DNA, 1450 bp, Homo sapiens
ataagctgggtcccgatgccgcgagcggaatctcggcgctcccggaagtggcctgaaggcggcgcgccagtcccgagcagtgctcgctcctgctcggggcgctgcggccccgggcgtcgccatgaccagtgagctggacatcttcgtggggaacacgacccttatcgacgaggacgtgtatcgcctctggctcgatggttactcggtgaccgacgcggtggccctgcgggtgcgctcgggaatcctggagcagactggcgccacggcagcggtgctgcagagcgacaccatggaccattaccgcaccttccacatgctcgagcggctgctgcatgcgccgcccaagctactgcaccagctcatcttccagattccgccctcccggcaggcactactcatcgagaggtactatgcctttgatgaggcctttgttcgggaggtgctgggcaagaagctgtccaaaggcaccaagaaagacctggatgacatcagcaccaaaacaggcatcaccctcaagagctgccggagacagtttgacaactttaaacgggtcttcaaggtggtagaggaaatgcggggctccctggtggacaatattcagcaacacttcctcctctctgaccggttggccagggactatgcagccatcgtcttctttgctaacaaccgctttgagacagggaagaaaaaactgcagtatctgagcttcggtgactttgccttctgcgctgagctcatgatccaaaactggacccttggagccgtcggtgaggcccccactgacccagactcacagatggatgacatggacatggacttagacaaggaatttctccaggacttgaaggagctcaaggtgctagtggctgacaaggaccttctggacctgcacaagagcctggtgtgcactgctctccggggaaagctgggcgtcttctctgagatggaagccaacttcaagaacctgtcccgggggctggtgaacgtggccgccaagctgacccacaataaagatgtcagagacctgtttgtggacctcgtggagaagtttgtggaaccctgccgctccgaccactggccactcagcgacgtgcggttcttcctgaatcagtattcagcgtctgtccactccctcgatggcttccgacaccaggccctctgggaccgctacatgggcaccctccgcggctgcctcctgcgcctgtatcatgactgaggtgcctcccaacgctccgcccacgctgacaataaagttgctctgagtttggagactggtcctcgctccggggagcaagtggggggcgtgcagatgtgcctgtgtctgtctctgagcacctggtgtccgtgtacaaggatggatgtgtacagtggctccttgggaactgagacatatctcagggaatggtgtctgtgctcagcccatccaccagaagagtctgctcacaagcca

SEQ ID NO: 1360 - protein, 364 aa, Homo sapiens
MTSELDIFVGNTTLIDEDVYRLWLDGYSVTDAVALRVRSGILEQTGATAAVLQSDTMDHYRTFHMLERLLHAPPKLLHQLIFQIPPSRQALLIERYYAFDEAFVREVLGKKLSKGTKKDLDDISTKTGITLKSCRRQFDNFKRVFKVVEEMRGSLVDNIQQHFLLSDRLARDYAAIVFFANNRFETGKKKLQYLSFGDFAFCAELMIQNWTLGAVGEAPTDPDSQMDDMDMDLDKEFLQDLKELKVLVADKDLLDLHKSLVCTALRGKLGVFSEMEANFKNLSRGLVNVAAKLTHNKDVRDLFVDLVEKFVEPCRSDHWPLSDVRFFLNQYSASVHSLDGFRHQALWDRYMGTLRGCLLRLYHD

SEQ ID NO: 1361 - DNA, 1277 bp, Homo sapiens
cgatccggtacttggaggttcgaagctcctagtttcgggttgagaccgatgtggagggcgatgacgcgcgggttccttgacatcgaggatcagtaacacccggagtgggtggggaacgaggggggcggcccctgagctcaggccccgcccctttccggggacgtttcaccggattggctgtccttccataacgacatgcggccccgccccggcgcgcgccccgccgcgtgcccagcccgggtagctgctgcagcctacgctgcctcggccactgcctgccgcgtgcggagccggagcccgagcctgagtggcgccgggcccgacgtggggctcctgggccgcggcggcgggcgggcgatgctccagaggcctgaccagccatggaggccgaggcaggcggcctggaggagctgacggacgaggagatggcggcgctaggcaaggaagagctagtgcggcgcctgcggcgggaggaggcggcgcgcctggcggcactggtgcagcgcggccgcctcatgcaggaggtgaatcggcagctgcagggccacctgggcgagatccgcgagctcaagcagctcaaccggcgtctgcaggcagagaaccgtgagctgcgcgacctctgctgcttcctggactcggagcgccagcgcgggcggcgcgccgcacgccagtggcagctcttcgggacccaagcatcccgggccgtgcgcgaggacctgggcggctgttggcagaagctggccgagctggagggccgccaggaggagctgctgcgggagaacctagcgcttaaggagctctgcctggcgctgggcgaagaatggggcccccgcggcggccccagcggcgccgggggatcaggagccgggccagcacccgagcttgccttgcccccgtgcgggccccgcgacctaggcgatggaagctccagcactggcagcgtgggcagtccggatcagttgcccctggcctgttcccccgatgattgaaggcactgcttcctccacgccgacgcccgcccggattgctccccgagccccgggaccgctgtggacctcgggacctggacgccgtcctggctgcgcaggaggggccgctggcatggactaagaaatcctgacaccaagaagggcccctcgctcttgctggcagggcagcagggggactgaaggctggagcggagggacttgctgggggttggattgggggtaataaacccggacggaagcggaaaaaaaaaaaaaaaaaaaaaaaaaaaaaaaaaaaaaaaaaaaaaa

SEQ ID NO: 1362 - protein, 202 aa, Homo sapiens
MEAEAGGLEELTDEEMAALGKEELVRRLRREEAARLAALVQRGRLMQEVNRQLQGHLGEIRELKQLNRRLQAENRELRDLCCFLDSERQRGRRAARQWQLFGTQASRAVREDLGGCWQKLAELEGRQEELLRENLALKELCLALGEEWGPRGGPSGAGGSGAGPAPELALPPCGPRDLGDGSSSTGSVGSPDQLPLACSPDD

SEQ ID NO: 1363 - DNA, 1693 bp, Homo sapiens
acgggccaaggcggcgcgtctcgggggtggagcctggaggtgaccgcgccgctgcaacgcccccaccccccgcggtcgcagtggttcagcccgagaacttttcattcataaaaagaaaagactccgcacggcgcgggtgagtcagaacccagcagccgtgtaccccgcagagccgccagccccgggcatgttccgagacttcggggaacccggcccgagctccgggaacggcggcgggtacggcggccccgcgcagcccccggccgcagcgcaggcagcccagcagaagttccacctggtgccaagcatcaacaccatgagtggcagtcaggagctgcagtggatggtacagcctcatttcctggggcccagcagttaccccaggcctctgacctaccctcagtacagccccccacaaccccggccaggagtcatccgggccctggggccgcctccaggggtacgtcgaaggccttgtgaacagatcagcccggaggaagaggagcgccgccgagtaaggcgcgagcggaacaagctggctgcggccaagtgcaggaaccggaggaaggaactgaccgacttcctgcaggcggagactgacaaactggaagatgagaaatctgggctgcagcgagagattgaggagctgcagaagcagaaggagcgcctagagctggtgctggaagcccaccgacccatctgcaaaatcccggaaggagccaaggagggggacacaggcagtaccagtggcaccagcagcccaccagccccctgccgccctgtaccttgtatctccctttccccagggcctgtgcttgaacctgaggcactgcacacccccacactcatgaccacaccctccctaactcctttcacccccagcctggtcttcacctaccccagcactcctgagccttgtgcctcagctcatcgcaagagtagcagcagcagcggagacccatcctctgacccccttggctctccaaccctcctcgctttgtgaggcgcctgagccctactccctgcagatgccaccctagccaatgtctcctccccttcccccaccggtccagctggcctggacagtatcccacatccaactccagcaacttcttctccatccctctaatgagactgaccatattgtgcttcacagtagagccagcttggggccaccaaagctgcccactgtttctcttgagctggcctctctagcacaatttgcactaaatcagagacaaaatatttcccatttgtgccagaggaatcctggcagcccagagactttgtagatccttagaggtcctctggagccctaaccccttccagatcactgccacactctccatcaccctcttcctgtgatccacccaaccctatctcctgacagaaggtgccactttacccacctagaacactaactcaccagccccactgccagcagcagcaggtgattggaccaggccattctgccgccccctcctgaaccgcacagctcaggaggcgcccttggcttctgtgatgagctgatctgcggatctcagctttgagaagccttcagctccagggaatccaagcctccacagcgagggcagctgctatttattttcctaaagagagtatttttatacaaacctaccaaaatggaataaaaggcttgaagctgtgaaaaaaaaaaaaaaaaaaaaaaaaa

SEQ ID NO: 1364 - protein, 271 aa, Homo sapiens
MFRDFGEPGPSSGNGGGYGGPAQPPAAAQAAQQKFHLVPSINTMSGSQELQWMVQPHFLGPSSYPRPLTYPQYSPPQPRPGVIRALGPPPGVRRRPCEQISPEEEERRRVRRERNKLAAAKCRNRRKELTDFLQAETDKLEDEKSGLQREIEELQKQKERLELVLEAHRPICKIPEGAKEGDTGSTSGTSSPPAPCRPVPCISLSPGPVLEPEALHTPTLMTTPSLTPFTPSLVFTYPSTPEPCASAHRKSSSSSGDPSSDPLGSPTLLAL

SEQ ID NO: 1365 - DNA, 1568 bp, Homo sapiens
agttgttgttgaggtggcgcggcgctaagatggcggcggcggcggcggcggccgtggcgggggtggggcgcggtggcggtggcgcggagccacggcaggagcggagccgggcccggggctgggccggcgtcgaacgcagcgaaggccggaggatggaaccaggtgaggagctggaagaggagggctctccaggtggccgtgaggatggcttcaccgccgagcacctggctgcagaggccatggcagctgacatggacccctggctagtgtttgatgcccgcacaacgcctgccactgagctggatgcctggctggccaagtacccaccatcccaagttacccgctatggggaccccggttcacccaactcagagcctgtgggctggattgcagtgtatgggcagggctacagccccaactccggggacgtgcagggcctgcaggcagcctgggaagctctgcagaccagtgggcggcccatcacaccgggtaccctgcgccagctcgccatcacccaccacgtgctctcgggcaagtggcttatgcatctggcaccgggcttcaagctggaccacgcctgggctggcattgcccgggccgtggttgaaggccggcttcaggtggccaaggtgagcccacgtgccaaggagggtgggcgccaggtcatctgtgtttacacggacgacttcacggaccgcttgggtgtactggaggcggattcagccatccgtgcagcgggcattaagtgcctgctcacctacaagcctgatgtctacacctacctgggcatctaccgggccaatcgctggcacctctgccccactctctatgagagccgtttccagcttgggggtagtgcccgtggctcccgagtgcttgaccgtgccaacaacgtggaactgacctagaggggccaaattggggagactgcccactcccccctccatgctggggttggatcctcctgtcttcctccttgtcccatgaaggccacaccccccagctctggggactcctaggtcacttgggaactacctgcatcttcagtccccttgaacttctgccctctgttcagggctgacacaagccccacaggctggggggctccggttccctgagggatgagccttcagcctccctttgtaatgctgctcctctccactgcccagcaccatgagttgggtgcagacacctagaaggagagacttcttggaacgctcatcccccgctatacctccccttcctcctgcatctccccttctttccttccccctcaggagagagaaaacttagtgcttccagcccttcttggagccttcatggtccaggggtaggggccccactggcctgagcatgccattttgaggggagggtagttgtgcctacttatcccctggcagaggggatgccaggaccatggacatgaggcttgcccatccctgccaacttacacagcctgtaccactgtccccccttccttggctactttgacatgtgcctgctcctggcatttcaataaaacccggcttgggtctgtgtcttgagtgttttttaaaaaaaaaaaaaaa

SEQ ID NO: 1366 - protein, 251 aa, Homo sapiens
MEPGEELEEEGSPGGREDGFTAEHLAAEAMAADMDPWLVFDARTTPATELDAWLAKYPPSQVTRYGDPGSPNSEPVGWIAVYGQGYSPNSGDVQGLQAAWEALQTSGRPITPGTLRQLAITHHVLSGKWLMHLAPGFKLDHAWAGIARAVVEGRLQVAKVSPRAKEGGRQVICVYTDDFTDRLGVLEADSAIRAAGIKCLLTYKPDVYTYLGIYRANRWHLCPTLYESRFQLGGSARGSRVLDRANNVELT

SEQ ID NO: 1367 - DNA, 988 bp, Homo sapiens
gggcgggagcggcggtccagactggggagggacgcgcaccggccaggaggcttcaagaggagggcactagggccctgcgagcggcgtcttaaccggcggcgctaggactccgcgggaaacggcgggggcggagcgggcggcaccaggacccaggggaaccgcgacgggcgggcggcgagcaggcccgggagccgggaggctgcgggcggcggcgctggacccgacgcggcgagagaggccccgagatgccgagcaagaagaagaagtacaacgcgcggttcccgccggcgcggatcaagaagatcatgcagacggacgaagagattgggaaggtggcggcggcggtgcctgtcatcatctcccgggcgctcgagctcttcctagagtcgctgttgaagaaggcctgccaggtgacccagtcgcggaacgcgaagaccatgaccacatcccacctgaagcagtgcatcgagctggagcagcagtttgacttcttgaaggacctggtggcatctgttcccgacatgcagggggacggggaagacaaccacatggatggggacaagggcgcccgcaggggccggaagccaggcagcggcggccggaagaacggtgggatgggaacgaaaagcaaggacaagaagctgtccgggacagactcggagcaggaggatgaatctgaggacacagatactgatggggaagaggagacatcacaacccccaccccaggccagccacccctctgcccactttcagagccccccgacacccttcctgcccttcgcctctactctgcctttgcccccagcgcccccgggcccctcagcacctgatgaagaggacgaagaagattacgactcctagcgccttctgccccccagaccatagccccttttagttggttttagttgctctggggggaggagagaaggtagagctgttcttaaatttattaaaaaaaaaaataaaagggaatctcagtgtctgtt

SEQ ID NO: 1368 - protein, 205 aa, Homo sapiens
MPSKKKKYNARFPPARIKKIMQTDEEIGKVAAAVPVIISRALELFLESLLKKACQVTQSRNAKTMTTSHLKQCIELEQQFDFLKDLVASVPDMQGDGEDNHMDGDKGARRGRKPGSGGRKNGGMGTKSKDKKLSGTDSEQEDESEDTDTDGEEETSQPPPQASHPSAHFQSPPTPFLPFASTLPLPPAPPGPSAPDEEDEEDYDS

SEQ ID NO: 1369 - DNA, 1726 bp, Homo sapiens
agttctacggtgcggatgggggatggggcaggatggggcaggacaccgatatgctaaatacctaccaacagttggttaggaccccgtcggtgcgaccagggcaggacgtgcggctccaggctccaggaaccagaacggggctgctcaagctgctgtcgaccgtctctcaggacaagcagggctgcctggggagtggtgatggtgtgccaaatcaagacctgcagcagaggcctcagagctcaaggcagacagcaaagaaggaccgcaagcccaggggccagagcaagaaaggacagggctctgaagagtctgaagatcacttcccgcttcttcctcggaaaccctccttccccttccagtgggcctgggagagcatcgccacagatgtccgggctgtgcttcagccaagctccccaacccctggccaccaagccctgcccatgccctcctcgttctcccagcgtcagtccaggcgcaagtccacggccaacctcccagaggcccatggctgctgctggaagacagaggcgcaaaacctgaaggcgagacagcagctgggagcctggggcggtgtctccatccctactggcaaaggggagctaggatcagagccccccagtggtctccagctgcctgggaggaggccaggatcaggatcggcgtccgacaagcaggtccagctgcaaagcctgggtgctgaggaggccgagaggggtctgagttctggggtgctgccccagcgccccaggagggggtcgatctcagaggaggagcaattttcagaggccacagaggaggctgaggagggagagcacaggactccctgcagaaggagggctggttgtcagagaaaggggcagatttctggagaggaagcctccgatgagggagaagtgcagggccagagccaggggagcagccccagcttcaacaacctccgaaggcgacaatggaggaagacaagggccaaggagctgcaggggccatgggacctggagaagctgcacaggcagctacagagagacctggactgtggcccccaaaagctgccctggaagactttgagggctgccttccaggcctccaagcggaatggaaaggcctatgcctcgggatacgatgaaactttcgtgtctgccaacctccctaatcgcaccttccacaaacgacaggaagccaccaggagcctgctgcaggcctgggagcggcagcggcaggaggagcggcagcaggccgagctgcggcgggcccggacacagcatgtacagcggcaggtggcccactgcctggcagcctacgcacccagagggagccggggccctggggcggcccagcgcaagctggaggagctgaggcgccaggagcgacagcgctttgctgagtaccaggcggagctgcaaggcatccagcacagggtgcaggcccggcccttcctgttccagcaggctatgcaggccaatgcccggctcaccgtcactcggcgcttctcccaggtgctgtcagcactggggctggatgaggagcagctgctgtctgaggcaggaaaggtggacagagagggcacccccaggaaacccaggagccacaggtcaatgggggtgagaatggagcactctcctcagaggcccccaaggacagaacccaccggcagccagcctgacaggcactacaaccccagcctggacccggagtgcagtccctgagataaaattaaaggctttatggc

SEQ ID NO: 1370 - protein, 556 aa, Homo sapiens
MGQDTDMLNTYQQLVRTPSVRPGQDVRLQAPGTRTGLLKLLSTVSQDKQGCLGSGDGVPNQDLQQRPQSSRQTAKKDRKPRGQSKKGQGSEESEDHFPLLPRKPSFPFQWAWESIATDVRAVLQPSSPTPGHQALPMPSSFSQRQSRRKSTANLPEAHGCCWKTEAQNLKARQQLGAWGGVSIPTGKGELGSEPPSGLQLPGRRPGSGSASDKQVQLQSLGAEEAERGLSSGVLPQRPRRGSISEEEQFSEATEEAEEGEHRTPCRRRAGCQRKGQISGEEASDEGEVQGQSQGSSPSFNNLRRRQWRKTRAKELQGPWDLEKLHRQLQRDLDCGPQKLPWKTLRAAFQASKRNGKAYASGYDETFVSANLPNRTFHKRQEATRSLLQAWERQRQEERQQAELRRARTQHVQRQVAHCLAAYAPRGSRGPGAAQRKLEELRRQERQRFAEYQAELQGIQHRVQARPFLFQQAMQANARLTVTRRFSQVLSALGLDEEQLLSEAGKVDREGTPRKPRSHRSMGVRMEHSPQRPPRTEPTGSQPDRHYNPSLDPECSP

SEQ ID NO: 1371 - DNA, 3561 bp, Homo sapiens
ttttgcgttgtctgggctcggcggcagccgggctcggagtggacgtgccactatggggtcgtccaagaagcatcgcggagagaaggaggcggccgggacgacggcggcggccggcaccgggggtgccaccgagcagccgccgcggcaccgggaacacaaaaaacacaagcaccggagtggcggcagtggcggtagcggtggcgaacgacggaagcggagccgggaacgtgggggcgagcgcgggagcgggcggcgcggggccgaagctgaggcccggagcagcacgcacgggcgggagcgcagccaggcagagccctccgagcggcgcgtgaagcgggagaagcgcgatgacggctacgaggccgctgccagctccaaaactagctcaggcgatgcctcctcactcagcatcgaggagactaacaaactccgggcaaagttggggctgaaacccttggaggttaatgccatcaagaaggaggcgggcaccaaggaggagcccgtgacagctgatgtcatcaaccctatggccttgcgacagcgagaggagctgcgggagaagctggcggctgccaaggagaagcgcctgctgaaccaaaagctggggaagataaagaccctaggagaggatgacccctggctggacgacactgcagcctggatcgagaggagccggcagctgcagaaggagaaggacctggcagagaagagggccaagttactggaggagatggaccaagagtttggtgtcagcactctggtggaggaggagttcgggcagaggcggcaggacctgtacagtgcccgggacctgcagggcctcaccgtggagcatgccattgattccttccgagaaggggagacaatgattcttaccctcaaggacaaaggcgtgctgcaggaggaggaggacgtgctggtgaacgtgaacctggtggataaggagcgggcagagaaaaatgtggagctgcggaagaagaagcctgactacctgccctatgccgaggacgagagcgtggacgacctggcgcagcaaaaacctcgctctatcctgtccaagtatgacgaagagcttgaaggggagcggccacattccttccgcttggagcagggcggcacggctgatggcctgcgggagcgggagctggaggagatccgggccaagctgcggctgcaggctcagtccctgagcacagtggggccccggctggcctccgaatacctcacgcctgaggagatggtgacctttaaaaagaccaagcggagggtgaagaaaatccgcaagaaggagaaggaggtagtagtgcgggcagatgacttgctgcctctcggggaccagactcaggatggggactttggttccagactgcggggacggggtcgccgccgagtgtccgaagtggaggaggagaaggagcctgtgcctcagcccctgccgtcggacgacacccgagtggagaacatggacatcagtgatgaggaggaaggtggagctccaccgccggggtccccgcaggtgctggaggaggacgaggcggagctggagctgcagaagcagctggagaagggacgccggctgcgacagttacagcagctacagcagctgcgagacagtggcgagaaggtggtggagattgtgaagaagctggagtctcgccagcggggctgggaggaggatgaggatcccgagcggaagggggccatcgtgttcaacgccacgtccgagttctgccgcaccttgggggagatccccacctacgggctggctggcaatcgcgaggagcaggaggagctcatggactttgaacgggatgaggagcgctcagccaacggtggctccgaatctgacggggaggagaacatcggctggagcacggtgaacctggacgaggagaagcagcagcaggatttctctgcttcctccaccaccatcctggacgaggaaccgatcgtgaatagggggctggcagctgccctgctcctgtgtcagaacaaagggctgctggagaccacagtgcagaaggtggcccgggtgaaggcccccaacaagtcgctgccctcagccgtgtactgcatcgaggataagatggccatcgatgacaagtacagccggagggaggaataccgaggcttcacacaggacttcaaggagaaggacggctacaaacccgacgttaagatcgaatacgtggatgagacgggccggaaactcacacccaaggaggctttccggcagctgtcgcaccgcttccatggcaagggctcaggcaagatgaagacagagcggcggatgaagaagctggacgaggaggcgctcctgaagaagatgagctccagcgacacgcccctgggcaccgtggccctgctccaggagaagcagaaggctcagaagaccccctacatcgtgctcagcggcagcggcaagagcatgaacgcgaacaccatcaccaagtgacagcgccctcccgccccggccctgcctcaaccttcatattaaataaagctccctccttattttttcctccctggtcgtggtacagattccagggttggatctttggttgggtgtggcacagagtctggctcctgctaggtgagacctggccgtcaaatgacacaaacaactaaacgatggaagagagagcgagcccgggtcctctaaggctccttccttctcccctggctgtcggtcacacctctgcagggccggctctctgatagaaagtggaaggcggttttagaaactcatcaccctgctctctcctggcctcgggggctgcacaggtcactgtcctgtaatgtctcccggtcagggcagcccaggactgcccagcctggtgggctggggattgggctttgggtagggcacaggtgccaccttctgtcctggctgtcctgtgccaccctggtctgtgtctagaggagtgaaactcccagggttgggctgggagtatttggtgcacgcggtatggggagggctgagctcagtgcctcctgggagacttgtcccgtgtacagtgacccagaaagatgagattccttggcctgaactctgtgatagagtgtgactgagctgctgggggacatgtgagcctcaaatccatagaaagacaaacggccaccttgggtgcccaggatactggtgcccggccccacgtacacccacatacttctcagatggctcccacattttaagattttaaaaatgaaaccaaaaaataaattgaagaaaactgtaaactttaaagaataatcagctgggcgcagtggctcatgcttgtaatcacagcactttaggaggctgaggcaggaggactgtttgagcccaggagtttgagaccaacctgagtaaggtggcaaaaccccatctctaccaaaaatacaaagattagccaggcgtggtggtgagcgcctgtagtcccagctacttgggatgctgaggtgggaggatcacttgaacctgggagacacaggctgcagtgggccctgattgagccaccacactgcagcctaggtgacagtcagaccctgtctcaaaaaaaataaaaaaaatttaaaata

SEQ ID NO: 1372 - protein, 800 aa, Homo sapiens
MGSSKKHRGEKEAAGTTAAAGTGGATEQPPRHREHKKHKHRSGGSGGSGGERRKRSRERGGERGSGRRGAEAEARSSTHGRERSQAEPSERRVKREKRDDGYEAAASSKTSSGDASSLSIEETNKLRAKLGLKPLEVNAIKKEAGTKEEPVTADVINPMALRQREELREKLAAAKEKRLLNQKLGKIKTLGEDDPWLDDTAAWIERSRQLQKEKDLAEKRAKLLEEMDQEFGVSTLVEEEFGQRRQDLYSARDLQGLTVEHAIDSFREGETMILTLKDKGVLQEEEDVLVNVNLVDKERAEKNVELRKKKPDYLPYAEDESVDDLAQQKPRSILSKYDEELEGERPHSFRLEQGGTADGLRERELEEIRAKLRLQAQSLSTVGPRLASEYLTPEEMVTFKKTKRRVKKIRKKEKEVVVRADDLLPLGDQTQDGDFGSRLRGRGRRRVSEVEEEKEPVPQPLPSDDTRVENMDISDEEEGGAPPPGSPQVLEEDEAELELQKQLEKGRRLRQLQQLQQLRDSGEKVVEIVKKLESRQRGWEEDEDPERKGAIVFNATSEFCRTLGEIPTYGLAGNREEQEELMDFERDEERSANGGSESDGEENIGWSTVNLDEEKQQQDFSASSTTILDEEPIVNRGLAAALLLCQNKGLLETTVQKVARVKAPNKSLPSAVYCIEDKMAIDDKYSRREEYRGFTQDFKEKDGYKPDVKIEYVDETGRKLTPKEAFRQLSHRFHGKGSGKMKTERRMKKLDEEALLKKMSSSDTPLGTVALLQEKQKAQKTPYIVLSGSGKSMNANTITK

SEQ ID NO: 1373 - DNA, 2836 bp, Homo sapiens
gttggactggtgggaactgggaacactggagacctgatttctaactgacgctaccgtcgcggccgccggcaagttcctttactgtgttttcttggttcagccttgaagtgagtcgtggacgatcctctctcagcgtccagcctagacggcggtgttgctccggcagcgttcctgggagccgagggccagagactaagttcctgggttctgagcctgccatccaaggaactcaggaggaggagttgacagtctcttcgttcctaaccagtgtgggacgacttcagcatgtctcaggccaccaagaggaagcatgtggtgaaggaggtgctaggggagcacatagtgccctccgaccagcagcagattgtcagggtactcaggaccccagggaacaatctgcatgaggtggagacagcccaagggcagcgcttcctggtgagcatgccctccaaataccgcaagaacatctggatcaagagaggggactttctcattgttgaccccattgaagagggagaaaaggtgaaggctgaaatctcgtttgtgctctgcaaggaccacgtgcgctctctgcagaaggaggggttttggcctgaggccttctctgaagtggctgagaaacacaacaacaggaacagacaaactcaaccagaactcccagctgagccacagttatcaggagaggagtccagctcagaagatgattctgacctgtttgttaacacaaaccgcagacagtatcatgagagtgaggaggagagtgaagaggaggaggcagcctgagactccaggacccaattctccacttgctcagggactggcccctggctcttctgggcttggacattcccagggtgctctgcacatcttcacccctgcatgaggacaaagcagggcacctctctgaactgatcttttgattcagagaattaaacccctggtgggttggtgacttgttctggtgtctgagtggctctctcgggggagggagattgtgatgaagtgaaaaactgctccctatttattagagaccttgtgggtgggtgggctgaatggggaggaaatgggaaatggctggagtctttcccaggtggtttgttctttcttattgggcacttagaaagtgccaggccgtgctctgggccttcttgcatgtgtttaacagctgggagcactcctgcttccttgcctgcttgcagttcataccaatttaagcattcaggatgacagccctaggacctaacacccacctgcctctaagagacgctcaggagcccatggtgcctcgtgctgctctccccacctttctagtcaccctgtgtacgggagtgctcacctccagctactgtgtccatccccacatacgacctcatctctcccactctgcaccatctatcacttccagaaggtggctggcaaatctctctatccttaactttgttttgaatggtccatccatctcctgactttatttgaaacctgattattccctgaggacattgattgtcttataaccttttaaatagaggctgcttttccaccctcacccttcattcttctaaccagccctgacattctcatgagtaaccttctgccttcacttccctcttgtgtagcatcaattccgtagtccaccctacacccctctgtctccctccattctgttccgctagtaaaaccctaaccctgggtaaacccaatcattcacctctgtgcccaaacccaagtcaccatcattaggtgagaaaacagccagcctggccaccagttgtaccttacgtttatcattacaaacctcagatggacactaagcactgcccagcagatctactctgggatgtctgtttcaaaacttctgtcttatctatcaattcccccttgtggtagttaccacaacacatgcctcattaagaaacagcaaccatcagagggaatgcctgcctccctgttaccagctctgcagatgtgcacatatcttcctgtcgtaagccaatgggacttaaaccttacctcttgtgttttggagactatctttttttttttttttttttttttgagagagtgtctccctgtgttgctcaggctggagtgcagtggtgtgatctcggctcactgtaaccttcacctactgggttcaagtaactctcctgcctcagcctcccgagtagcttggactacaggcgtgcaccaccacacctggctaactttttgtatttttagtagagacggggttttgccatgttgcccgggctggtctcgaactcctgaccttaaatgagcctcctgcctcagcctcccaaactgctgggattacaggcgtgtgccaccatgcctggctaatttttatattttcagtagagacgaggttttgccatgttggccaggctggtctcgaactcctgacctcaagtggtccacccaccttggcctcctagagtgctgggattacaggtgtgagccactgtgcccagcctcttttgctttcttaaagactttggtcgggtatttgtgttgttgagtattgtgtctgggtgtgggtatttgattctttttttgttttgtgtttttggctgtcctgtctattggatgtgatatgttatggatgtgatgtgttagtgtcgagcgtgctgtagaatctcccatctctgaaacaggcgtgaaaacctgtactgattcccacgtcctccagctaccacttcatttgtctgtttctcatttacttcctcttatagcgtggctttaaacatatatacatttgtatatatgtatatatgaatataatgtataaaatgtatgtagatgtatatacaaaaaataaacgagatgggttaaagat

SEQ ID NO: 1374 - protein, 165 aa, Homo sapiens
MSQATKRKHVVKEVLGEHIVPSDQQQIVRVLRTPGNNLHEVETAQGQRFLVSMPSKYRKNIWIKRGDFLIVDPIEEGEKVKAEISFVLCKDHVRSLQKEGFWPEAFSEVAEKHNNRNRQTQPELPAEPQLSGEESSSEDDSDLFVNTNRRQYHESEEESEEEEAA

SEQ ID NO: 1375 - DNA, 1192 bp, Homo sapiens
ccagtgttcccagttcccaccagtccaactgcgaggagtgcgacgtgagtctgagtctgatccctccgaaaaccgtacttccggcgctgtctcggaggcctcccgtcccctcccttgtccgtcttctaactcttccccacgccaggtccgtcaagcctaagtccttgagttccgggtccgggcagcagagaaaggaagtcctctccctggaggcctatctccctcagaacggcgcgagaagcgagaccttagaaggcagcgcttcccgcgaaggaccggaaaggagcgcctactaaggacgccgtcgaggtccggggcgcctcaactctatagctctaactggctagaagtgcccaacgtggaatgtttcttttttaaaggcggctcttgaagcgacccggaagcggaagtggaagaaagttctagtggcttgaggtatccgcagagcggccgggtggcgggaggaaccgttacgggaactgaagttgcggattaagcctgatcaagatgacaacctcccaaaagcaccgagacttcgtggcagagcccatgggggagaagccagtggggagcctggctgggattggtgaagtcctgggcaagaagctggaggaaaggggttttgacaaggcctatgttgtccttggccagtttctggtgctaaagaaagatgaagacctcttccgggaatggctgaaagacacttgtggcgccaatgccaagcagtcccgggactgcttcggatgccttcgagagtggtgcgacgccttcttgtgatgctctctgggaagctctcaatccccagccctcatccagagtttgcagccgagtagggactcctcccctgtcctctacgaaggaaaagattgctattgtcgtactcacctccgacgtactccggggtcttttgggagttttctcccctaaccatttcaacttttttttggattctcgctcttgcatgcctcccccgtcctttttcccttgccagttccctggtgacagttaccagctttcctgaatggattcccggccccatccctcacccccaccctcactttcaatccgtttgataccatttggctccttttttggcagaacagtcactgtccttgtaaagttttttagatcaataaagtcagtggctttcaaaaaaaaaaaaaaaaaaaaaaaaaaaaaaaaaaaaaaaaaa

SEQ ID NO: 1376 - protein, 89 aa, Homo sapiens
MTTSQKHRDFVAEPMGEKPVGSLAGIGEVLGKKLEERGFDKAYVVLGQFLVLKKDEDLFREWLKDTCGANAKQSRDCFGCLREWCDAFL

SEQ ID NO: 1377 - DNA, 627 bp, Homo sapiens
gcggccgcaagctcggcactcacggctctgagggctccgacggcactgacggccatggcgcgttcgaacctcccgctggcgctgggcctggccctggtcgcattctgcctcctggcgctgccacgcgacgcccgggcccggccgcaggagcgcatggtcggagaactccgggacctgtcgcccgacgacccgcaggtgcagaaggcggcgcaggcggccgtggccagctacaacatgggcagcaacagcatctactacttccgagacacgcacatcatcaaggcgcagagccagctggtggccggcatcaagtacttcctgacgatggagatggggagcacagactgccgcaagaccagggtcactggagaccacgtcgacctcaccacttgccccctggcagcaggggcgcagcaggagaagctgcgctgtgactttgaggtccttgtggttccctggcagaactcctctcagctcctaaagcacaactgtgtgcagatgtgataagtccccgagggcgaaggccattgggtttggggccatggtggagggcacttcaggtccgtgggccgtatctgtcacaataaatggccagtgctgcttcttgcaaaaaaaaaaaaaaaaaaa

SEQ ID NO: 1378 - protein, 149 aa, Homo sapiens
MARSNLPLALGLALVAFCLLALPRDARARPQERMVGELRDLSPDDPQVQKAAQAAVASYNMGSNSIYYFRDTHIIKAQSQLVAGIKYFLTMEMGSTDCRKTRVTGDHVDLTTCPLAAGAQQEKLRCDFEVLVVPWQNSSQLLKHNCVQM

SEQ ID NO: 1379 - DNA, 2630 bp, Homo sapiens
gaatagtcaggcctttctggaagcccagtgccacagtctgcactgagcttggctcaggaaagaagggaaatccaggcggggcctgttgggcccaggtcttgagctcttttggctccagagttcccaacacagtcatggatcaaaactcagtgcctgaaaaggctcagaatgaggcagacaccaataacgcagataggttctttcgctctcactcatcacccccacaccacaggccaggccacagcagagctctccaccattacgagttgcaccatcacggcgtgccccaccaacgtggtgaatctcaccaccctccggagttccaagacttccacgaccaagccttgtcctcccatgtccaccaatctcaccaccacagcgaggcacggaatcacggcagagcccatggccccacaggctttggtctggctccctctcaaggcgccgtcccctcccaccgttcctacggtgaggactaccatgatgagctccaacgtgatggcaggaggcatcatgatgggtcccaatacagtgggttccatcagcagagtgactcccattaccatagggggtctcaccatggcagaccccaatatctcggtgagaatttatcccactattcctctggcgtgccccaccacggtgaggcttcccaccatggtgggtcctacctcccccatggacccaatccctacagtgagtccttccaccacagcgaggcttcccaccttagcgggctccaacacgatgagtcccagcatcaccaagtcccccaccgtggctggccccaccatcaccaagtccaccaccatggcaggtcccgtcatcatgaagcccaccagcatggaaagtctcctcatcacggagagaccatttcccctcattcctctgtggggtcctaccagcgtgggatatctgactatcacagcgagtaccaccaaggtgatcaccaccccagtgagtaccaccatggcgaccatccccaccacacacagcaccactaccaccagacccaccggcaccgagactaccatcagcaccaagaccaccacggcgcgtatcattccagttacctccatggcgactacgtccagagcacttcccaactctctatcccacacacatcccggagcctgattcacgatgcccccggccctgctgcttctcgtacaggagtcttcccctatcacatagcacacccacggggctcggctcacagcatgactcggtcctccagcacaatccgctcacgtgtcacccagatgtccaaaaaagtccatacccaggatatctccaccaaacattcagaagactggggcaaagaagaagggcaatttcagaaacgcaaaaccggccggctccagcggacccgcaagaagggacactctaccaatctcttccagtggctgtgggaaaagctaaccttcctcattcagggcttccgggaaatgatccggaacctgacccaatccttggcctttgaaactttcatcttcttcgttgtctgcctcaacaccgtcatgctggtggcccagaccttcgctgaagtcgagatccggggcgagtggtacttcatggccttggactccatattcttctgcatctacgtggtggaagccctgctcaagatcatcgccctgggcctctcgtacttctttgacttctggaacaatttggacttcttcattatggccatggccgtgctggacttcttgctgatgcagacccactccttcgccatctaccaccaaagcctcttccggatcctcaaggtcttcaagagcttgcgggccctgagggcaatccgggtcctgcggaggctcagcttcctgaccagcgtccaggaagtgacagggaccctgggccagtccttgccgtccatcgcagccatcctcatcctcatgtttacctgcctcttcctcttctccgcggtcctccgggcactgttccgcaaatctgaccccaagcgcttccagaacatcttcaccaccatcttcaccctcttcaccttgctcacgctggatgactggtccctcatctacatggacagccgtgcccagggcgcctggtacatcattcccatcctcataatttacatcatcatccagtacttcatcttcctcaacctggtgattactgtcctggtggatagcttccagacggcgctgttcaaaggccttgagaaagcgaagcaggagagggccgcccggatccaagagaagctgctggaagactcactgacggagctcagagctgcagagcccaaagaggtggcgagtgaaggcaccatgctgaagcggctcatcgagaaaaagtttgggaccatgactgagaagcagcaggagctcctgttccattacctgcagctggtggcaagcgtggagcaggagcagcagaagttccgctcccaggcagccgtcatcgatgagattgtggacaccacatttgaggctggagaagaggacttcaggaattgaccccaggaggacaccagatacagacttcagcccctggcagtctgcccacctgggtgcactgggacgggtccccagatctgctggaatgattgtccgggccctgcagagcaggggccccaacagagtttttaaaccccaaaaaaaaaaaaaaaa

SEQ ID NO: 1380 - protein, 780 aa, Homo sapiens
MDQNSVPEKAQNEADTNNADRFFRSHSSPPHHRPGHSRALHHYELHHHGVPHQRGESHHPPEFQDFHDQALSSHVHQSHHHSEARNHGRAHGPTGFGLAPSQGAVPSHRSYGEDYHDELQRDGRRHHDGSQYSGFHQQSDSHYHRGSHHGRPQYLGENLSHYSSGVPHHGEASHHGGSYLPHGPNPYSESFHHSEASHLSGLQHDESQHHQVPHRGWPHHHQVHHHGRSRHHEAHQHGKSPHHGETISPHSSVGSYQRGISDYHSEYHQGDHHPSEYHHGDHPHHTQHHYHQTHRHRDYHQHQDHHGAYHSSYLHGDYVQSTSQLSIPHTSRSLIHDAPGPAASRTGVFPYHIAHPRGSAHSMTRSSSTIRSRVTQMSKKVHTQDISTKHSEDWGKEEGQFQKRKTGRLQRTRKKGHSTNLFQWLWEKLTFLIQGFREMIRNLTQSLAFETFIFFVVCLNTVMLVAQTFAEVEIRGEWYFMALDSIFFCIYVVEALLKIIALGLSYFFDFWNNLDFFIMAMAVLDFLLMQTHSFAIYHQSLFRILKVFKSLRALRAIRVLRRLSFLTSVQEVTGTLGQSLPSIAAILILMFTCLFLFSAVLRALFRKSDPKRFQNIFTTIFTLFTLLTLDDWSLIYMDSRAQGAWYIIPILIIYIIIQYFIFLNLVITVLVDSFQTALFKGLEKAKQERAARIQEKLLEDSLTELRAAEPKEVASEGTMLKRLIEKKFGTMTEKQQELLFHYLQLVASVEQEQQKFRSQAAVIDEIVDTTFEAGEEDFRN

SEQ ID NO: 1381 - DNA, 8778 bp, Homo sapiens
atgatgatgaacgtccccggcggaggagcggccgcggtgatgatgacgggctacaataatggtcgctgtccccggaattctctctacagtgactgcattattgaggagaagacggtggtcctgcagaaaaaagacaatgagggctttggattcgtgcttcgaggggccaaagctgacacacccattgaagaattcacaccaacaccggctttcccagccctacagtacctggagtccgtggatgaaggtggggtggcgtggcaagccggactaaggaccggggacttcttgattgaggttaacaatgagaatgttgtcaaagtcggccacaggcaggtggtgaacatgatccggcagggagggaatcacctggtccttaaggtggtcacggtgaccaggaatctggaccccgacgacaccgccaggaagaaagctcccccgcctccaaagcgggcaccgaccacagccctcaccctgcgctccaagtccatgacctcggagctggaggagctcgtggataaagataaacccgaggagatagtcccggcctccaagccctcccgcgctgctgagaacatggctgtggaaccgagggtggcgaccatcaagcagcggcccagcagccggtgcttcccggcgggctcagacatgaactctgtgtacgaacgccaaggaatcgccgtgatgacgcccactgttcctgggagcccaaaagccccgtttctgggcatccctcgaggtacgatgcgaaggcagaaatcaatagacagcagaatctttctatcaggaataacagaggaagagcggcagtttctggctcctccaatgctgaagttcaccagaagcctgtccatgccggacacctctgaggacatcccccctccaccgcagtctgtgcccccgtccccaccaccaccttccccaaccacttacaactgccccaagtccccaactccaagagtctacgggacgattaagcctgcgttcaatcagaattctgccgccaaggtgtcccccgccaccaggtccgacaccgtggccaccatgatgagggagaaggggatgtacttcaggagagagctggaccgctactccttggactctgaagacctctacagtcggaatgccggcccgcaagccaacttccgcaacaagagaggccagatgccagaaaacccatactcagaggtggggaagatcgccagcaaagccgtctacgtccccgccaagcccgccaggcggaaggggatgctggtgaagcagtccaacgtggaggacagccccgagaagacgtgctccatccctatcccgaccatcatcgtgaaggagccgtccaccagcagcagcggcaagagcagccagggcagcagcatggagatcgacccccaggccccggagccaccgagccagctgcggcctgacgaaagcctgaccgtcagcagcccctttgccgccgccatcgccggagccgtccgcgaccgtgagaagcggctggaagccaggaggaactccccggccttcctctccacagacctgggggatgaggatgtgggcctggggccacccgcccccaggacgcggccctccatgttccccgaggagggggattttgctgacgaggacagcgctgagcagctgtcatcccccatgccgagtgccacgcccagggagcccgaaaaccatttcgtgggtggcgccgaggccagtgctccgggtgaggctgggaggccgctgaattccacgtccaaagcccaggggcccgagagcagcccagcagtgccctccgcgagcagcggcacagccggccccgggaattatgtccacccactcacagggcggctgcttgatcccagctccccgctggccctggcactctccgcaagggaccgagccatgaaggagtctcaacagggacccaaaggggaggcccccaaggccgacctcaacaaacctctttacattgataccaaaatgcggcccagcctggatgccggcttccctacggtcaccaggcagaacacccggggacccctgaggcggcaggagacggagaacaagtacgagaccgacctgggccgagaccggaaaggcgatgacaagaagaacatgctgatcgacatcatggacacgtcccagcagaagtcggctggcctgctgatggtgcacaccgtggacgccactaagctggacaacgccctgcaggaagaggacgagaaggcagaggtggagatgaagccagacagctcgccgtccgaggtgccagaaggtgtttccgaaaccgaaggtgctttacagatctccgctgcccccgagcccaccaccgtgcccggcagaaccatcgtcgcggtgggctccatggaagaggcggtgattttgccattccgcatccctcctccccctctggcatccgtggacttggatgaggattttatttttacagagccattgcctcctcccctggaatttgcaaatagttttgatatccccgatgaccgggcagcttctgtcccggctctctcagacttagtgaagcagaagaaaagcgacacccctcagtccccttcgttgaactccagccaaccaaccaactctgcagacagcaagaagccagccagtctttcaaactgtctgcctgcctcattcctgccaccccctgaaagctttgacgccgtcgccgactctgggatcgaggaggtggacagccggagtagcagcgaccaccacctcgagacgaccagcactatctccaccgtgtctagcatctccaccctgtcttccgaaggtggagagaatgtggacacctgcacagtctatgcagatgggcaagcatttatggttgacaaacccccagtacctcctaagccaaaaatgaagcccatcattcacaaaagcaatgcactttatcaagacgcgctcgtggaagaagatgtagatagctttgttatccccccgcccgctcccccgcccccgccgggcagtgcccagcctgggatggccaaggttctccagccaaggacctccaagttgtggggcgacgtcacagagatcaaaagcccgattctctcaggcccaaaggcaaacgttattagtgaattgaactctatcctacagcaaatgaaccgagagaaattggcaaagccgggggaaggactggattcaccaatgggagccaagtccgccagcctcgctccaagaagcccggagatcatgagcaccatctcaggtacacggagcacgacggtcaccttcactgttcgccccggcacctcccagcccatcaccctgcagagccggccccccgactatgaaagcaggacctcaggaacaagacgtgccccaagccctgtggtctcgccaacagagatgaacaaagagaccctgcccgcccccctgtctgctgccaccgcctctccttctcccgctctctcagatgtctttagccttccaagccagcccccttctggggatctatttggcttgaacccagcgggacgcagtaggtcgccatccccctcgatactgcaacagccaatctcaaataagccttttacaactaaacctgtccacctgtggactaaaccagatgtggccgattggctggaaagtctaaacttgggtgaacataaagaggccttcatggacaatgagatcgatggcagtcacttaccaaacctgcagaaggaggacctcatcgatcttggggtaactcgagtcgggcacagaatgaacatagaaagggctttgaaacagctgctggacagataaggacggctgctctccacctcgcagactgctcttgttataagtagagatgggctcgtgctgaaacatctgaatgccaagcgaagtctgtgagcatcaaccccactccatgggtttgtctcctggtacccaaagaaatactgagttgtgtccacaacatggctgggtcttcagacccctggctcaccatgtgggtgtcttgggcagtttctatcacacatgggacaaggggagggagtttttctaacatggaaaaagattctcagcctgccgcccagcatgcaggtggcctcgctttgccgggtccgagaggctccccgtcaattttgcacgggatcctagctcttgtaggcagacaccagtgcactctagatacctcctgagacctccgtcctctgctttccgggcagctctcaccaccccaggccccggcatgaggcctttcctcagtcctgtggcctctcagaggacacctgatgctcacctgcccctctttctcctgcacttggcttgcagtgagatgctcccagatgcatttgtccagtgccccatcatgggcctgaaaggcagagaaactttttcctacacagattcttttccccatctcctcctgtggtttgcatccatggctctttggccatgaggttcctggcagtgctgggagtttggatgggatcgtgcccagctttgcttagctttctttatttctgcaaatctgttagcataattccaaggtggccaagcagatgtcacatggagttagtcaaagcacaaagtcacgattccacaatggaggggagacctggccaagggagccagccagcgtgcaactgcccaagctccaggtctccaggacaagagcagttgtctgccatgagcacccatccaggatggagaataagggcttctctgcctctcagaattctttttaattgaagatgtcttgagctctgcaaagatcagagcaggtgagcatccactttgacatgaaggacaagaagacgcatggctcatggcgggcacatgcggctgccagtgagacagcgtctcctctgggagctgggcgggcacagcatcctcagttctgtgcccagccaagggtgagcatctctgctgagacagtccttttgctctcggaggccagggaagatggtacttagaggcttttcccctatcgctctgggtgtctaggaatcccaccagcttgtcttaacagtacaacagcttctttgaggacccagtgggtatggagtatagacagaacccagggttgagaacagaaggtgggcggcaggatcagagtgaaagcagaggcgtgaggagaggaaagcagggaggtctcctgggctgccaggtcagcctctctggcaaggctttcttgagccccgcccctttctttccccggagtccctccaccccataacaatacctcgaatttccaaaagaggtcaccagatgcacatgggccgcaaaacacacagtcaggcttccagcacattctcccccatttggaggatactcgaatgtcaggtttttggttttattattatttcagaactagctcagcccatctctaattataaaacatggttttgttttttttttttcctttttttcttgattaggtctggaacagctctagaatgaacacataaaatttagcaatttaaaatctttctttactgcaagtttaaatagttgtacagatagtttataagcacaatattttaagaaaaaaaagtggctggtctactaggcagcctttgtgccacttcagtgctagaaagttaaagaaaaaaaaacttttgtgatttaataatactatttctgtggaataattataaaagtatgacctttttaaatcaaccttatttggatgcatctgaaccagcagagctgtgttatattttctatctttgctagaacttcgtcattgaaggacaatttcttcaaagtggttacaattcataatgcagcagtttctccaaaaacaaaaacaaaacacacaccacacacacgcgcttttccagtcacacacccctgatgttggaaccaagtttttggaccttctgttccaaaaccttttgcaggtcaatctttgtatttgaaatgatccaatccaacttgaagtcaattgaatattaaggcgctttacttccgtgtgctttcagtttttccatcatgagatgaatgagcattactctagataaatttcaagacaggatactacaggtggcctgctgaggctgccccatattttagaaaatgtaaaaatggtggtttggccattaatttgtcttccatttgatgataccgcaaaattccgtgagtccattcctttggcatggcactttccctgggcctacagttggtattacctctgtgctcagtgccaggcaaaacactagctcaaaggagagtcaaggaaaccgctggcagacgataaccagtcgaaactcgtgacttcggtttgttgaactttggcagccagttggtgagggccagatgttattccctttcttaaagatactccaagccacatgccactaaccacaagcaagctggctgcaagactaaagagctgataacatagtttatttttacactgtcttattatagagaagtaatagacctatcagaacctgcactgaccaacaaataaacacatgttgccaagatgaatcggtctctatctctatctgcttattttggtactgaaagcaatagttcctcattcaaatcaccacccactgttctccccctttgggacatgttaggacgaggccctattccatgcccctctttaatggtggaacaaatgttaaactgctcatctaaagatcatgttgatattattccaggttttaagatcaacttttgttacatactgtaatttaaataaactgcatttacatgcctagtttctgtaatattgtgtatacaaaacccaaatctctcaaaatgtaaattatgtatacctgccaagataccttttccagggtgtctgcgcacattttaagttaattcacataatataaaaattactcaatgtgactgttgatttgctgaactttacatatcacaaagtgaattatttgtgatactttagttaataaaatggtaaatttttttctcagttattgaacaagcaagcattatccagttgatctggcaatgactttttgtgtgtgggccacaatattgattttcccattaacaatttttttttgttttttaaatactaatatgtttcacactatagtttgtgtaacaacacgtgttcgcattatctatgttgctgttacttttgtgcttttattctttttagactttataaaaaaaaaaaaaagctcctgtaatttgcactttctcccaatccttaaatctcttgtatggcaaccaaaattactgtaaaaaaataaatatactattgcactaaggttgtggttctgattgcaaacaaacagtgaacactgtctgaattaaacaaaaagctgcccgacttgcaatctaatgtagattatctcaggcattgtggccagctctgcctctctaaaactgaccagaaaaatctctctcatcgagtaaacaggctcctgtcactgagctaatctgccttggttccatttccttattctcaatttatcaatggatacgtgcatgttatttcagaattatgcaaaacgtcaaaatctgcttctgtgaccgctgctataggcgtggagctgaggctcggcttttccttttgttctgggtggaagcagcggtgccgcggagggccagccagatccggacccttcccttagggtccagtctccccacaccccagcagggtgtcttctagccataaggccaagggagtggcagaactgggccgcctctctggttgacaagcaaaccacatgctaaggcttggagcaagagagaatttgtgtctattggcaaagaactaagccaggaagacatgggccatccctccgctttagggaagcatattttaaacctaaacgttgaacttcttctttggcctcaccagtgaaaacttgttgtctttagttcctaaagtttcttctactttggcacattccccagttgagcagcagcctctatgcttccacgttcaggaaaaattccagtcctcatatcttttgtagttcaccctcaagctctcccgcttcaccatccaatagtttctcccaaaccttggcacccccctagactttgcttccaatggtttcttccagaccacttttcctagatgaatatattcgtttaccttactaggaaaattattggaagattttttcttttacttgaaattggaggcattttaataactggcgaactggaatgtgtttctgtatttgtagacaaccatgaacccatgcaagtaggtgaacattccacagtggctgggtgaccacagcagctgcatgcagacaggactgcccgtgctttgtggggaatcagagaatttccaaacttgtttctcagacttccgcagatctcatcactttgatttctaatccatgctgtattggtgattttgtttatcgttcctgtaacttgttctacattccacagtctttaccgttttatgttcaaaattacaacaatccctgtccattgattccactctggaactctttgttcatgccaattttgaaattttaatacgagccttcaaataaacacagaaaagaaaaaaaaaaaggaaaaaaaataaagtgtgtgccttgggtgttttgaacctgatctgcataaaaccatattgtattcaaatgctgtatctttcatgaaaggataaatatatcttcaatgtattaatgtagctgataaaatagttatagtgccttgttttctgaactgagaagcccatatcaatgcacaacgtaaagaaaggacggttcgagctatgaaatgttgaggacacctacacgtgattctggagcctttctcatcataagactgtggaaaatacacagtcgtttaagttaaaaataaaaagtaaattga

SEQ ID NO: 1382 - protein, 1254 aa, Homo sapiens
MMMNVPGGGAAAVMMTGYNNGRCPRNSLYSDCIIEEKTVVLQKKDNEGFGFVLRGAKADTPIEEFTPTPAFPALQYLESVDEGGVAWQAGLRTGDFLIEVNNENVVKVGHRQVVNMIRQGGNHLVLKVVTVTRNLDPDDTARKKAPPPPKRAPTTALTLRSKSMTSELEELVDKDKPEEIVPASKPSRAAENMAVEPRVATIKQRPSSRCFPAGSDMNSVYERQGIAVMTPTVPGSPKAPFLGIPRGTMRRQKSIDSRIFLSGITEEERQFLAPPMLKFTRSLSMPDTSEDIPPPPQSVPPSPPPPSPTTYNCPKSPTPRVYGTIKPAFNQNSAAKVSPATRSDTVATMMREKGMYFRRELDRYSLDSEDLYSRNAGPQANFRNKRGQMPENPYSEVGKIASKAVYVPAKPARRKGMLVKQSNVEDSPEKTCSIPIPTIIVKEPSTSSSGKSSQGSSMEIDPQAPEPPSQLRPDESLTVSSPFAAAIAGAVRDREKRLEARRNSPAFLSTDLGDEDVGLGPPAPRTRPSMFPEEGDFADEDSAEQLSSPMPSATPREPENHFVGGAEASAPGEAGRPLNSTSKAQGPESSPAVPSASSGTAGPGNYVHPLTGRLLDPSSPLALALSARDRAMKESQQGPKGEAPKADLNKPLYIDTKMRPSLDAGFPTVTRQNTRGPLRRQETENKYETDLGRDRKGDDKKNMLIDIMDTSQQKSAGLLMVHTVDATKLDNALQEEDEKAEVEMKPDSSPSEVPEGVSETEGALQISAAPEPTTVPGRTIVAVGSMEEAVILPFRIPPPPLASVDLDEDFIFTEPLPPPLEFANSFDIPDDRAASVPALSDLVKQKKSDTPQSPSLNSSQPTNSADSKKPASLSNCLPASFLPPPESFDAVADSGIEEVDSRSSSDHHLETTSTISTVSSISTLSSEGGENVDTCTVYADGQAFMVDKPPVPPKPKMKPIIHKSNALYQDALVEEDVDSFVIPPPAPPPPPGSAQPGMAKVLQPRTSKLWGDVTEIKSPILSGPKANVISELNSILQQMNREKLAKPGEGLDSPMGAKSASLAPRSPEIMSTISGTRSTTVTFTVRPGTSQPITLQSRPPDYESRTSGTRRAPSPVVSPTEMNKETLPAPLSAATASPSPALSDVFSLPSQPPSGDLFGLNPAGRSRSPSPSILQQPISNKPFTTKPVHLWTKPDVADWLESLNLGEHKEAFMDNEIDGSHLPNLQKEDLIDLGVTRVGHRMNIERALKQLLDR

SEQ ID NO: 1383 - DNA, 2050 bp, Homo sapiens
atgatgatgaacgtccccggcggaggagcggccgcggtgatgatgacgggctacaataatggtcgctgtccccggaattctctctacagtgactgcattattgaggagaagacggtggtcctgcagaaaaaagacaatgagggctttggattcgtgcttcgaggggccaaagctgacacacccattgaagaattcacaccaacaccggctttcccagccctacagtacctggagtccgtggatgaaggtggggtggcgtggcaagccggactaaggaccggggacttcttgattgaggttaacaatgagaatgttgtcaaagtcggccacaggcaggtggtgaacatgatccggcagggagggaatcacctggtccttaaggtggtcacggtgaccaggaatctggaccccgacgacaccgccaggaagaaagctcccccgcctccaaagcgggcaccgaccacagccctcaccctgcgctccaagtccatgacctcggagctggaggagctcgtggataaagcctcggtccggaagaagaaggataaacccgaggagatagtcccggcctccaagccctcccgcgctgctgagaacatggctgtggaaccgagggtggcgaccatcaagcagcggcccagcagccggtgcttcccggcgggctcagacatgaactctgtgtacgaacgccaaggaatcgccgtgatgacgcccactgttcctgggagcccaaaagccccgtttctgggcatccctcgaggtacgatgcgaaggcagaaatcaataggtaagaagtgtggcactcccccacagaagttgcccctgggctttcaaacacagccttaggcccctcaggaattctgagccctgggcctctcacagttgccttggcgtcccaccccagcaaggccctgccagcccacccaccagagggtgggaacctggccttgcccactagggagccattggaacatctgagtggcatgaaactcatcccccctgaaggacacaaaatctagggtggcttctgtcatcttgaagcccagttatctgtgataattccagcagggtaaagcgggagggtgggcggggtggtgcgagccaacccccctcccccaccctgccctgctcagggtgggaagggtaagtgggttccctgcattccccagccaccaccaggcctggagtatgagctcagcagatgtacttccaagggtggttgggtcaggtctcgaaatgaaataatgtactgtgtgttgcagaaaactgccttcctttcttcttaatgtcacaattattcctattgaccctgttgcaggcaaaggtacacttgaccttgagacaaggtcacacttgaccctttgagacagtccctttgtgagataattcagcattgcctttactgtgtcaattctggtagaagctaaggcccttgccctgtgagagttgtggaggcaaccctgggactctggtctgcccagcccaccccaggggcactgtcctgtgtgttctggaaatgcctctgggctgctgtgcaaaagcgcagcgtgcttgtgagtctcaggtggataactgtaggcagtcactaggcagtaagtggccgtggaggtggtgtctgctgtgcttaaagctccccctgcaccagcaaactcagggaaagctgcgtatttgtcttgcggttactggttaataacaactgatttcctcctgtcagacagcagaatctttctatcaggttagtgaaccttacggtttggaatctgtaatctgaatgtaacccagtttactttataaggtgtattcttaaattagtactccttgggaacagaattgccagacagccaactcagagtgactggtcaatggagaacactttgaacgagccatctttgcaatgccaaaatgtcctcccacaaggagtatgttaaatttggaatacccttatcgaatggaagttttcattggaataaattattgtagtttgtcctaggactttttttcatttcaagtaatttattttgctacctctttgaaaacctgcatgctccca

SEQ ID NO: 1384 - protein, 281 aa, Homo sapiens
MMMNVPGGGAAAVMMTGYNNGRCPRNSLYSDCIIEEKTVVLQKKDNEGFGFVLRGAKADTPIEEFTPTPAFPALQYLESVDEGGVAWQAGLRTGDFLIEVNNENVVKVGHRQVVNMIRQGGNHLVLKVVTVTRNLDPDDTARKKAPPPPKRAPTTALTLRSKSMTSELEELVDKASVRKKKDKPEEIVPASKPSRAAENMAVEPRVATIKQRPSSRCFPAGSDMNSVYERQGIAVMTPTVPGSPKAPFLGIPRGTMRRQKSIGKKCGTPPQKLPLGFQTQP

(The sequence listing continues in the following parts.)
